United States Patent Application Publication US 2017/0114356 A1 - sequence listing, part 38

SEQ ID NO: 50964 - DNA, 4315 bp, Zea Mays
ttatgccaaccaaaactccaccctcctctcgagcccgagcccatctgatcctccgattcagttcttctccccctaccaaaaggccgagcccccctcaggcctcagctccgcctccgcgctgccaaccatactcgtcaagccgtcacactttgtctctctcgtgccccgatactctttttctttttttttcttttcttttttttttttttttgcttccgggagcagcaaccgtcgccgtggccccgccttggatattccatcagttttcgggttcttggataggagaaagcggggcgctcaattccccccctcctgatccttgttccttgatcgccgccatgagcaacacgctgcttcgagtctacccttccgacctgaagatgccattcgagctcaggaagcagaactcagcgtgtcttgagctcgtcaacaagaccgaccggtcaagacgacgaaccctaggaagtactcggtgcgctctgcctccggtgtcgtgccgcccaggggatcctgtggcatcacaataacgatgcaagcgcccaaggagatgcccccggactaccactgcaaggacaagtttcttgttcagagcattgctgtggaggaggggacgacgcagaaggacattgtccctgacatgttcagtaaagcaccaggtaagttagttgaggagttcaagctgagggtggtctatgtccctgccaatcctccctcaccagtgcctgaggaaacagaggaagaggatggatctcttgattcagatgtggaccatgaagtatccacgtccaactctgcaacaggacaagggaatacatgtagatcacaaacatcagatgatgaggatgattctacatccaagttggaactggaaagaagatatgcagaggaaaacaagaagattcagaaagagctggatctcctccggaaaacaaaggcgtctcctcggggcttctctgcgtttgtgctgcttgtcttcttgttatcctcacttcttggatacctgatgttcggaagcagagcttagcaagttagcagctaatggctgcacatcatttgcggcaccggcagcggcacggctcttttagtacagtgtacagatatatacattaatagcgaagtagtcagtacataacagatatatagggctttcttgggtttcaagtgtccataggaatatatcttcagttttgaaatatgtcctttaattggcactcaaagttcaagatagcttgctgtagaccatcggctgcacagatgattgatgatgaggtcaactttggtaatatctttgatgcctcagaagaagttcaggttactgcaaagtttggtcccaagcaacggcccaaaacccgaaaaacagctctatcatccagatctgcagcgcctaatcctactgaagaaaccggagataggaaagtaggaaccttcagtcaagtcaattcttctaaagagcttaccagccaagaaaggacatccttgatgtgccctagtactgagtcagttgatattatcgctggttctcatagtattctcgatacaccattggaagatgcattgacagttccccagggttctctgtctggtgcttctgctgcagataggacttctcaatatggtgagcacaatgatgatccttctaagttagctacacaccaagaaaacttggtggtttcagatatcaacgtcccacctaacagttcatgtagcaaggctattgatgatatagttgaatttggggacatgtgtgatgtgcaaattgaagaggaaagagttacaaagttccaaccaaaggtgcaaacgaagctccttaaggaaatagccaaatctcggaagactaaccaaaaggtggaaacttccactgtagatgtggttacacaaaatggaaagggcaataatattcagacaaggctccatggcgatccggtacaggatcctaaaagtcatgaaagtgtgcagatcccagattctgaaggattattagcaactgataatagtaaaggttgcaatttagctaacctcaacaatctccttgaggagtcagtccaagaggaaacaatagctaagtttcgttctgatttgcaaccaaatctcgggaaggcttcatcccaggttgctgcgattaaaattaatgttgttgctgttgctccaatagttggagtttgtgacagcaacaatgacatgtacaaagaacctaaagatcaagaaaccatcactggtccagtggcttggtcaccacaggctgtgcatgctgatgttgatttagacaatcacaatgaaccaattaatcctcctattgatggtactcaatcaatgtttggcgaagtcccaggaagagaaaagggaaaatcaaaatctgtatcttttgctctatcggatgtttctgggatagctagccctatagataccaattctgagatgggtaacatcggcgattcctgtagtgacaaattgactgatgaaaatttaagtaactcatctcgtcatatcgctgaaaagcattctattaccaaggaccaatattcaaatgagcaggaccatgagcgggagccactagatcatgctgttcaacagcaaccaaaatcggatgttggagaaagagcatcatctatgaaacgacgttgcaggaaaaaggtgcaaaaagttgggacacctaatcacactgttgatgattattttggtgaagactgtgtcgaaccttcattagctgaagaagataacgatactggtgatcattacactactggtaataagcataaggctaggaaaaagtcaaggggtggtgtagaagagtcacagcagcagaaagctcaaaaaaataaaagcaaggtgtcttcacggggccgcaaacggaccttgaaggatgaatcgacagagaagcctgagaagaagctaacccacagaatacgtcagaggataccaaaagaggttaaggctttactggaaacacctcgtgagcagataaaacccatgaagctttgtgcatcacatctcaggttgttacaagaagctagagagcgtgttgatccaaaagggattccatccgggccatcctctaatacaagaaactttcaactagatgatatggatgatttgggctacagagatgaggaagctaggttctttgacaacgatataacagaggagcatgtacaaaatgcaacaaaattgaactaccattcctacatgaacaaaccagcccggggaaaatggtcaaaatcagataccgacttgttttatgagggtcttcgacaatttggtagcgattttgcaatgatacaacaattattccctgataagactcgccatcaggtgcggcagaaatttaaatctgaggagagaaaaaatccattgctagtccatgatgctatagttcatcgctcaggagatagtttgtatttcaaaaaggtaattaagcagctgaacattgaagatgttgtgctgccagatattaaaagtacacaaaacaagatggtgcatcaagtgaaagaggccctggaaatgagaatgtactggatgatttaaacgaggaggaaaatagttcaaattggttgaacgaagagcatgacgtacagatggccgatgtggaagaagagcatggcgaacagatggatgatgtggaagaagagcgtgatcttggaaatgatggtggtgatgatgatcttggggatgtttttgattggtactagtttatgttaaacacggatgcgagcgtgaatatgagttggtctagctctgcataacaggggtagtttttaggaaaaaaattctttgcatccggaatgcaaagaatcccttttatgactgatttggtgactaggtatcacagagagattggagtggattgagagcctctaatctctccgtgatcctcttacagcctctaacatccaccacctcgtggtccatataagggcttattcggttattcttgtcccatgtggatttgatgagattggaaaaaatatgaaggattttaacttgttcgagatttaaatctatcaaatctcatcaaatccatatggattgagaggaaagcaaacaagccctaaatagaagaaaaacaaattactattggattaagttataaattttgatctgtttttgtggaccttcaagtggtgtatgtgagtggctgtaaaagagtgtgtttgcatctgggatatacagattttttaccctagtttttagatgttgccacagttgtacggttagaattgttcggctggactatcgcttggacgatcaagatactaggtttcctccaaaaacactgcaatactcgaagagcgatgagtcactagacaacatatccaat

SEQ ID NO: 50965 - DNA, 6447 bp, Zea Mays
ttatgccaaccaaaactccaccctcctctcgagcccgagcccatctgatcctccgattcagttcttctccccctaccaaaaggccgagcccccctcaggcctcagctccgcctccgcgctgccaaccatactcgtcaagccgtcacactttgtctctctcgtgccccgatactctttttctttttttttcttttcttttttttttttttttgcttccgggagcagcaaccgtcgccgtggccccgccttggatattccatcagttttcgggttcttggataggagaaagcggggcgctcaattccccccctcctgatccttgttccttgatcgccgccatgagcaacacgctgcttcgagtctacccttccgacctgaagatgccattcgagctcaggaagcagaactcagcgtgtcttgagctcgtcaacaagaccgaccggtgggtggctttcaaggtcaagacgacgaaccctaggaagtactcggtgcgctctgcctccggtgtcgtgccgcccaggggatcctgtggcatcacaataacgatgcaagcgcccaaggagatgcccccggactaccactgcaaggacaagtttcttgttcagagcattgctgtggaggaggggacgacgcagaaggacattgtccctgacatgttcagtaaagcaccaggtaagttagttgaggagttcaagctgagggtggtctatgtccctgccaatcctccctcaccagtgcctgaggaaacagaggaagaggatggatctcttgattcagatgtggaccatgaagtatccacgtccaactctgcaacaggacaagggaatacatgtagatcacaaacatcagatgatgaggtgtccctagttccacctaaatatcatttgtctttgtgttccctcagattcataaatatggatcttgtgctgatcacctgctgcatagcatattatcttaaaaggacggatttaacttcggtgttcatggaaatactgtgctctaaaaattcgcagtagtagcctaatttctttcctgctctgacgtcatcctcctctgggcgacacgggcggctccccatcgaccgcacccaccgccgccggtcttcacccccgccgtcgccggagcagctcgccggaagttcgacgagcagcgaggagggcggcggcgggactgctctctcactcatttccctcccttcttccacccactccactcctccctcttcctggaggtggccggcgacctgatccgccgctgggaaggccggatcggcgggctgactggccggatctaggggctggtcgccgtccgccgctcctccctgctggcatgggcaggtggccttgtggccgcaaccatggtggctcgtgcggctagcccgtggcggtagtgcccgcgctcgcgtggccatggccgtggctggccggcgacgttggcgcccacgcacgcggccggcccgctgcggcggcggcgtggctcgcttgtgcttgtagcgtggtgcttggatcgggggcgttggtggatctgcggctgccagcggtgccttctgcaggtggtgggtcatggtcgtggggctgggggccggatcttgagcctctccggctagatttatctctccgcctctcgtttcggcctgtggtgtgggcagggccggctggctccgtgcgttgcggcgtgtggtgggaggtcctgcgacgaaagccatgctcgcttgcaggcggacagcggtgacgcccgcgggcgccacccctaccctatcgagggtgccgtctttggacctctcgccccatgcgggaaccctcgccttggccttcttaggtctctcgctggtgctcgaccggcgttggggctctgagggttggggctggtgggttggtgcgtcggtggacggcagaaggtgacaacacgcgatggcttggcggggtgacatcggcgtggctgacctttcagctttcttcttggtgctggcgatctacactgctctgctaggtcttcagaggaaactttgcttggtttgtaccaggcgggcggcgacgacttttcgacgtcgtttctccttcttgaaggtgcggcccagaagacctgcagtttgtgtgttcgttcgtgttgtggaggctcttcgtcgctccgcttggctcaatggtgtccgtgttgtggaggctcttcgtcactccgcttggctcgatggtgtccgggcctttgtcgctttaggcgtctgctcgctcccggagttcgacgttgtggatctttgctcgtggtgaagaatcggagctgcctcgtgtgggtgtgttgaggcttggcaacgatggcgcgccgcggtcttattccttgcgtcggtgtctgaatgtaagcgtcgtcgagttgctttggcagtgtgcggctcgtcttgggaagtcggagctgctcgtctcttgtgtttgagtttggcaacgatgactctagatgtgtttgtgtgtggggactgtcattgtctaagttgtttgttaggtcgttcgccggtttttctactgtgcgttctgtgtaggttttaggcccgattttccaaaaaactgggtcaattccattcttcttaattgagaggcagagctcctaccatcacgttaaaaaaaatcgcggtagttctttcttcttttttgatgctattgattacactgaatagtttagttttcatgaaattttatcataatacctgcacccctcctcgctcaaccagaaaacacacacaaaaaagaggacagaaaaaacctatcattagaagaaacatgctcctggataactgtaatgtgaacacctttctctttacaagttattgtatcagaatgacatttgacaattgacagatttgattccttacattatttctaccatgattgtcggcaccattagcctaagacgttagaatttcaaatatttgtctatgtctgccctgaatgttatccttgacatgccactgattgttttgtgactcttcaggatgattctacatccaagttggaactggaaagaagatatgcagaggaaaacaagaagattcagaaagagctggatctcctccggaaaacaaaggcgtctcctcggggcttctctgcgtttgtgctgcttgtcttcttgttatcctcacttcttggatacctgatgttcggaagcagagcttagcaagttagcagctaatggctgcacatcatttgcggcaccggcagcggcacggctcttttagtacagtgtacagatatatacattaatagcgaagtagtcagtacataacagatatatagggctttcttgggtttcaagtgtccataggaatatatcttcagttttgaaatatgtcctttaattggcactcaaagttcaagatagcttgctgtagaccatcggctgcacagatgattgatgatgaggtcaactttggtaatatctttgatgcctcagaagaagttcaggttactgcaaagtttggtcccaagcaacggcccaaaacccgaaaaacagctctatcatccagatctgcagcgcctaatcctactgaagaaaccggagataggaaagtaggaaccttcagtcaagtcaattcttctaaagagcttaccagccaagaaaggacatccttgatgtgccctagtactgagtcagttgatattatcgctggttctcatagtattctcgatacaccattggaagatgcattgacagttccccagggttctctgtctggtgcttctgctgcagataggacttctcaatatggtgagcacaatgatgatccttctaagttagctacacaccaagaaaacttggtggtttcagatatcaacgtcccacctaacagttcatgtagcaaggctattgatgatatagttgaatttggggacatgtgtgatgtgcaaattgaagaggaaagagttacaaagttccaaccaaaggtgcaaacgaagctccttaaggaaatagccaaatctcggaagactaaccaaaaggtggaaacttccactgtagatgtggttacacaaaatggaaagggcaataatattcagacaaggctccatggcgatccggtacaggatcctaaaagtcatgaaagtgtgcagatcccagattctgaaggattattagcaactgataatagtaaaggttgcaatttagctaacctcaacaatctccttgaggagtcagtccaagaggaaacaatagctaagtttcgttctgatttgcaaccaaatctcgggaaggcttcatcccaggttgctgcgattaaaattaatgttgttgctgttgctccaatagttggagtttgtgacagcaacaatgacatgtacaaagaacctaaagatcaagaaaccatcactggtccagtggcttggtcaccacaggctgtgcatgctgatgttgatttagacaatcacaatgaaccaattaatcctcctattgatggtactcaatcaatgtttggcgaagtcccaggaagagaaaagggaaaatcaaaatctgtatcttttgctctatcggatgtttctgggatagctagccctatagataccaattctgagatgggtaacatcggcgattcctgtagtgacaaattgactgatgaaaatttaagtaactcatctcgtcatatcgctgaaaagcattctattaccaaggaccaatattcaaatgagcaggaccatgagcgggagccactagatcatgctgttcaacagcaaccaaaatcggatgttggagaaagagcatcatctatgaaacgacgttgcaggaaaaaggtgcaaaaagttgggacacctaatcacactgttgatgattattttggtgaagactgtgtcgaaccttcattagctgaagaagataacgatactggtgatcattacactactggtaataagcataaggctaggaaaaagtcaaggggtggtgtagaagagtcacagcagcagaaagctcaaaaaaataaaagcaaggtgtcttcacggggccgcaaacggaccttgaaggatgaatcgacagagaagcctgagaagaagctaacccacagaatacgtcagaggataccaaaagaggttaaggctttactggaaacacctcgtgagcagataaaacccatgaagctttgtgcatcacatctcaggttgttacaagaagctagagagcgtgttgatccaaaagggattccatccgggccatcctctaatacaagaaactttcaactagatgatatggatgatttgggctacagagatgaggaagctaggttctttgacaacgatataacagaggagcatgtacaaaatgcaacaaaattgaactaccattcctacatgaacaaaccagcccggggaaaatggtcaaaatcagataccgacttgttttatgagggtcttcgacaatttggtagcgattttgcaatgatacaacaattattccctgataagactcgccatcaggtgcggcagaaatttaaatctgaggagagaaaaaatccattgctagtccatgatgctatagttcatcgctcaggagatagtttgtatttcaaaaaggtaattaagcagctgaacattgaagatgttgtgctgccagatattaaaagtacacaaaacaagatggtgcatcaagtgaaagaggccctggaaatgagaatgtactggatgatttaaacgaggaggaaaatagttcaaattggttgaacgaagagcatgacgtacagatggccgatgtggaagaagagcatggcgaacagatggatgatgtggaagaagagcgtgatcttggaaatgatggtggtgatgatgatcttggggatgtttttgattggtactagtttatgttaaacacggatgcgagcgtgaatatgagttggtctagctctgcataacaggggtagtttttaggaaaaaaattctttgcatccggaatgcaaagaatcccttttatgactgatttggtgactaggtatcacagagagattggagtggattgagagcctctaatctctccgtgatcctcttacagcctctaacatccaccacctcgtggtccatataagggcttattcggttattcttgtcccatgtggatttgatgagattggaaaaaatatgaaggattttaacttgttcgagatttaaatctatcaaatctcatcaaatccatatggattgagaggaaagcaaacaagccctaaatagaagaaaaacaaattactattggattaagttataaattttgatctgtttttgtggaccttcaagtggtgtatgtgagtggctgtaaaagagtgtgtttgcatctgggatatacagattttttaccctagtttttagatgttgccacagttgtacggttagaattgttcggctggactatcgcttggacgatcaagatactaggtttcctccaaaaacactgcaatactcgaagagcgatgagtcactagacaacatatccaat

SEQ ID NO: 50966 - DNA, 4025 bp, Zea Mays
catctgatcctccgattcagttcttctccccctaccaaaaggccgagcccccctcaggcctcagctccgcctccgcgctgccaaccatactcgtcaagccgtcacactttgtctctctcgtgccccgatactctttttctttttttttcttttcttttttttttttttttgcttccgggagcagcaaccgtcgccgtggccccgccttggatattccatcagttttcgggttcttggataggagaaagcggggcgctcaattccccccctcctgatccttgttccttgatcgccgccatgagcaacacgctgcttcgagtctacccttccgacctgaagatgccattcgagctcaggaagcagaactcagcgtgtcttgagctcgtcaacaagaccgaccggtcaagacgacgaaccctaggaagtactcggtgcgctctgcctccggtgtcgtgccgcccaggggatcctgtggcatcacaataacgatgcaagcgcccaaggagatgcccccggactaccactgcaaggacaagtttcttgttcagagcattgctgtggaggaggggacgacgcagaaggacattgtccctgacatgttcagtaaagcaccaggtaagttagttgaggagttcaagctgagggtggtctatgtccctgccaatcctccctcaccagtgcctgaggaaacagaggaagaggatggatctcttgattcagatgtggaccatgaagtatccacgtccaactctgtacgtactaaataatcttactgcatgtgagcaaatgatgccatgttcgttcctagtgtaatatgattggtgccttcaattgtttttcaggcaacaggacaagggaatacatgtagatcacaaacatcagatgatgaggatgattctacatccaagttggaactggaaagaagatatgcagaggaaaacaagaagattcagaaagagctggatctcctccggaaaacaaaggcgtctcctcggggcttctctgcgtttgtgctgcttgtcttcttgttatcctcacttcttggatacctgatgttcggaagcagagcttagcaagttagcagctaatggctgcacatcatttgcggcaccggcagcggcacggctcttttagtacagtgtacagatatatacattaatagcgaagtagtcagtacataacagatatatagggctttcttgggtttcaagtgtccataggaatatatcttcagttttgaaatatgtgtgagtaaccgttcatgtttatactctatcatccaaatatatgatgtttactatataataaagctataaaagtgagacaaatcagtgttggagaaagacaaattatggccttgaaactcatggagaaagacaaattatcacgttatttaagttaacacgccaaatttcctctacctaataacattgctattactgtagctgtatgcagaaagtataaacacctaggtgctaggctgagcctcatcgcctagcatttaaaaaaacattgagtatttgctgactgaggtatactttgagagttgggcttagatatgttacagatgatgctaatatatgactttctttgaggggtcctcgtaaaccaatcgggcattgccccaactatccttgattttatttgtctgttctgctgtagccatgtatccattgttgtcgttgagtacctttgccacggtttagttagttatctcactgcgagttgtcctccatcttgaactgtcgttactcacatgtgatgttgtatcatatttttcttcatctatcgctttcgatccttgtaaattattggttccattaaaggctctttgcattggggcattcatttggtagtcatgtatttagttcaaatttatattaagttccagtacgttctggttgaataccccatcttaactctacatgtttaatgatttttatttccttttttgctggtctgattctatgtttgcccccattgctgcttcctaaacctgcaatattcatttcagcctttaattggcactcaaagttcaagatagcttgctgtagaccatcggctgcacagatgattgatgatgaggtcaactttggtaatatctttgatgcctcagaagaagttcaggttactgcaaagtttggtcccaagcaacggcccaaaacccgaaaaacagctctatcatccagatctgcagcgcctaatcctactgaagaaaccggagataggaaagtaggaaccttcagtcaagtcaattcttctaaagagcttaccagccaagaaaggacatccttgatgtgccctagtactgagtcagttgatattatcgctggttctcatagtattctcgatacaccattggaagatgcattgacagttccccagggttctctgtctggtgcttctgctgcagataggacttctcaatatggtgagcacaatgatgatccttctaagttagctacacaccaagaaaacttggtggtttcagatatcaacgtcccacctaacagttcatgtagcaaggctattgatgatatagttgaatttggggacatgtgtgatgtgcaaattgaagaggaaagagttacaaagttccaaccaaaggtgcaaacgaagctccttaaggaaatagccaaatctcggaagactaaccaaaaggtggaaacttccactgtagatgtggttacacaaaatggaaagggcaataatattcagacaaggctccatggcgatccggtacaggatcctaaaagtcatgaaagtgtgcagatcccagattctgaaggattattagcaactgataatagtaaaggttgcaatttagctaacctcaacaatctccttgaggagtcagtccaagaggaaacaatagctaagtttcgttctgatttgcaaccaaatctcgggaaggcttcatcccaggttgctgcgattaaaattaatgttgttgctgttgctccaatagttggagtttgtgacagcaacaatgacatgtacaaagaacctaaagatcaagaaaccatcactggtccagtggcttggtcaccacaggctgtgcatgctgatgttgatttagacaatcacaatgaaccaattaatcctcctattgatggtactcaatcaatgtttggcgaagtcccaggaagagaaaagggaaaatcaaaatctgtatcttttgctctatcggatgtttctgggatagctagccctatagataccaattctgagatgggtaacatcggcgattcctgtagtgacaaattgactgatgaaaatttaagtaactcatctcgtcatatcgctgaaaagcattctattaccaaggaccaatattcaaatgagcaggaccatgagcgggagccactagatcatgctgttcaacagcaaccaaaatcggatgttggagaaagagcatcatctatgaaacgacgttgcaggaaaaaggtgcaaaaagttgggacacctaatcacactgttgatgattattttggtgaagactgtgtcgaaccttcattagctgaagaagataacgatactggtgatcattacactactggtaataagcataaggctaggaaaaagtcaaggggtggtgtagaagagtcacagcagcagaaagctcaaaaaaataaaagcaaggtgtcttcacggggccgcaaacggaccttgaaggatgaatcgacagagaagcctgagaagaagctaacccacagaatacgtcagaggataccaaaagaggttaaggctttactggaaacacctcgtgagcagataaaacccatgaagctttgtgcatcacatctcagccaaaagggattccatccgggccatcctctaatacaagaaactttcaactagatgatatggatgatttgggctacagagatgaggaagctaggttctttgacaacgatataacagaggagcatgtacaaaatgcaacaaaattgaactaccattcctacatgaacaaaccagcccggggaaaatggtcaaaatcagataccgacttgttttatgag

SEQ ID NO: 50967 - DNA, 5017 bp, Zea Mays
catctgatcctccgattcagttcttctccccctaccaaaaggccgagcccccctcaggcctcagctccgcctccgcgctgccaaccatactcgtcaagccgtcacactttgtctctctcgtgccccgatactctttttctttttttttcttttcttttttttttttttttgcttccgggagcagcaaccgtcgccgtggccccgccttggatattccatcagttttcgggttcttggataggagaaagcggggcgctcaattccccccctcctgatccttgttccttgatcgccgccatgagcaacacgctgcttcgagtctacccttccgacctgaagatgccattcgagctcaggaagcagaactcagcgtgtcttgagctcgtcaacaagaccgaccggtgggtggctttcaaggtcaagacgacgaaccctaggaagtactcggtgcgctctgcctccggtgtcgtgccgcccaggggatcctgtggcatcacaataacgatgcaagcgcccaaggagatgcccccggactaccactgcaaggacaagtttcttgttcagagcattgctgtggaggaggggacgacgcagaaggacattgtccctgacatgtaaagcaccaggtaagttagttgaggagttcaagctgagggtggtctatgtccctgccaatcctccctcaccagtgcctgaggaaacagaggaagaggatggatctcttgattcagatgtggaccatgaagtatccacgtccaactctgcaacaggacaagggaatacatgtagatcacaaacatcagatgatgaggatgattctacatccaagttggaactggaaagaagatatgcagaggaaaacaagaagattcagaaagagctggatctcctccggaaaacaaaggcgtctcctcggggcttctctgcgtttgtgctgcttgtcttcttgttatcctcacttcttggatacctgatgttcggaagcagagcttagcaagttagcagctaatggctgcacatcatttgcggcaccggcagcggcacggctcttttagtacagtgtacagatatatacattaatagcgaagtagtcagtacataacagatatatagggctttcttgggtttcaagtgtccataggaatatatcttcagttttgaaatatgtgtgagtaaccgttcatgtttatactctatcatccaaatatatgatgtttactatataataaagctataaaagtgagacaaatcagtgttggagaaagacaaattatggccttgaaactcatggagaaagacaaattatcacgttatttaagttaacacgccaaatttcctctacctaataacattgctattactgtagctgtatgcagaaagtataaacacctaggtgctaggctgagcctcatcgcctagcatttaaaaaaacattgagtatttgctgactgaggtatactttgagagttgggcttagatatgttacagatgatgctaatatatgactttctttgaggggtcctcgtaaaccaatcgggcattgccccaactatccttgattttatttgtctgttctgctgtagccatgtatccattgttgtcgttgagtacctttgccacggtttagttagttatctcactgcgagttgtcctccatcttgaactgtcgttactcacatgtgatgttgtatcatatttttcttcatctatcgctttcgatccttgtaaattattggttccattaaaggctctttgcattggggcattcatttggtagtcatgtatttagttcaaatttatattaagttccagtacgttctggttgaataccccatcttaactctacatgtttaatgatttttatttccttttttgctggtctgattctatgtttgcccccattgctgcttcctaaacctgcaatattcatttcagcctttaattggcactcaaagttcaagatagcttgctgtagaccatcggctgcacagatgattgatgatgaggtcaactttggtaatatctttgatgcctcagaagaagttcaggttactgcaaagtttggtcccaagcaacggcccaaaacccgaaaaacagctctatcatccagatctgcagcgcctaatcctactgaagaaaccggagataggaaagtaggaaccttcagtcaagtcaattcttctaaagagcttaccagccaagaaaggacatccttgatgtgccctagtactgagtcagttgatattatcgctggttctcatagtattctcgatacaccattggaagatgcattgacagttccccagggttctctgtctggtgcttctgctgcagataggacttctcaatatggtgagcacaatgatgatccttctaagttagctacacaccaagaaaacttggtggtttcagatatcaacgtcccacctaacagttcatgtagcaaggctattgatgatatagttgaatttggggacatgtgtgatgtgcaaattgaagaggaaagagttacaaagttccaaccaaaggtgcaaacgaagctccttaaggaaatagccaaatctcggaagactaaccaaaaggtggaaacttccactgtagatgtggttacacaaaatggaaagggcaataatattcagacaaggctccatggcgatccggtacaggatcctaaaagtcatgaaagtgtgcagatcccagattctgaaggattattagcaactgataatagtaaaggttgcaatttagctaacctcaacaatctccttgaggagtcagtccaagaggaaacaatagctaagtttcgttctgatttgcaaccaaatctcgggaaggcttcatcccaggttgctgcgattaaaattaatgttgttgctgttgctccaatagttggagtttgtgacagcaacaatgacatgtacaaagaacctaaagatcaagaaaccatcactggtccagtggcttggtcaccacaggctgtgcatgctgatgttgatttagacaatcacaatgaaccaattaatcctcctattgatggtactcaatcaatgtttggcgaagtcccaggaagagaaaagggaaaatcaaaatctgtatcttttgctctatcggatgtttctgggatagctagccctatagataccaattctgagatgggtaacatcggcgattcctgtagtgacaaattgactgatgaaaatttaagtaactcatctcgtcatatcgctgaaaagcattctattaccaaggaccaatattcaaatgagcaggaccatgagcgggagccactagatcatgctgttcaacagcaaccaaaatcggatgttggagaaagagcatcatctatgaaacgacgttgcaggaaaaaggtgcaaaaagttgggacacctaatcacactgttgatgattattttggtgaagactgtgtcgaaccttcattagctgaagaagataacgatactggtgatcattacactactggtaataagcataaggctaggaaaaagtcaaggggtggtgtagaagagtcacagcagcagaaagctcaaaaaaataaaagcaaggtgtcttcacggggccgcaaacggaccttgaaggatgaatcgacagagaagcctgagaagaagctaacccacagaatacgtcagaggataccaaaagataaaacccatgaagctttgtgcatcacatctcaggttgttacaagaagctagagagcgtgttgatccaaaagggattccatccgggccatcctctaatacaagaaactttcaactagatgatatggatgatttgggctacagagatgaggaagctaggttctttgacaacgatataacagaggagcatgtacaaaatgcaacaaaattgaactaccattcctacatgaacaaaccagcccggggaaaatggtcaaaatcagataccgacttgttttatgagggtcttcgacaatttggtagcgattttgcaatgatacaacaattattccctgataagactcgccatcaggtgcggcagaaatttaaatctgaggagagaaaaaatccattgctagtccatgatgctatagttcatcgctcaggagatagtttgtatttcaaaaaggtaattaagcagctgaacattgaagatgttgtgctgccagatattaaaagtacacaaaacaagatggtgcatcaagtgaaagaggccctggaaatgagaatgtactggatgatttaaacgaggaggaaaatagttcaaattggttgaacgaagagcatgacgtacagatggccgatgtggaagaagagcatggcgaacagatggatgatgtggaagaagagcgtgatcttggaaatgatggtggtgatgatgatcttggggatgtttttgattggtactagtttatgttaaacacggatgcgagcgtgaatatgagttggtctagctctgcataacaggggtagtttttaggaaaaaaattctttgcatccggaatgcaaagaatcccttttatgactgatttggtgactaggtatcacagagagattggagtggattgagagcctctaatctctccgtgatcctcttacagcctctaacatccaccacctcgtggtccatataagggcttattcggttattcttgtcccatgtggatttgatgagattggaaaaaatatgaaggattttaacttgttcgagatttaaatctatcaaatctcatcaaatccatatggattgagaggaaagcaaacaagccctaaatagaagaaaaacaaattactattggattaagttataaattttgatctgtttttgtggaccttcaagtggtgtatgtgagtggctgtaaaagagtgtgtttgcatctgggatatacagattttttaccctagtttttagatgttgccacagttgtacggttagaattgttcggctggactatcgcttggacgatcaagatactaggtttcctccaaaaacactgcaatactcgaagagcgatgagtcactagacaacatatccaat

SEQ ID NO: 50968 - DNA, 6199 bp, Zea Mays
catctgatcctccgattcagttcttctccccctaccaaaaggccgagcccccctcaggcctcagctccgcctccgcgctgccaaccatactcgtcaagccgtcacactttgtctctctcgtgccccgatactctttttctttttttttcttttcttttttttttttttttgcttccgggagcagcaaccgtcgccgtggccccgccttggatattccatcagttttcgggttcttggataggagaaagcggggcgctcaattccccccctcctgatccttgttccttgatcgccgccatgagcaacacgctgcttcgagtctacccttccgacctgaagatgccattcgagctcaggaagcagaactcagcgtgtcttgagctcgtcaacaagaccgaccggtgggtggctttcaaggtcaagacgacgaaccctaggaagtactcggtgcgctctgcctccggtgtcgtgccgcccaggggatcctgtggcatcacaataacgatgcaagcgcccaaggagatgcccccggactaccactgcaaggacaagtttcttgttcagagcattgctgtggaggaggggacgacgcagaaggacattgtccctgacatgttcagtaaagcaccaggtaagttagttgaggagttcaagctgagggtggtctatgtccctgccaatcctccctcaccagtgcctgaggaaacagaggaagaggatggatctcttgattcagatgtggaccatgaagtatccacgtccaactctgtacgtactaaataatcttactgcatgtgagcaaatgatgccatgttcgttcctagtgtaatatgattggtgccttcaattgtttttcaggcaacaggacaagggaatacatgtagatcacaaacatcagatgatgaggtgtccctagttccacctaaatatcatttgtctttgtgttccctcagattcataaatatggatcttgtgctgatcacctgctgcatagcatattatcttaaaaggacggatttaacttcggtgttcatggaaatactgtgctctaaaaattcgcagtagtagcctaatttctttcctgctctgacgtcatcctcctctgggcgacacgggcggctccccatcgaccgcacccaccgccgccggtcttcacccccgccgtcgccggagcagctcgccggaagttcgacgagcagcgaggagggcggcggcgggactgctctctcactcatttccctcccttcttccacccactccactcctccctcttcctggaggtggccggcgacctgatccgccgctgggaaggccggatcggcgggctgactggccggatctaggggctggtcgccgtccgccgctcctccctgctggcatgggcaggtggccttgtggccgcaaccatggtggctcgtgcggctagcccgtggcggtagtgcccgcgctcgcgtggccatggccgtggctggccggcgacgttggcgcccacgcacgcggccggcccgctgcggcggcggcgtggctcgcttgtgcttgtagcgtggtgcttggatcgggggcgttggtggatctgcggctgccagcggtgccttctgcaggtggtgggtcatggtcgtggggctgggggccggatcttgagcctctccggctagatttatctctccgcctctcgtttcggcctgtggtgtgggcagggccggctggctccgtgcgttgcggcgtgtggtgggaggtcctgcgacgaaagccatgctcgcttgcaggcggacagcggtgacgcccgcgggcgccacccctaccctatcgagggtgccgtctttggacctctcgccccatgcgggaaccctcgccttggccttcttaggtctctcgctggtgctcgaccggcgttggggctctgagggttggggctggtgggttggtgcgtcggtggacggcagaaggtgacaacacgcgatggcttggcggggtgacatcggcgtggctgacctttcagctttcttcttggtgctggcgatctacactgctctgctaggtcttcagaggaaactttgcttggtttgtaccaggcgggcggcgacgacttttcgacgtcgtttctccttcttgaaggtgcggcccagaagacctgcagtttgtgtgttcgttcgtgttgtggaggctcttcgtcgctccgcttggctcaatggtgtccgtgttgtggaggctcttcgtcactccgcttggctcgatggtgtccgggcctttgtcgctttaggcgtctgctcgctcccggagttcgacgttgtggatctttgctcgtggtgaagaatcggagctgcctcgtgtgggtgtgttgaggcttggcaacgatggcgcgccgcggtcttattccttgcgtcggtgtctgaatgtaagcgtcgtcgagttgctttggcagtgtgcggctcgtcttgggaagtcggagctgctcgtctcttgtgtttgagtttggcaacgatgactctagatgtgtttgtgtgtggggactgtcattgtctaagttgtttgttaggtcgttcgccggtttttctactgtgcgttctgtgtaggttttaggcccgattttccaaaaaactgggtcaattccattcttcttaattgagaggcagagctcctaccatcacgttaaaaaaaatcgcggtagttctttcttcttttttgatgctattgattacactgaatagtttagttttcatgaaattttatcataatacctgcacccctcctcgctcaaccagaaaacacacacaaaaaagaggacagaaaaaacctatcattagaagaaacatgctcctggataactgtaatgatgattctacatccaagttggaactggaaagaagatatgcagaggaaaacaagaagattcagaaagagctggatctcctccggaaaacaaaggcgtctcctcggggcttctctgcgtttgtgctgcttgtcttcttgttatcctcacttcttggatacctgatgttcggaagcagagcttagcaagttagcagctaatggctgcacatcatttgcggcaccggcagcggcacggctcttttagtacagtcctttaattggcactcaaagttcaagatagcttgctgtagaccatcggctgcacagatgattgatgatgaggtcaactttggtaatatctttgatgcctcagaagaagttcaggttactgcaaagtttggtcccaagcaacggcccaaaacccgaaaaacagctctatcatccagatctgcagcgcctaatcctactgaagaaaccggagataggaaagtaggaaccttcagtcaagtcaattcttctaaagagcttaccagccaagaaaggacatccttgatgtgccctagtactgagtcagttgatattatcgctggttctcatagtattctcgatacaccattggaagatgcattgacagttccccagggttctctgtctggtgcttctgctgcagataggacttctcaatatggtgagcacaatgatgatccttctaagttagctacacaccaagaaaacttggtggtttcagatatcaacgtcccacctaacagttcatgtagcaaggctattgatgatatagttgaatttggggacatgtgtgatgtgcaaattgaagaggaaagagttacaaagttccaaccaaaggtgcaaacgaagctccttaaggaaatagccaaatctcggaagactaaccaaaaggtggaaacttccactgtagatgtggttacacaaaatggaaagggcaataatattcagacaaggctccatggcgatccggtacaggatcctaaaagtcatgaaagtgtgcagatcccagattctgaaggattattagcaactgataatagtaaaggttgcaatttagctaacctcaacaatctccttgaggagtcagtccaagaggaaacaatagctaagtttcgttctgatttgcaaccaaatctcgggaaggcttcatcccaggttgctgcgattaaaattaatgttgttgctgttgctccaatagttggagtttgtgacagcaacaatgacatgtacaaagaacctaaagatcaagaaaccatcactggtccagtggcttggtcaccacaggctgtgcatgctgatgttgatttagacaatcacaatgaaccaattaatcctcctattgatggtactcaatcaatgtttggcgaagtcccaggaagagaaaagggaaaatcaaaatctgtatcttttgctctatcggatgtttctgggatagctagccctatagataccaattctgagatgggtaacatcggcgattcctgtagtgacaaattgactgatgaaaatttaagtaactcatctcgtcatatcgctgaaaagcattctattaccaaggaccaatattcaaatgagcaggaccatgagcgggagccactagatcatgctgttcaacagcaaccaaaatcggatgttggagaaagagcatcatctatgaaacgacgttgcaggaaaaaggtgcaaaaagttgggacacctaatcacactgttgatgattattttggtgaagactgtgtcgaaccttcattagctgaagaagataacgatactggtgatcattacactactggtaataagcataaggctaggaaaaagtcaaggggtggtgtagaagagtcacagcagcagaaagctcaaaaaaataaaagcaaggtgtcttcacggggccgcaaacggaccttgaaggatgaatcgacagagaagcctgagaagaagctaacccacagaatacgtcagaggataccaaaagaggttaaggctttactggaaacacctcgtgagcagataaaacccatgaagctttgtgcatcacatctcaggttgttacaagaagctagagagcgtgttgatccaaaagggattccatccgggccatcctctaatacaagaaactttcaactagatgatatggatgatttgggctacagagatgaggaagctaggttctttgacaacgatataacagaggagcatgtacaaaatgcaacaaaattgaactaccattcctacatgaacaaaccagcccggggaaaatggtcaaaatcagataccgacttgttttatgagggtcttcgacaatttggtagcgattttgcaatgatacaacaattattccctgataagactcgccatcaggtgcggcagaaatttaaatctgaggagagaaaaaatccattgctagtccatgatgctatagttcatcgctcaggagatagtttgtatttcaaaaaggtaattaagcagctgaacattgaagatgttgtgctgccagatattaaaagtacacaaaacaagatggtgcatcaagtgaaagaggccctggaaatgagaatgtactggatgatttaaacgaggaggaaaatagttcaaattggttgaacgaagagcatgacgtacagatggccgatgtggaagaagagcatggcgaacagatggatgatgtggaagaagagcgtgatcttggaaatgatggtggtgatgatgatcttggggatgtttttgattggtactagtttatgttaaacacggatgcgagcgtgaatatgagttggtctagctctgcataacaggggtagtttttaggaaaaaaattctttgcatccggaatgcaaagaatcccttttatgactgatttggtgactaggtatcacagagagattggagtggattgagagcctctaatctctccgtgatcctcttacagcctctaacatccaccacctcgtggtccatataagggcttattcggttattcttgtcccatgtggatttgatgagattggaaaaaatatgaaggattttaacttgttcgagatttaaatctatcaaatctcatcaaatccatatggattgagaggaaagcaaacaagccctaaatagaagaaaaacaaattactattggattaagttataaattttgatctgtttttgtggaccttcaagtggtgtatgtgagtggctgtaaaagagtgtgtttgcatctgggatatacagattttttaccctagtttttagatgttgccacagttgtacggttagaattgttcggctggactatcgcttggacgatcaagatactaggtttcctccaaaaacactgcaatactcgaagagcgatgagtcactagacaacatatccaat

SEQ ID NO: 50969 - DNA, 7335 bp, Zea Mays
catctgatcctccgattcagttcttctccccctaccaaaaggccgagcccccctcaggcctcagctccgcctccgcgctgccaaccatactcgtcaagccgtcacactttgtctctctcgtgccccgatactctttttctttttttttcttttcttttttttttttttttgcttccgggagcagcaaccgtcgccgtggccccgccttggatattccatcagttttcgggttcttggataggagaaagcggggcgctcaattccccccctcctgatccttgttccttgatcgccgccatgagcaacacgctgcttcgagtctacccttccgacctgaagatgccattcgagctcaggaagcagaactcagcgtgtcttgagctcgtcaacaagaccgaccggtgggtggctttcaaggtcaagacgacgaaccctaggaagtactcggtgcgctctgcctccggtgtcgtgccgcccaggggatcctgtggcatcacaataacgatgcaagcgcccaaggagatgcccccggactaccactgcaaggacaagtttcttgttcagagcattgctgtggaggaggggacgacgcagaaggacattgtccctgacatgttcagtaaagcaccaggtaagttagttgaggagttcaagctgagggtggtctatgtccctgccaatcctccctcaccagtgcctgaggaaacagaggaagaggatggatctcttgattcagatgtggaccatgaagtatccacgtccaactctgtacgtactaaataatcttactgcatgtgagcaaatgatgccatgttcgttcctagtgtaatatgattggtgccttcaattgtttttcaggcaacaggacaagggaatacatgtagatcacaaacatcagatgatgaggtgtccctagttccacctaaatatcatttgtctttgtgttccctcagattcataaatatggatcttgtgctgatcacctgctgcatagcatattatcttaaaaggacggatttaacttcggtgttcatggaaatactgtgctctaaaaattcgcagtagtagcctaatttctttcctgctctgacgtcatcctcctctgggcgacacgggcggctccccatcgaccgcacccaccgccgccggtcttcacccccgccgtcgccggagcagctcgccggaagttcgacgagcagcgaggagggcggcggcgggactgctctctcactcatttccctcccttcttccacccactccactcctccctcttcctggaggtggccggcgacctgatccgccgctgggaaggccggatcggcgggctgactggccggatctaggggctggtcgccgtccgccgctcctccctgctggcatgggcaggtggccttgtggccgcaaccatggtggctcgtgcggctagcccgtggcggtagtgcccgcgctcgcgtggccatggccgtggctggccggcgacgttggcgcccacgcacgcggccggcccgctgcggcggcggcgtggctcgcttgtgcttgtagcgtggtgcttggatcgggggcgttggtggatctgcggctgccagcggtgccttctgcaggtggtgggtcatggtcgtggggctgggggccggatcttgagcctctccggctagatttatctctccgcctctcgtttcggcctgtggtgtgggcagggccggctggctccgtgcgttgcggcgtgtggtgggaggtcctgcgacgaaagccatgctcgcttgcaggcggacagcggtgacgcccgcgggcgccacccctaccctatcgagggtgccgtctttggacctctcgccccatgcgggaaccctcgccttggccttcttaggtctctcgctggtgctcgaccggcgttggggctctgagggttggggctggtgggttggtgcgtcggtggacggcagaaggtgacaacacgcgatggcttggcggggtgacatcggcgtggctgacctttcagctttcttcttggtgctggcgatctacactgctctgctaggtcttcagaggaaactttgcttggtttgtaccaggcgggcggcgacgacttttcgacgtcgtttctccttcttgaaggtgcggcccagaagacctgcagtttgtgtgttcgttcgtgttgtggaggctcttcgtcgctccgcttggctcaatggtgtccgtgttgtggaggctcttcgtcactccgcttggctcgatggtgtccgggcctttgtcgctttaggcgtctgctcgctcccggagttcgacgttgtggatctttgctcgtggtgaagaatcggagctgcctcgtgtgggtgtgttgaggcttggcaacgatggcgcgccgcggtcttattccttgcgtcggtgtctgaatgtaagcgtcgtcgagttgctttggcagtgtgcggctcgtcttgggaagtcggagctgctcgtctcttgtgtttgagtttggcaacgatgactctagatgtgtttgtgtgtggggactgtcattgtctaagttgtttgttaggtcgttcgccggtttttctactgtgcgttctgtgtaggttttaggcccgattttccaaaaaactgggtcaattccattcttcttaattgagaggcagagctcctaccatcacgttaaaaaaaatcgcggtagttctttcttcttttttgatgctattgattacactgaatagtttagttttcatgaaattttatcataatacctgcacccctcctcgctcaaccagaaaacacacacaaaaaagaggacagaaaaaacctatcattagaagaaacatgctcctggataactgtaatgtgaacacctttctctttacaagttattgtatcagaatgacatttgacaattgacagatttgattccttacattatttctaccatgattgtcggcaccattagcctaagacgttagaatttcaaatatttgtctatgtctgccctgaatgttatccttgacatgccactgattgttttgtgactcttcaggatgattctacatccaagttggaactggaaagaagatatgcagaggaaaacaagaagattcagaaagagctggatctcctccggaaaacaaaggcgtctcctcggggcttctctgcgtttgtgctgcttgtcttcttgttatcctcacttcttggatacctgatgttcggaagcagagcttagcaagttagcagctaatggctgcacatcatttgcggcaccggcagcggcacggctcttttagtacagtgtacagatatatacattaatagcgaagtagtcagtacataacagatatatagggctttcttgggtttcaagtgtccataggaatatatcttcagttttgaaatatgtgtgagtaaccgttcatgtttatactctatcatccaaatatatgatgtttactatataataaagctataaaagtgagacaaatcagtgttggagaaagacaaattatggccttgaaactcatggagaaagacaaattatcacgttatttaagttaacacgccaaatttcctctacctaataacattgctattactgtagctgtatgcagaaagtataaacacctaggtgctaggctgagcctcatcgcctagcatttaaaaaaacattgagtatttgctgactgaggtatactttgagagttgggcttagatatgttacagatgatgctaatatatgactttctttgaggggtcctcgtaaaccaatcgggcattgccccaactatccttgattttatttgtctgttctgctgtagccatgtatccattgttgtcgttgagtacctttgccacggtttagttagttatctcactgcgagttgtcctccatcttgaactgtcgttactcacatgtgatgttgtatcatatttttcttcatctatcgctttcgatccttgtaaattattggttccattaaaggctctttgcattggggcattcatttggtagtcatgtatttagttcaaatttatattaagttccagtacgttctggttgaataccccatcttaactctacatgtttaatgatttttatttccttttttgctggtctgattctatgtttgcccccattgctgcttcctaaacctgcaatattcatttcagcctttaattggcactcaaagttcaagatagcttgctgtagaccatcggctgcacagatgattgatgatgaggtcaactttggtaatatctttgatgcctcagaagaagttcaggttactgcaaagtttggtcccaagcaacggcccaaaacccgaaaaacagctctatcatccagatctgcagcgcctaatcctactgaagaaaccggagataggaaagtaggaaccttcagtcaagtcaattcttctaaagagcttaccagccaagaaaggacatccttgatgtgccctagtactgagtcagttgatattatcgctggttctcatagtattctcgatacaccattggaagatgcattgacagttccccagggttctctgtctggtgcttctgctgcagataggacttctcaatatggtgagcacaatgatgatccttctaagttagctacacaccaagaaaacttggtggtttcagatatcaacgtcccacctaacagttcatgtagcaaggctattgatgatatagttgaatttggggacatgtgtgatgtgcaaattgaagaggaaagagttacaaagttccaaccaaaggtgcaaacgaagctccttaaggaaatagccaaatctcggaagactaaccaaaaggtggaaacttccactgtagatgtggttacacaaaatggaaagggcaataatattcagacaaggctccatggcgatccggtacaggatcctaaaagtcatgaaagtgtgcagatcccagattctgaaggattattagcaactgataatagtaaaggttgcaatttagctaacctcaacaatctccttgaggagtcagtccaagaggaaacaatagctaagtttcgttctgatttgcaaccaaatctcgggaaggcttcatcccaggttgctgcgattaaaattaatgttgttgctgttgctccaatagttggagtttgtgacagcaacaatgacatgtacaaagaacctaaagatcaagaaaccatcactggtccagtggcttggtcaccacaggctgtgcatgctgatgttgatttagacaatcacaatgaaccaattaatcctcctattgatggtactcaatcaatgtttggcgaagtcccaggaagagaaaagggaaaatcaaaatctgtatcttttgctctatcggatgtttctgggatagctagccctatagataccaattctgagatgggtaacatcggcgattcctgtagtgacaaattgactgatgaaaatttaagtaactcatctcgtcatatcgctgaaaaggtcagtataattctgcttagaagatgtaatgatctatatttacatggctactacaaggtttctccttaatctctttcttttcccctttctttcagcattctattaccaaggaccaatattcaaatgagcaggaccatgagcgggagccactagatcatgctgttcaacagcaaccaaaatcggatgttggagaaagagcatcatctatgaaacgacgttgcaggaaaaaggtgcaaaaagttgggacacctaatcacactgttgatgattattttggtgaagactgtgtcgaaccttcattagctgaagaagataacgatactggtgatcattacactactggtaataagcataaggctaggaaaaagtcaaggggtggtgtagaagagtcacagcagcagaaagctcaaaaaaataaaagcaaggtgtcttcacggggccgcaaacggaccttgaaggatgaatcgacagagaagcctgagaagaagctaacccacagaatacgtcagaggataccaaaagaggttaaggctttactggaaacacctcgtgagcagataaaacccatgaagctttgtgcatcacatctcagccaaaagggattccatccgggccatcctctaatacaagaaactttcaactagatgatatggatgatttgggctacagagatgaggaagctaggttctttgacaacgatataacagaggagcatgtacaaaatgcaacaaaattgaactaccattcctacatggctacatgaacaaaccagcccggggaaaatggtcaaaatcagataccgaattcttttatgagggtcttcgacaatttggtagcgattttgcaatgatacaacaattattccctgataagactcgccatcaggtgcggcagaaatttaaatctgaggagagaaaaaatccattgctagtccatgatgctatagttcatcgctcaggagatagtttgtatttcaaaaaggtaattaagcagctgaacattgaagatgttgtgctgccagatattaaaagtacacaaaacaagatggtgcatcaagtgaaagaggccctggaaatgagaatgtactggatgatttaaacgaggaggaaaatagttcaaattggttgaacgaagagcatgacgtacagatggccgatgtggaagaagagcatggcgaacagatggatgatgtggaagaagagcgtgatcttggaaatgatggtggtgatgatgatcttggggatgtttttgattggtactagtttatgttaaacacggatgcgagcgtgaatatgagttggtctagctctgcataacaggggtagtttttaggaaaaaaattctttgcatccggaatgcaaagaatcccttttatgactgatttggtgactaggtatcacagagagattggagtggattgagagcctctaatctctccgtgatcctcttacagcctctaacatccaccacctcgtggtccatataagggcttattcggttattcttgtcccatgtggatttgatgagattggaaaaaatatgaaggattttaacttgttcgagatttaaatctatcaaatctcatcaaatccatatggattgagaggaaagcaaacaagccctaaatagaagaaaaacaaattactattggattaagttataaattttgatctgtttttgtggaccttcaagtggtgtatgtgagtggctgtaaaagagtgtgtttgcatctgggatatacagattttttaccctagtttttagatgttgccacagttgtacggttagaattgttcggctggactatcgcttggacgatcaagatactaggtttcctccaaaaacactgcaatactcgaagagcgatgagtcactagacaacatatccaat

SEQ ID NO: 50970 - DNA, 5057 bp, Zea Mays
catctgatcctccgattcagttcttctccccctaccaaaaggccgagcccccctcaggcctcagctccgcctccgcgctgccaaccatactcgtcaagccgtcacactttgtctctctcgtgccccgatactctttttctttttttttcttttcttttttttttttttttgcttccgggagcagcaaccgtcgccgtggccccgccttggatattccatcagttttcgggttcttggataggagaaagcggggcgctcaattccccccctcctgatccttgttccttgatcgccgccatgagcaacacgctgcttcgagtctacccttccgacctgaagatgccattcgagctcaggaagcagaactcagcgtgtcttgagctcgtcaacaagaccgaccggtgggtggctttcaaggtcaagacgacgaaccctaggaagtactcggtgcgctctgcctccggtgtcgtgccgcccaggggatcctgtggcatcacaataacgatgcaagcgcccaaggagatgcccccggactaccactgcaaggacaagtttcttgttcagagcattgctgtggaggaggggacgacgcagaaggacattgtccctgacatgttcagtaaagcaccaggtaagttagttgaggagttcaagctgagggtggtctatgtccctgccaatcctccctcaccagtgcctgaggaaacagaggaagaggatggatctcttgattcagatgtggaccatgaagtatccacgtccaactctgcaacaggacaagggaatacatgtagatcacaaacatcagatgatgaggatgattctacatccaagttggaactggaaagaagatatgcagaggaaaacaagaagattcagaaagagctggatctcctccggaaaacaaaggcgtctcctcggggcttctctgcgtttgtgctgcttgtcttcttgttatcctcacttcttggatacctgatgttcggaagcagagcttagcaagttagcagctaatggctgcacatcatttgcggcaccggcagcggcacggctcttttagtacagtgtacagatatatacattaatagcgaagtagtcagtacataacagatatatagggctttcttgggtttcaagtgtccataggaatatatcttcagttttgaaatatgtgtgagtaaccgttcatgtttatactctatcatccaaatatatgatgtttactatataataaagctataaaagtgagacaaatcagtgttggagaaagacaaattatggccttgaaactcatggagaaagacaaattatcacgttatttaagttaacacgccaaatttcctctacctaataacattgctattactgtagctgtatgcagaaagtataaacacctaggtgctaggctgagcctcatcgcctagcatttaaaaaaacattgagtatttgctgactgaggtatactttgagagttgggcttagatatgttacagatgatgctaatatatgactttctttgaggggtcctcgtaaaccaatcgggcattgccccaactatccttgattttatttgtctgttctgctgtagccatgtatccattgttgtcgttgagtacctttgccacggtttagttagttatctcactgcgagttgtcctccatcttgaactgtcgttactcacatgtgatgttgtatcatatttttcttcatctatcgctttcgatccttgtaaattattggttccattaaaggctctttgcattggggcattcatttggtagtcatgtatttagttcaaatttatattaagttccagtacgttctggttgaataccccatcttaactctacatgtttaatgatttttatttccttttttgctggtctgattctatgtttgcccccattgctgcttcctaaacctgcaatattcatttcagcctttaattggcactcaaagttcaagatagcttgctgtagaccatcggctgcacagatgattgatgatgaggtcaactttggtaatatctttgatgcctcagaagaagttcaggttactgcaaagtttggtcccaagcaacggcccaaaacccgaaaaacagctctatcatccagatctgcagcgcctaatcctactgaagaaaccggagataggaaagtaggaaccttcagtcaagtcaattcttctaaagagcttaccagccaagaaaggacatccttgatgtgccctagtactgagtcagttgatattatcgctggttctcatagtattctcgatacaccattggaagatgcattgacagttccccagggttctctgtctggtgcttctgctgcagataggacttctcaatatggtgagcacaatgatgatccttctaagttagctacacaccaagaaaacttggtggtttcagatatcaacgtcccacctaacagttcatgtagcaaggctattgatgatatagttgaatttggggacatgtgtgatgtgcaaattgaagaggaaagagttacaaagttccaaccaaaggtgcaaacgaagctccttaaggaaatagccaaatctcggaagactaaccaaaaggtggaaacttccactgtagatgtggttacacaaaatggaaagggcaataatattcagacaaggctccatggcgatccggtacaggatcctaaaagtcatgaaagtgtgcagatcccagattctgaaggattattagcaactgataatagtaaaggttgcaatttagctaacctcaacaatctccttgaggagtcagtccaagaggaaacaatagctaagtttcgttctgatttgcaaccaaatctcgggaaggcttcatcccaggttgctgcgattaaaattaatgttgttgctgttgctccaatagttggagtttgtgacagcaacaatgacatgtacaaagaacctaaagatcaagaaaccatcactggtccagtggcttggtcaccacaggctgtgcatgctgatgttgatttagacaatcacaatgaaccaattaatcctcctattgatggtactcaatcaatgtttggcgaagtcccaggaagagaaaagggaaaatcaaaatctgtatcttttgctctatcggatgtttctgggatagctagccctatagataccaattctgagatgggtaacatcggcgattcctgtagtgacaaattgactgatgaaaatttaagtaactcatctcgtcatatcgctgaaaagcattctattaccaaggaccaatattcaaatgagcaggaccatgagcgggagccactagatcatgctgttcaacagcaaccaaaatcggatgttggagaaagagcatcatctatgaaacgacgttgcaggaaaaaggtgcaaaaagttgggacacctaatcacactgttgatgattattttggtgaagactgtgtcgaaccttcattagctgaagaagataacgatactggtgatcattacactactggtaataagcataaggctaggaaaaagtcaaggggtggtgtagaagagtcacagcagcagaaagctcaaaaaaataaaagcaaggtgtcttcacggggccgcaaacggaccttgaaggatgaatcgacagagaagcctgagaagaagctaacccacagaatacgtcagaggataccaaaagaggttaaggctttactggaaacacctcgtgagcagataaaacccatgaagctttgtgcatcacatctcaggttgttacaagaagctagagagcgtgttgatccaaaagggattccatccgggccatcctctaatacaagaaactttcaactagatgatatggatgatttgggctacagagatgaggaagctaggttctttgacaacgatataacagaggagcatgtacaaaatgcaacaaaattgaactaccattcctacatgaacaaaccagcccggggaaaatggtcaaaatcagataccgaattcttttatgagggtcttcgacaatttggtagcgattttgcaatgatacaacaattattccctgataagactcgccatcaggtgcggcagaaatttaaatctgaggagagaaaaaatccattgctagtccatgatgctatagttcatcgctcaggagatagtttgtatttcaaaaaggtaattaagcagctgaacattgaagatgttgtgctgccagatattaaaagtacacaaaacaagatggtgcatcaagtgaaagaggccctggaaatgagaatgtactggatgatttaaacgaggaggaaaatagttcaaattggttgaacgaagagcatgacgtacagatggccgatgtggaagaagagcatggcgaacagatggatgatgtggaagaagagcgtgatcttggaaatgatggtggtgatgatgatcttggggatgtttttgattggtactagtttatgttaaacacggatgcgagcgtgaatatgagttggtctagctctgcataacaggggtagtttttaggaaaaaaattctttgcatccggaatgcaaagaatcccttttatgactgatttggtgactaggtatcacagagagattggagtggattgagagcctctaatctctccgtgatcctcttacagcctctaacatccaccacctcgtggtccatataagggcttattcggttattcttgtcccatgtggatttgatgagattggaaaaaatatgaaggattttaacttgttcgagatttaaatctatcaaatctcatcaaatccatatggattgagaggaaagcaaacaagccctaaatagaagaaaaacaaattactattggattaagttataaattttgatctgtttttgtggaccttcaagtggtgtatgtgagtggctgtaaaagagtgtgtttgcatctgggatatacagattttttaccctagtttttagatgttgccacagttgtacggttagaattgttcggctggactatcgcttggacgatcaagatactaggtttcctccaaaaacactgcaatactcgaagagcgatgagtcactagacaacatatccaat

SEQ ID NO: 50971 - DNA, 4879 bp, Zea Mays
atggatcttgtgctgatcacctgctgcatagcatattatcttaaaaggacggatttaacttcggtgttcatggaaatactgtgctctaaaaattcgcagtagtagcctaatttctttcctgctctgacgtcatcctcctctgggcgacacgggcggctccccatcgaccgcacccaccgccgccggtcttcacccccgccgtcgccggagcagctcgccggaagttcgacgagcagcgaggagggcggcggcgggactgctctctcactcatttccctcccttcttccacccactccactcctccctcttcctggaggtggccggcgacctgatccgccgctgggaaggccggatcggcgggctgactggccggatctaggggctggtcgccgtccgccgctcctccctgctggcatgggcaggtggccttgtggccgcaaccatggtggctcgtgcggctagcccgtggcggtagtgcccgcgctcgcgtggccatggccgtggctggccggcgacgttggcgcccacgcacgcggccggcccgctgcggcggcggcgtggctcgcttgtgcttgtagcgtggtgcttggatcgggggcgttggtggatctgcggctgccagcggtgccttctgcaggatgattctacatccaagttggaactggaaagaagatatgcagaggaaaacaagaagattcagaaagagctggatctcctccggaaaacaaaggcgtctcctcggggcttctctgcgtttgtgctgcttgtcttcttgttatcctcacttcttggatacctgatgttcggaagcagagcttagcaagttagcagctaatggctgcacatcatttgcggcaccggcagcggcacggctcttttagtacagtgtacagatatatacattaatagcgaagtagtcagtacataacagatatatagggctttcttgggtttcaagtgtccataggaatatatcttcagttttgaaatatgtgtgagtaaccgttcatgtttatactctatcatccaaatatatgatgtttactatataataaagctataaaagtgagacaaatcagtgttggagaaagacaaattatggccttgaaactcatggagaaagacaaattatcacgttatttaagttaacacgccaaatttcctctacctaataacattgctattactgtagctgtatgcagaaagtataaacacctaggtgctaggctgagcctcatcgcctagcatttaaaaaaacattgagtatttgctgactgaggtatactttgagagttgggcttagatatgttacagatgatgctaatatatgactttctttgaggggtcctcgtaaaccaatcgggcattgccccaactatccttgattttatttgtctgttctgctgtagccatgtatccattgttgtcgttgagtacctttgccacggtttagttagttatctcactgcgagttgtcctccatcttgaactgtcgttactcacatgtgatgttgtatcatatttttcttcatctatcgctttcgatccttgtaaattattggttccattaaaggctctttgcattggggcattcatttggtagtcatgtatttagttcaaatttatattaagttccagtacgttctggttgaataccccatcttaactctacatgtttaatgatttttatttccttttttgctggtctgattctatgtttgcccccattgctgcttcctaaacctgcaatattcatttcagcctttaattggcactcaaagttcaagatagcttgctgtagaccatcggctgcacagatgattgatgatgaggtcaactttggtaatatctttgatgcctcagaagaagttcaggttactgcaaagtttggtcccaagcaacggcccaaaacccgaaaaacagctctatcatccagatctgcagcgcctaatcctactgaagaaaccggagataggaaagtaggaaccttcagtcaagtcaattcttctaaagagcttaccagccaagaaaggacatccttgatgtgccctagtactgagtcagttgatattatcgctggttctcatagtattctcgatacaccattggaagatgcattgacagttccccagggttctctgtctggtgcttctgctgcagataggacttctcaatatggtgagcacaatgatgatccttctaagttagctacacaccaagaaaacttggtggtttcagatatcaacgtcccacctaacagttcatgtagcaaggctattgatgatatagttgaatttggggacatgtgtgatgtgcaaattgaagaggaaagagttacaaagttccaaccaaaggtgcaaacgaagctccttaaggaaatagccaaatctcggaagactaaccaaaaggtggaaacttccactgtagatgtggttacacaaaatggaaagggcaataatattcagacaaggctccatggcgatccggtacaggatcctaaaagtcatgaaagtgtgcagatcccagattctgaaggattattagcaactgataatagtaaaggttgcaatttagctaacctcaacaatctccttgaggagtcagtccaagaggaaacaatagctaagtttcgttctgatttgcaaccaaatctcgggaaggcttcatcccaggttgctgcgattaaaattaatgttgttgctgttgctccaatagttggagtttgtgacagcaacaatgacatgtacaaagaacctaaagatcaagaaaccatcactggtccagtggcttggtcaccacaggctgtgcatgctgatgttgatttagacaatcacaatgaaccaattaatcctcctattgatggtactcaatcaatgtttggcgaagtcccaggaagagaaaagggaaaatcaaaatctgtatcttttgctctatcggatgtttctgggatagctagccctatagataccaattctgagatgggtaacatcggcgattcctgtagtgacaaattgactgatgaaaatttaagtaactcatctcgtcatatcgctgaaaagcattctattaccaaggaccaatattcaaatgagcaggaccatgagcgggagccactagatcatgctgttcaacagcaaccaaaatcggatgttggagaaagagcatcatctatgaaacgacgttgcaggaaaaaggtgcaaaaagttgggacacctaatcacactgttgatgattattttggtgaagactgtgtcgaaccttcattagctgaagaagataacgatactggtgatcattacactactggtaataagcataaggctaggaaaaagtcaaggggtggtgtagaagagtcacagcagcagaaagctcaaaaaaataaaagcaaggtgtcttcacggggccgcaaacggaccttgaaggatgaatcgacagagaagcctgagaagaagctaacccacagaatacgtcagaggataccaaaagaggttaaggctttactggaaacacctcgtgagcagataaaacccatgaagctttgtgcatcacatctcaggttgttacaagaagctagagagcgtgttgatccaaaagggattccatccgggccatcctctaatacaagaaactttcaactagatgatatggatgatttgggctacagagatgaggaagctaggttctttgacaacgatataacagaggagcatgtacaaaatgcaacaaaattgaactaccattcctacatgaacaaaccagcccggggaaaatggtcaaaatcagataccgacttgttttatgagggtcttcgacaatttggtagcgattttgcaatgatacaacaattattccctgataagactcgccatcaggtgcggcagaaatttaaatctgaggagagaaaaaatccattgctagtccatgatgctatagttcatcgctcaggagatagtttgtatttcaaaaaggtaattaagcagctgaacattgaagatgttgtgctgccagatattaaaagtacacaaaacaagatggtgcatcaagtgaaagaggccctggaaatgagaatgtactggatgatttaaacgaggaggaaaatagttcaaattggttgaacgaagagcatgacgtacagatggccgatgtggaagaagagcatggcgaacagatggatgatgtggaagaagagcgtgatcttggaaatgatggtggtgatgatgatcttggggatgtttttgattggtactagtttatgttaaacacggatgcgagcgtgaatatgagttggtctagctctgcataacaggggtagtttttaggaaaaaaattctttgcatccggaatgcaaagaatcccttttatgactgatttggtgactaggtatcacagagagattggagtggattgagagcctctaatctctccgtgatcctcttacagcctctaacatccaccacctcgtggtccatataagggcttattcggttattcttgtcccatgtggatttgatgagattggaaaaaatatgaaggattttaacttgttcgagatttaaatctatcaaatctcatcaaatccatatggattgagaggaaagcaaacaagccctaaatagaagaaaaacaaattactattggattaagttataaattttgatctgtttttgtggaccttcaagtggtgtatgtgagtggctgtaaaagagtgtgtttgcatctgggatatacagattttttaccctagtttttagatgttgccacagttgtacggttagaattgttcggctggactatcgcttggacgatcaagatactaggtttcctccaaaaacactgcaatactcgaagagcgatgagtcactagacaacatatccaat

SEQ ID NO: 50972 - DNA, 5393 bp, Zea Mays
atggatcttgtgctgatcacctgctgcatagcatattatcttaaaaggacggatttaacttcggtgttcatggaaatactgtgctctaaaaattcgcagtagtagcctaatttctttcctgctctgacgtcatcctcctctgggcgacacgggcggctccccatcgaccgcacccaccgccgccggtcttcacccccgccgtcgccggagcagctcgccggaagttcgacgagcagcgaggagggcggcggcgggactgctctctcactcatttccctcccttcttccacccactccactcctccctcttcctggaggtggccggcgacctgatccgccgctgggaaggccggatcggcgggctgactggccggatctaggggctggtcgccgtccgccgctcctccctgctggcatgggcaggtggccttgtggccgcaaccatggtggctcgtgcggctagcccgtggcggtagtgcccgcgctcgcgtggccatggccgtggctggccggcgacgttggcgcccacgcacgcggccggcccgctgcggcggcggcgtggctcgcttgtgcttgtagcgtggtgcttggatcgggggcgttggtggatctgcggctgccagcggtgccttctgcaggtggtgggtcatggtcgtggggctgggggccggatcttgagcctctccggctagatttatctctccgcctctcgtttcggcctgtggtgtgggcagggccggctggctccgtgcgttgcggcgtgtggtgggaggtcctgcgacgaaagccatgctcgcttgcaggcggacagcggtgacgcccgcgggcgccacccctaccctatcgagggtgccgtctttggacctctcgccccatgcgggaaccctcgccttggccttcttaggtctctcgctggtgctcgaccggcgttggggctctgagggttggggctggtgggttggtgcgtcggtggacggcagaaggtgacaacacgcgatggcttggcggggtgacatcggcgtggctgacctttcagctttcttcttggtgctggcgatctacactgctctgctaggtcttcagaggaaactttgcttggtttgtaccaggcgggcggcgacgacttttcgacgtcgtttctccttcttgaaggatgattctacatccaagttggaactggaaagaagatatgcagaggaaaacaagaagattcagaaagagctggatctcctccggaaaacaaaggcgtctcctcggggcttctctgcgtttgtgctgcttgtcttcttgttatcctcacttcttggatacctgatgttcggaagcagagcttagcaagttagcagctaatggctgcacatcatttgcggcaccggcagcggcacggctcttttagtacagtgtacagatatatacattaatagcgaagtagtcagtacataacagatatatagggctttcttgggtttcaagtgtccataggaatatatcttcagttttgaaatatgtgtgagtaaccgttcatgtttatactctatcatccaaatatatgatgtttactatataataaagctataaaagtgagacaaatcagtgttggagaaagacaaattatggccttgaaactcatggagaaagacaaattatcacgttatttaagttaacacgccaaatttcctctacctaataacattgctattactgtagctgtatgcagaaagtataaacacctaggtgctaggctgagcctcatcgcctagcatttaaaaaaacattgagtatttgctgactgaggtatactttgagagttgggcttagatatgttacagatgatgctaatatatgactttctttgaggggtcctcgtaaaccaatcgggcattgccccaactatccttgattttatttgtctgttctgctgtagccatgtatccattgttgtcgttgagtacctttgccacggtttagttagttatctcactgcgagttgtcctccatcttgaactgtcgttactcacatgtgatgttgtatcatatttttcttcatctatcgctttcgatccttgtaaattattggttccattaaaggctctttgcattggggcattcatttggtagtcatgtatttagttcaaatttatattaagttccagtacgttctggttgaataccccatcttaactctacatgtttaatgatttttatttccttttttgctggtctgattctatgtttgcccccattgctgcttcctaaacctgcaatattcatttcagcctttaattggcactcaaagttcaagatagcttgctgtagaccatcggctgcacagatgattgatgatgaggtcaactttggtaatatctttgatgcctcagaagaagttcaggttactgcaaagtttggtcccaagcaacggcccaaaacccgaaaaacagctctatcatccagatctgcagcgcctaatcctactgaagaaaccggagataggaaagtaggaaccttcagtcaagtcaattcttctaaagagcttaccagccaagaaaggacatccttgatgtgccctagtactgagtcagttgatattatcgctggttctcatagtattctcgatacaccattggaagatgcattgacagttccccagggttctctgtctggtgcttctgctgcagataggacttctcaatatggtgagcacaatgatgatccttctaagttagctacacaccaagaaaacttggtggtttcagatatcaacgtcccacctaacagttcatgtagcaaggctattgatgatatagttgaatttggggacatgtgtgatgtgcaaattgaagaggaaagagttacaaagttccaaccaaaggtgcaaacgaagctccttaaggaaatagccaaatctcggaagactaaccaaaaggtggaaacttccactgtagatgtggttacacaaaatggaaagggcaataatattcagacaaggctccatggcgatccggtacaggatcctaaaagtcatgaaagtgtgcagatcccagattctgaaggattattagcaactgataatagtaaaggttgcaatttagctaacctcaacaatctccttgaggagtcagtccaagaggaaacaatagctaagtttcgttctgatttgcaaccaaatctcgggaaggcttcatcccaggttgctgcgattaaaattaatgttgttgctgttgctccaatagttggagtttgtgacagcaacaatgacatgtacaaagaacctaaagatcaagaaaccatcactggtccagtggcttggtcaccacaggctgtgcatgctgatgttgatttagacaatcacaatgaaccaattaatcctcctattgatggtactcaatcaatgtttggcgaagtcccaggaagagaaaagggaaaatcaaaatctgtatcttttgctctatcggatgtttctgggatagctagccctatagataccaattctgagatgggtaacatcggcgattcctgtagtgacaaattgactgatgaaaatttaagtaactcatctcgtcatatcgctgaaaagcattctattaccaaggaccaatattcaaatgagcaggaccatgagcgggagccactagatcatgctgttcaacagcaaccaaaatcggatgttggagaaagagcatcatctatgaaacgacgttgcaggaaaaaggtgcaaaaagttgggacacctaatcacactgttgatgattattttggtgaagactgtgtcgaaccttcattagctgaagaagataacgatactggtgatcattacactactggtaataagcataaggctaggaaaaagtcaaggggtggtgtagaagagtcacagcagcagaaagctcaaaaaaataaaagcaaggtgtcttcacggggccgcaaacggaccttgaaggatgaatcgacagagaagcctgagaagaagctaacccacagaatacgtcagaggataccaaaagaggttaaggctttactggaaacacctcgtgagcagataaaacccatgaagctttgtgcatcacatctcaggttgttacaagaagctagagagcgtgttgatccaaaagggattccatccgggccatcctctaatacaagaaactttcaactagatgatatggatgatttgggctacagagatgaggaagctaggttctttgacaacgatataacagaggagcatgtacaaaatgcaacaaaattgaactaccattcctacatgaacaaaccagcccggggaaaatggtcaaaatcagataccgacttgttttatgagggtcttcgacaatttggtagcgattttgcaatgatacaacaattattccctgataagactcgccatcaggtgcggcagaaatttaaatctgaggagagaaaaaatccattgctagtccatgatgctatagttcatcgctcaggagatagtttgtatttcaaaaaggtaattaagcagctgaacattgaagatgttgtgctgccagatattaaaagtacacaaaacaagatggtgcatcaagtgaaagaggccctggaaatgagaatgtactggatgatttaaacgaggaggaaaatagttcaaattggttgaacgaagagcatgacgtacagatggccgatgtggaagaagagcatggcgaacagatggatgatgtggaagaagagcgtgatcttggaaatgatggtggtgatgatgatcttggggatgtttttgattggtactagtttatgttaaacacggatgcgagcgtgaatatgagttggtctagctctgcataacaggggtagtttttaggaaaaaaattctttgcatccggaatgcaaagaatcccttttatgactgatttggtgactaggtatcacagagagattggagtggattgagagcctctaatctctccgtgatcctcttacagcctctaacatccaccacctcgtggtccatataagggcttattcggttattcttgtcccatgtggatttgatgagattggaaaaaatatgaaggattttaacttgttcgagatttaaatctatcaaatctcatcaaatccatatggattgagaggaaagcaaacaagccctaaatagaagaaaaacaaattactattggattaagttataaattttgatctgtttttgtggaccttcaagtggtgtatgtgagtggctgtaaaagagtgtgtttgcatctgggatatacagattttttaccctagtttttagatgttgccacagttgtacggttagaattgttcggctggactatcgcttggacgatcaagatactaggtttcctccaaaaacactgcaatactcgaagagcgatgagtcactagacaacatatccaat

SEQ ID NO: 50973 - DNA, 5380 bp, Zea Mays
tagcatattatcttaaaaggacggatttaacttcggtgttcatggaaatactgtgctctaaaaattcgcagtagtagcctaatttctttcctgctctgacgtcatcctcctctgggcgacacgggcggctccccatcgaccgcacccaccgccgccggtcttcacccccgccgtcgccggagcagctcgccggaagttcgacgagcagcgaggagggcggcggcgggactgctctctcactcatttccctcccttcttccacccactccactcctccctcttcctggaggtggccggcgacctgatccgccgctgggaaggccggatcggcgggctgactggccggatctaggggctggtcgccgtccgccgctcctccctgctggcatgggcaggtggccttgtggccgcaaccatggtggctcgtgcggctagcccgtggcggtagtgcccgcgctcgcgtggccatggccgtggctggccggcgacgttggcgcccacgcacgcggccggcccgctgcggcggcggcgtggctcgcttgtgcttgtagcgtggtgcttggatcgggggcgttggtggatctgcggctgccagcggtgccttctgcaggtggtgggtcatggtcgtggggctgggggccggatcttgagcctctccggctagatttatctctccgcctctcgtttcggcctgtggtgtgggcagggccggctggctccgtgcgttgcggcgtgtggtgggaggtcctgcgacgaaagccatgctcgcttgcaggcggacagcggtgacgcccgcgggcgccacccctaccctatcgagggtgccgtctttggacctctcgccccatgcgggaaccctcgccttggccttcttaggtctctcgctggtgctcgaccggcgttggggctctgagggttggggctggtgggttggtgcgtcggtggacggcagaaggtgacaacacgcgatggcttggcggggtgacatcggcgtggctgacctttcagctttcttcttggtgctggcgatctacactgctctgctaggtcttcagaggaaactttgcttggtttgtaccaggcgggcggcgacgacttttcgacgtcgtttctccttcttgaaggatgattctacatccaagttggaactggaaagaagatatgcagaggaaaacaagaagattcagaaagagctggatctcctccggaaaacaaaggcgtctcctcggggcttctctgcgtttgtgctgcttgtcttcttgttatcctcacttcttggatacctgatgttcggaagcagagcttagcaagttagcagctaatggctgcacatcatttgcggcaccggcagcggcacggctcttttagtacagtgtacagatatatacattaatagcgaagtagtcagtacataacagatatatagggctttcttgggtttcaagtgtccataggaatatatcttcagttttgaaatatgtgtgagtaaccgttcatgtttatactctatcatccaaatatatgatgtttactatataataaagctataaaagtgagacaaatcagtgttggagaaagacaaattatggccttgaaactcatggagaaagacaaattatcacgttatttaagttaacacgccaaatttcctctacctaataacattgctattactgtagctgtatgcagaaagtataaacacctaggtgctaggctgagcctcatcgcctagcatttaaaaaaacattgagtatttgctgactgaggtatactttgagagttgggcttagatatgttacagatgatgctaatatatgactttctttgaggggtcctcgtaaaccaatcgggcattgccccaactatccttgattttatttgtctgttctgctgtagccatgtatccattgttgtcgttgagtacctttgccacggtttagttagttatctcactgcgagttgtcctccatcttgaactgtcgttactcacatgtgatgttgtatcatatttttcttcatctatcgctttcgatccttgtaaattattggttccattaaaggctctttgcattggggcattcatttggtagtcatgtatttagttcaaatttatattaagttccagtacgttctggttgaataccccatcttaactctacatgtttaatgatttttatttccttttttgctggtctgattctatgtttgcccccattgctgcttcctaaacctgcaatattcatttcagcctttaattggcactcaaagttcaagatagcttgctgtagaccatcggctgcacagatgattgatgatgaggtcaactttggtaatatctttgatgcctcagaagaagttcaggttactgcaaagtttggtcccaagcaacggcccaaaacccgaaaaacagctctatcatccagatctgcagcgcctaatcctactgaagaaaccggagataggaaagtaggaaccttcagtcaagtcaattcttctaaagagcttaccagccaagaaaggacatccttgatgtgccctagtactgagtcagttgatattatcgctggttctcatagtattctcgatacaccattggaagatgcattgacagttccccagggttctctgtctggtgcttctgctgcagataggacttctcaatatggtgagcacaatgatgatccttctaagttagctacacaccaagaaaacttggtggtttcagatatcaacgtcccacctaacagttcatgtagcaaggctattgatgatatagttgaatttggggacatgtgtgatgtgcaaattgaagaggaaagagttacaaagttccaaccaaaggtgcaaacgaagctccttaaggaaatagccaaatctcggaagactaaccaaaaggtggaaacttccactgtagatgtggttacacaaaatggaaagggcaataatattcagacaaggctccatggcgatccggtacaggatcctaaaagtcatgaaagtgtgcagatcccagattctgaaggattattagcaactgataatagtaaaggttgcaatttagctaacctcaacaatctccttgaggagtcagtccaagaggaaacaatagctaagtttcgttctgatttgcaaccaaatctcgggaaggcttcatcccaggttgctgcgattaaaattaatgttgttgctgttgctccaatagttggagtttgtgacagcaacaatgacatgtacaaagaacctaaagatcaagaaaccatcactggtccagtggcttggtcaccacaggctgtgcatgctgatgttgatttagacaatcacaatgaaccaattaatcctcctattgatggtactcaatcaatgtttggcgaagtcccaggtacagcttttacaggaagagaaaagggaaaatcaaaatctgtatcttttgctctatcggatgtttctgggatagctagccctatagataccaattctgagatgggtaacatcggcgattcctgtagtgacaaattgactgatgaaaatttaagtaactcatctcgtcatatcgctgaaaagcattctattaccaaggaccaatattcaaatgagcaggaccatgagcgggagccactagatcatgctgttcaacagcaaccaaaatcggatgttggagaaagagcatcatctatgaaacgacgttgcaggaaaaaggtgcaaaaagttgggacacctaatcacactgttgatgattattttggtgaagactgtgtcgaaccttcattagctgaagaagataacgatactggtgatcattacactactggtaataagcataaggctaggaaaaagtcaaggggtggtgtagaagagtcacagcagcagaaagctcaaaaaaataaaagcaaggtgtcttcacggggccgcaaacggaccttgaaggatgaatcgacagagaagcctgagaagaagctaacccacagaatacgtcagaggataccaaaagaggttaaggctttactggaaacacctcgtgagcagataaaacccatgaagctttgtgcatcacatctcaggttgttacaagaagctagagagcgtgttgatccaaaagggattccatccgggccatcctctaatacaagaaactttcaactagatgatatggatgatttgggctacagagatgaggaagctaggttctttgacaacgatataacagaggagcatgtacaaaatgcaacaaaattgaactaccattcctacatgaacaaaccagcccggggaaaatggtcaaaatcagataccgacttgttttatgagggtcttcgacaatttggtagcgattttgcaatgatacaacaattattccctgataagactcgccatcaggtgcggcagaaatttaaatctgaggagagaaaaaatccattgctagtccatgatgctatagttcatcgctcaggagatagtttgtatttcaaaaaggtaattaagcagctgaacattgaagatgttgtgctgccagatattaaaagtacacaaaacaagatggtgcatcaagtgaaagaggccctggaaatgagaatgtactggatgatttaaacgaggaggaaaatagttcaaattggttgaacgaagagcatgacgtacagatggccgatgtggaagaagagcatggcgaacagatggatgatgtggaagaagagcgtgatcttggaaatgatggtggtgatgatgatcttggggatgtttttgattggtactagtttatgttaaacacggatgcgagcgtgaatatgagttggtctagctctgcataacaggggtagtttttaggaaaaaaattctttgcatccggaatgcaaagaatcccttttatgactgatttggtgactaggtatcacagagagattggagtggattgagagcctctaatctctccgtgatcctcttacagcctctaacatccaccacctcgtggtccatataagggcttattcggttattcttgtcccatgtggatttgatgagattggaaaaaatatgaaggattttaacttgttcgagatttaaatctatcaaatctcatcaaatccatatggattgagaggaaagcaaacaagccctaaatagaagaaaaacaaattactattggattaagttataaattttgatctgtttttgtggaccttcaagtggtgtatgtgagtggctgtaaaagagtgtgtttgcatctgggatatacagattttttaccctagtttttagatgttgccacagttgtacggttagaattgttcggctggactatcgcttggacgatcaagatactaggtttcctccaaaaacactgcaatactcgaagagcgatgagtcactagacaacatatccaat

SEQ ID NO: 50974 - DNA, 5958 bp, Zea Mays
aaggacggatttaacttcggtgttcatggaaatactgtgctctaaaaattcgcagtagtagcctaatttctttcctgctctgacgtcatcctcctctgggcgacacgggcggctccccatcgaccgcacccaccgccgccggtcttcacccccgccgtcgccggagcagctcgccggaagttcgacgagcagcgaggagggcggcggcgggactgctctctcactcatttccctcccttcttccacccactccactcctccctcttcctggaggtggccggcgacctgatccgccgctgggaaggccggatcggcgggctgactggccggatctaggggctggtcgccgtccgccgctcctccctgctggcatgggcaggtggccttgtggccgcaaccatggtggctcgtgcggctagcccgtggcggtagtgcccgcgctcgcgtggccatggccgtggctggccggcgacgttggcgcccacgcacgcggccggcccgctgcggcggcggcgtggctcgcttgtgcttgtagcgtggtgcttggatcgggggcgttggtggatctgcggctgccagcggtgccttctgcaggtggtgggtcatggtcgtggggctgggggccggatcttgagcctctccggctagatttatctctccgcctctcgtttcggcctgtggtgtgggcagggccggctggctccgtgcgttgcggcgtgtggtgggaggtcctgcgacgaaagccatgctcgcttgcaggcggacagcggtgacgcccgcgggcgccacccctaccctatcgagggtgccgtctttggacctctcgccccatgcgggaaccctcgccttggccttcttaggtctctcgctggtgctcgaccggcgttggggctctgagggttggggctggtgggttggtgcgtcggtggacggcagaaggtgacaacacgcgatggcttggcggggtgacatcggcgtggctgacctttcagctttcttcttggtgctggcgatctacactgctctgctaggtgcggcccagaagacctgcagtttgtgtgttcgttcgtgttgtggaggctcttcgtcgctccgcttggctcaatggtgtccgtgttgtggaggctcttcgtcactccgcttggctcgatggtgtccgggcctttgtcgctttaggcgtctgctcgctcccggagttcgacgttgtggatctttgctcgtggtgaagaatcggagctgcctcgtgtgggtgtgttgaggcttggcaacgatggcgcgccgcggtcttattccttgcgtcggtgtctgaatgtaagcgtcgtcgagttgctttggcagtgtgcggctcgtcttgggaagtcggagctgctcgtctcttgtgtttgagtttggcaacgatgactctagatgtgtttgtgtgtggggactgtcattgtctaagttgtttgttaggtcgttcgccggtttttctactgtgcgttctgtgtaggttttaggcccgattttccaaaaaactgggtcaattccattcttcttaattgagaggcagagctcctaccatcacgttaaaaaaaatcgcggtagttctttcttcttttttgatgctattgattacactgaatagtttagttttcatgaaattttatcataatacctgcacccctcctcgctcaaccagaaaacacacacaaaaaagaggacagaaaaaacctatcattagaagaaacatgctcctggataactgtaatgatgattctacatccaagttggaactggaaagaagatatgcagaggaaaacaagaagattcagaaagagctggatctcctccggaaaacaaaggcgtctcctcggggcttctctgcgtttgtgctgcttgtcttcttgttatcctcacttcttggatacctgatgttcggaagcagagcttagcaagttagcagctaatggctgcacatcatttgcggcaccggcagcggcacggctcttttagtacagtgtacagatatatacattaatagcgaagtagtcagtacataacagatatatagggctttcttgggtttcaagtgtccataggaatatatcttcagttttgaaatatgtgtgagtaaccgttcatgtttatactctatcatccaaatatatgatgtttactatataataaagctataaaagtgagacaaatcagtgttggagaaagacaaattatggccttgaaactcatggagaaagacaaattatcacgttatttaagttaacacgccaaatttcctctacctaataacattgctattactgtagctgtatgcagaaagtataaacacctaggtgctaggctgagcctcatcgcctagcatttaaaaaaacattgagtatttgctgactgaggtatactttgagagttgggcttagatatgttacagatgatgctaatatatgactttctttgaggggtcctcgtaaaccaatcgggcattgccccaactatccttgattttatttgtctgttctgctgtagccatgtatccattgttgtcgttgagtacctttgccacggtttagttagttatctcactgcgagttgtcctccatcttgaactgtcgttactcacatgtgatgttgtatcatatttttcttcatctatcgctttcgatccttgtaaattattggttccattaaaggctctttgcattggggcattcatttggtagtcatgtatttagttcaaatttatattaagttccagtacgttctggttgaataccccatcttaactctacatgtttaatgatttttatttccttttttgctggtctgattctatgtttgcccccattgctgcttcctaaacctgcaatattcatttcagcctttaattggcactcaaagttcaagatagcttgctgtagaccatcggctgcacagatgattgatgatgaggtcaactttggtaatatctttgatgcctcagaagaagttcaggttactgcaaagtttggtcccaagcaacggcccaaaacccgaaaaacagctctatcatccagatctgcagcgcctaatcctactgaagaaaccggagataggaaagtaggaaccttcagtcaagtcaattcttctaaagagcttaccagccaagaaaggacatccttgatgtgccctagtactgagtcagttgatattatcgctggttctcatagtattctcgatacaccattggaagatgcattgacagttccccagggttctctgtctggtgcttctgctgcagataggacttctcaatatggtgagcacaatgatgatccttctaagttagctacacaccaagaaaacttggtggtttcagatatcaacgtcccacctaacagttcatgtagcaaggctattgatgatatagttgaatttggggacatgtgtgatgtgcaaattgaagaggaaagagttacaaagttccaaccaaaggtgcaaacgaagctccttaaggaaatagccaaatctcggaagactaaccaaaaggtggaaacttccactgtagatgtggttacacaaaatggaaagggcaataatattcagacaaggctccatggcgatccggtacaggatcctaaaagtcatgaaagtgtgcagatcccagattctgaaggattattagcaactgataatagtaaaggttgcaatttagctaacctcaacaatctccttgaggagtcagtccaagaggaaacaatagctaagtttcgttctgatttgcaaccaaatctcgggaaggcttcatcccaggttgctgcgattaaaattaatgttgttgctgttgctccaatagttggagtttgtgacagcaacaatgacatgtacaaagaacctaaagatcaagaaaccatcactggtccagtggcttggtcaccacaggctgtgcatgctgatgttgatttagacaatcacaatgaaccaattaatcctcctattgatggtactcaatcaatgtttggcgaagtcccaggaagagaaaagggaaaatcaaaatctgtatcttttgctctatcggatgtttctgggatagctagccctatagataccaattctgagatgggtaacatcggcgattcctgtagtgacaaattgactgatgaaaatttaagtaactcatctcgtcatatcgctgaaaagcattctattaccaaggaccaatattcaaatgagcaggaccatgagcgggagccactagatcatgctgttcaacagcaaccaaaatcggatgttggagaaagagcatcatctatgaaacgacgttgcaggaaaaaggtgcaaaaagttgggacacctaatcacactgttgatgattattttggtgaagactgtgtcgaaccttcattagctgaagaagataacgatactggtgatcattacactactggtaataagcataaggctaggaaaaagtcaaggggtggtgtagaagagtcacagcagcagaaagctcaaaaaaataaaagcaaggtgtcttcacggggccgcaaacggaccttgaaggatgaatcgacagagaagcctgagaagaagctaacccacagaatacgtcagaggataccaaaagaggttaaggctttactggaaacacctcgtgagcagataaaacccatgaagctttgtgcatcacatctcaggttgttacaagaagctagagagcgtgttgatccaaaagggattccatccgggccatcctctaatacaagaaactttcaactagatgatatggatgatttgggctacagagatgaggaagctaggttctttgacaacgatataacagaggagcatgtacaaaatgcaacaaaattgaactaccattcctacatgaacaaaccagcccggggaaaatgggtcttcgacaatttggtagcgattttgcaatgatacaacaattattccctgataagactcgccatcaggtgcggcagaaatttaaatctgaggagagaaaaaatccattgctagtccatgatgctatagttcatcgctcaggagatagtttgtatttcaaaaaggtaattaagcagctgaacattgaagatgttgtgctgccagatattaaaagtacacaaaacaagatggtgcatcaagtgaaagaggccctggaaatgagaatgtactggatgatttaaacgaggaggaaaatagttcaaattggttgaacgaagagcatgacgtacagatggccgatgtggaagaagagcatggcgaacagatggatgatgtggaagaagagcgtgatcttggaaatgatggtggtgatgatgatcttggggatgtttttgattggtactagtttatgttaaacacggatgcgagcgtgaatatgagttggtctagctctgcataacaggggtagtttttaggaaaaaaattctttgcatccggaatgcaaagaatcccttttatgactgatttggtgactaggtatcacagagagattggagtggattgagagcctctaatctctccgtgatcctcttacagcctctaacatccaccacctcgtggtccatataagggcttattcggttattcttgtcccatgtggatttgatgagattggaaaaaatatgaaggattttaacttgttcgagatttaaatctatcaaatctcatcaaatccatatggattgagaggaaagcaaacaagccctaaatagaagaaaaacaaattactattggattaagttataaattttgatctgtttttgtggaccttcaagtggtgtatgtgagtggctgtaaaagagtgtgtttgcatctgggatatacagattttttaccctagtttttagatgttgccacagttgtacggttagaattgttcggctggactatcgcttggacgatcaagatactaggtttcctccaaaaacactgcaatactcgaagagcgatgagtcactagacaacatatccaat

SEQ ID NO: 50975 - DNA, 3416 bp, Zea Mays
aaagaggacagaaaaaacctatcattagaagaaacatgctcctggataactgtaatgatgattctacatccaagttggaactggaaagaagatatgcagaggaaaacaagaagattcagaaagagctggatctcctccggaaaacaaaggcgtctcctcggggcttctctgcgtttgtgctgcttgtcttcttgttatcctcacttcttggatacctgatgttcggaagcagagcttagcaagttagcagctaatggctgcacatcatttgcggcaccggcagcggcacggctcttttacctttaattggcactcaaagttcaagatagcttgctgtagaccatcggctgcacagatgattgatgatgaggtcaactttggtaatatctttgatgcctcagaagaagttcaggttactgcaaagtttggtcccaagcaacggcccaaaacccgaaaaacagctctatcatccagatctgcagcgcctaatcctactgaagaaaccggagataggaaagtaggaaccttcagtcaagtcaattcttctaaagagcttaccagccaagaaaggacatccttgatgtgccctagtactgagtcagttgatattatcgctggttctcatagtattctcgatacaccattggaagatgcattgacagttccccagggttctctgtctggtgcttctgctgcagataggacttctcaatatggtgagcacaatgatgatccttctaagttagctacacaccaagaaaacttggtggtttcagatatcaacgtcccacctaacagttcatgtagcaaggctattgatgatatagttgaatttggggacatgtgtgatgtgcaaattgaagaggaaagagttacaaagttccaaccaaaggtgcaaacgaagctccttaaggaaatagccaaatctcggaagactaaccaaaaggtggaaacttccactgtagatgtggttacacaaaatggaaagggcaataatattcagacaaggctccatggcgatccggtacaggatcctaaaagtcatgaaagtgtgcagatcccagattctgaaggattattagcaactgataatagtaaaggttgcaatttagctaacctcaacaatctccttgaggagtcagtccaagaggaaacaatagctaagtttcgttctgatttgcaaccaaatctcgggaaggcttcatcccaggttgctgcgattaaaattaatgttgttgctgttgctccaatagttggagtttgtgacagcaacaatgacatgtacaaagaacctaaagatcaagaaaccatcactggtccagtggcttggtcaccacaggctgtgcatgctgatgttgatttagacaatcacaatgaaccaattaatcctcctattgatggtactcaatcaatgtttggcgaagtcccaggaagagaaaagggaaaatcaaaatctgtatcttttgctctatcggatgtttctgggatagctagccctatagataccaattctgagatgggtaacatcggcgattcctgtagtgacaaattgactgatgaaaatttaagtaactcatctcgtcatatcgctgaaaagcattctattaccaaggaccaatattcaaatgagcaggaccatgagcgggagccactagatcatgctgttcaacagcaaccaaaatcggatgttggagaaagagcatcatctatgaaacgacgttgcaggaaaaaggtgcaaaaagttgggacacctaatcacactgttgatgattattttggtgaagactgtgtcgaaccttcattagctgaagaagataacgatactggtgatcattacactactggtaataagcataaggctaggaaaaagtcaaggggtggtgtagaagagtcacagcagcagaaagctcaaaaaaataaaagcaaggtgtcttcacggggccgcaaacggaccttgaaggatgaatcgacagagaagcctgagaagaagctaacccacagaatacgtcagaggataccaaaagaggttaaggctttactggaaacacctcgtgagcagataaaacccatgaagctttgtgcatcacatctcaggttgttacaagaagctagagagcgtgttgatccaaaagggattccatccgggccatcctctaatacaagaaactttcaactagatgatatggatgatttgggctacagagatgaggaagctaggttctttgacaacgatataacagaggagcatgtacaaaatgcaacaaaattgaactaccattcctacatgaacaaaccagcccggggaaaatggtcaaaatcagataccgacttgttttatgagggtcttcgacaatttggtagcgattttgcaatgatacaacaattattccctgataagactcgccatcaggtgcggcagaaatttaaatctgaggagagaaaaaatccattgctagtccatgatgctatagttcatcgctcaggagatagtttgtatttcaaaaaggtaattaagcagctgaacattgaagatgttgtgctgccagatattaaaagtacacaaaacaagatggtgcatcaagtgaaagaggccctggaaatgagaatgtactggatgatttaaacgaggaggaaaatagttcaaattggttgaacgaagagcatgacgtacagatggccgatgtggaagaagagcatggcgaacagatggatgatgtggaagaagagcgtgatcttggaaatgatggtggtgatgatgatcttggggatgtttttgattggtactagtttatgttaaacacggatgcgagcgtgaatatgagttggtctagctctgcataacaggggtagtttttaggaaaaaaattctttgcatccggaatgcaaagaatcccttttatgactgatttggtgactaggtatcacagagagattggagtggattgagagcctctaatctctccgtgatcctcttacagcctctaacatccaccacctcgtggtccatataagggcttattcggttattcttgtcccatgtggatttgatgagattggaaaaaatatgaaggattttaacttgttcgagatttaaatctatcaaatctcatcaaatccatatggattgagaggaaagcaaacaagccctaaatagaagaaaaacaaattactattggattaagttataaattttgatctgtttttgtggaccttcaagtggtgtatgtgagtggctgtaaaagagtgtgtttgcatctgggatatacagattttttaccctagtttttagatgttgccacagttgtacggttagaattgttcggctggactatcgcttggacgatcaagatactaggtttcctccaaaaacactgcaatactcgaagagcgatgagtcactagacaacatatccaat

SEQ ID NO: 50976 - DNA, 1887 bp, Zea Mays
gtataattctgcttagaagatgtaatgatctatatttacatggctactacaaggtttctccttaatctctttcttttcccctttctttcagcattctattaccaaggaccaatattcaaatgagcaggaccatgagcgggagccactagatcatgctgttcaacaacaaccaaagtcagatgttggagaaagagcatcatctatgaaacgacgttgcaagaaaaaggtgcaaaaagttgggacacctaatcacactgttgatgattattttggtgaagactgtgttgaaccttcattagctgaagaagataacgatactggtgatcattacactactggtaataagcataaggctaggaaaaagtcaaggggtggtgtagaagagtcacagcaacagaaagttcaaaaaaataaaagcaaggtgtcttcacggggccgcaaacggaccttgaaggatgaatcgacagagaagcctgagaagaagctaacccaaagaatacgtcagaggataccaaaagaggttaaggctttactggaaacacctcgtgagcagataaaacccatgaagctttgtgcatcacatctcagccaaaagggattccatccgggccatcctctaatacaagaaactttcaactagatgatatggatgatttgggctacagagatgaggaagctaggttctttgacaacgatataacagaggagcatgtacaaaatgcaacaaaattgaactaccattcctacatggctacatgaacaaaccagcccggggaaaatggtcaaaatcagataccgaattcttttatgagggtcttcgacaatttggtagcgattttgcaatgatacaacaattattccctgataagactcgccatcaggtgcggcagaaatttaaatctgaggagagaaaaaatccattgctagtccatgatgctatagttcatcgctcaggagatagtttgtatttcaaaaaggtaattaagcagctgaacattgaagatgttgtgctgccagatattaaaagtacacaaaacaagatggtgcatcaagtgaaagaggccctggaaatgagaatgtactggatgatttaaacgaggaggaaaatagttcaaattggttgaacgaagagcatgacgtacagatggccgatgtggaagaagagcatggcgaacagatggatgatgtggaagaagagcgtgatcttggaaatgatggtggtgatgatgatcttggggatgtttttgattggtactagtttatgttaaacacggatgcgagcgtgaatatgagttggtctagctctgcataacaggggtagtttttaggaaaaaaattctttgcatccggaatgcaaagaatcccttttatgactgatttggtgactaggtatcacagagagattggagtggattgagagcctctaatctctccgtgatcctcttacagcctctaacatccaccacctcgtggtccatataagggcttattcggttattcttgtcccatgtggatttgatgagattggaaaaaatatgaaggattttaacttgttcgagatttaaatctatcaaatctcatcaaatccatatggattgagaggaaagcaaacaagccctaaatagaagaaaaacaaattactattggattaagttataaattttgatctgtttttgtggaccttcaagtggtgtatgtgagtggctgtaaaagagtgtgtttgcatctgggatatacagattttttaccctagtttttagatgttgccacagttgtacggttagaattgttcggctggactatcgcttggacgatcaagatactaggtttcctccaaaaacactgcaatactcgaagagcgatgagtcactagacaacatatccaat

SEQ ID NO: 50977 - DNA, 927 bp, Zea Mays
ccacaccctatactgtttggttgggagtcaaggttttagatgggaccatccctagaaaaatctatcagtagaatgttgtccctgttcgtccctccaaattagacggataatatcgtcctccgcgggacaaggcacctcacgagcccttctcgtcctcagatctagcgccgcctccttcaccctgctgctggccgcctggccggcgagctcctcagcgtgatcaggaagaagacaaaaaacgttatagtgaagaggaggggttgattgctgcattcaaaagtgtcggggataccttatccaatgctactgagaaggttgccacaggggacactgatgtgccagatgatctttttatagtttgataaacctttcaggttttgagcagacccacatatctctgtatttcaattatctggtggcgcaccctcacattgctagagccttcaacaagttgtcattcgaccacaagttaatctgggctcgcaatttcgtcagtgaaaagttcctaggagtgtgagggcagttggtaggtaggcttggagggttcttttgcttgaaccacattgaacaatgaactgcgatctatgtgtaaccaggagtgtgagggcagttagtagataggcttggacggttcttttgcttgaactacatcaaacaatgaaatgtcgtctaagtatgtcagcggattttgcttgaacatgcagattttgtggaagccttaaacttgatattatgtgtaatgctaggacacattattatgtattgtgtggaattaataatatgtgtgttttgtagacttaatattagttgtaacatatcatgagatgggggcaatggctgcaaacattttttatgctctgttctcgaaccaaacagaggacaggaccaatccatccccagttataccgctaaccaaacaaaaaacaa

SEQ ID NO: 50978 - DNA, 836 bp, Zea Mays
aaattagacggataatatcgtcctccgcgggacaaggcacctcacgagcccttctcgtcctcagatctagcgccgcctccttcaccctgctgctggccgcctggccggcgagctcctcagcgtgcaagatcaggaagaagacaaaaaacgttatagtgaagaggaggggttgattgctgcattcaaaagtgtcggggataccttatccaatgctactgagaaggttgccacaggggacactgatgtgccagatgatctttttatagtttgataaacctttcaggttttgagcagacccacatatctctgtatttcaattatctggtggcgcaccctcacattgctagagccttcaacaagttgtcattcgaccacaagttaatctgggctcgcaatttcgtcagtgaaaagttcctaggagtgtgagggcagttggtaggtaggcttggagggttcttttgcttgaaccacattgaacaatgaactgcgatctatgtgtaaccaggagtgtgagggcagttagtagataggcttggacggttcttttgcttgaactacatcaaacaatgaaatgtcgtctaagtatgtcagcggattttgcttgaacatgcagattttgtggaagccttaaacttgatattatgtgtaatgctaggacacattattatgtattgtgtggaattaataatatgtgtgttttgtagacttaatattagttgtaacatatcatgagatgggggcaatggctgcaaacattttttatgctctgttctcgaaccaaacagaggacaggaccaatccatccccagttataccgctaaccaaacaaaaaacaa

SEQ ID NO: 50979 - DNA, 677 bp, Zea Mays
aaattagacggataatatcgtcctccgcgggacaaggcacctcacgagcccttctcgtcctcagatctagcgccgcctccttcaccctgctgctggccgcctggccggcgagctcctcagcgtggttttgagcagacccacatatctctgtatttcaattatctggtggcgcaccctcacattgctagagccttcaacaagttgtcattcgaccacaagttaatctgggctcgcaatttcgtcagtgaaaagttcctaggagtgtgagggcagttggtaggtaggcttggagggttcttttgcttgaaccacattgaacaatgaactgcgatctatgtgtaaccaggagtgtgagggcagttagtagataggcttggacggttcttttgcttgaactacatcaaacaatgaaatgtcgtctaagtatgtcagcggattttgcttgaacatgcagattttgtggaagccttaaacttgatattatgtgtaatgctaggacacattattatgtattgtgtggaattaataatatgtgtgttttgtagacttaatattagttgtaacatatcatgagatgggggcaatggctgcaaacattttttatgctctgttctcgaaccaaacagaggacaggaccaatccatccccagttataccgctaaccaaacaaaaaacaa

SEQ ID NO: 50980 - DNA, 577 bp, Zea Mays
cgccgccgcaccgccaactgactcgtctcctccccgagcaccacgctgtcgcctcctctgactcgtctcctccccgagatctgctgagaaaattaaagaagctaatgggtacagacacaagacagtcttatattgggactcgatcaacttggtgtttgtgaaagatcatgcaaccggtgaagcggtaaagaccctagctgatggtgcgagagatatgagtaaggaagagggagccggtaaaaagcttacttcatcaacaacctcaggaagagatggttgttgaagcaacttaaaaagtgaaccgagttgtggttgggtgaattgaactgttgttgggtgtgttgatgttgctgtcttagtttatgttgggtgaattgaacatcacattgagtagcaagtaatgtgttccaataatatgtagacatttgagacaaatctgcattattattactattctcgtgatgcatgctgcttgataaattgtagggtgaaaacttgtctctaatttattgcacatgtatatgactcatcaagacacatgtgcacacaagaaacatgtgtattttgtcgtgtacaa

SEQ ID NO: 50981 - DNA, 570 bp, Zea Mays
ccgccaactgactcgtctcctccccgagcaccacgctgtcgcctcctctgactcgtctcctccccgagatctgctgagcagaaaattaaagaagctaatgggtacagacacaagacagtcttatattgggactcgatcaacttggtgtttgtgaaagatcatgcaaccggtgaagcggtaaagaccctagctgatggtgcgagagatatgagtaaggaagagggagccggtaaaaagcttacttcatcaacaacctcaggaagagatggttgttgaagcaacttaaaaagtgaaccgagttgtggttgggtgaattgaactgttgttgggtgtgttgatgttgctgtcttagtttatgttgggtgaattgaacatcacattgagtagcaagtaatgtgttccaataatatgtagacatttgagacaaatctgcattattattactattctcgtgatgcatgctgcttgataaattgtagggtgaaaacttgtctctaatttattgcacatgtatatgactcatcaagacacatgtgcacacaagaaacatgtgtattttgtcgtgtacaa

SEQ ID NO: 50982 - DNA, 2017 bp, Zea Mays
tcggcgtcggcctgcttccagtttaccgcagcggggcgactgacgcgcctccgacgacacgccaggtccggcatccatgggcgccgcggcggccgacctcgaggcgcgtcagctccgcatcctcggccgtatttctgacctcgagctcgccgcgcagcagcaccgcctcggggcgctctccatctccaccgcgccctcagagaaaggcgaggccgacgcgggggctaccgaggttcatctcgcagccctcctggccgcgcgcggcgtgcgggacttcgccttccgtcgcgttcccgccgactactacgaccgctccctcgaggagcggcgcgacctgctccgagccgactcagtcgcccagctctgcaagagtatcgtcatggtgaacacccaagctgctgcagatgttgttgattgcagtaatccaaagaattcaaaatactatgtcgttgttgttcagtatatggcacggcttaacgctgaaaacatcaagaacttcctgtatgaactaaatgagaagcaaataccgaaaaagagatttaacatgaggttggcaccagaagaggagtcacacaagcttactgggtttgtgcataacgctgtcacttgcatcgggatggaaacaaacataccggtcatcatagatgaagctatcaccaaattggatgaggatttcttctggttgggtggcggagaagttgacctcaagctcgggatgcgaacctcacaattcttaagtgtctttagtccattcgtggtgaaatgcagctgatgatagccgtgcagcctaagagaagcttctgattcatttatttctaccgagcctccatgcatccatcacatggagatcctctgttctgtgccactccgaacgccattcctgcgcagactgttttttgcgccgccgctaattccaggtggtgttccggcgctcatccagtagaagccgccattcctgcgcagactgttttttgcatcgaccaggattgctgccttcatttcaggatggtgtatggaagtaggagatcaaaaaggcaccaagaagatgatgagattgatgatgaccttcagcacattggtttttatgctaggtgaataccggaagaggaagaatgaagatcaacgtaaaaagcgtcgaggtttggtttttggacatgaggtatatgatcgtagtagaggagagcatgatttaaaattattcaatgactactttgctgagcgtccaacatatcctgggaagtatttccgacgacgctttcggatgagtcatcctcttttcttgcggatagctgaagctgttaaacaacatgatcactattttgctcagaaaaaaaaatgctgtcggtgctcttgggttttcttgtcttcaaaaggtgactgcagcttttagacagcttgcttatggtgttccagcagattacgttgacgagtatttgtggattggagaaagcacgactatcgagagcctacgaaaatttgtcagggcagtgtgtgaggtttttggaccagagtatttgagacctccaaatgaaaatgatatagctaggttgcttactattggtgaacaacgtggatttcctggaatgattggtagtgtcgattgtatgcattggaagtggaaaaattgtcctacaacttatcaaggcatgtattgtggtcatgtgaaagaaccaactattgtactagaggctgtggcgtctaccgatttatggatatggcatgcattctttggtctaccggggtctttcaatgatattaatgtcttgcacagattccatctttttgatagacttgctcaaggggaagccccatcagttaactatacaattaacggacacaattatgacaagggctactatttagcagatgggatctatcctaattggtcaacctttgtgaaaacaattaaggcaccagcaaatttgaaggacaaactattcagcagctcaggaatcccagcgaaaagatgttgaacgtgcatttggcgtattgcaagctcgctttgccattgttcgag

SEQ ID NO: 50983 - DNA, 602 bp, Zea Mays
gtcggcctgcttccagtttaccgcagcggggcgactgacgcgcctccgacgacacgccaggtccggcatccatgggcgccgcggcggccgacctcgaggcgcgtcagctccgcatcctcggccgtatttctgacctcgagctcgccgcgcagcagcaccgcctcggggcgctctccatctccaccgcgccctcagagaaaggcgaggccgacgcgggggctaccgaggttcatctcgcagccctcctggccgcgcgcggcgtgcgggacttcgccttccgtcgcgttcccgccgactactacgaccgctccctcgaggagcggcgcgacctgctccgagccgactcagtcgcccagctctgcaagagtatcgtcatggtgaacacccaagctgctgcagatgttgttgattgcagtaatccaaagaattcaaaatactatgtcgttgttgttcagtatatggcacggcttaacgctgaaaacatcaagaacttcctgtatgaactaaatgagaagcaaataccgaaaaagagatttaacaggcaagcactttttcctatgtggatgatggtctctacgtggagctccttgattcatatttgg

SEQ ID NO: 50984 - DNA, 2620 bp, Zea Mays
gtcggcctgcttccagtttaccgcagcggggcgactgacgcgcctccgacgacacgccaggtccggcatccatgggcgccgcggcggccgacctcgaggcgcgtcagctccgcatcctcggccgtatttctgacctcgagctcgccgcgcagcagcaccgcctcggggcgctctccatctccaccgcgccctcagagaaaggcgaggccgacgcgggggctaccgaggttcatctcgcagccctcctggccgcgcgcggcgtgcgggacttcgccttccgtcgcgttcccgccgactactacgaccgctccctcgaggagcggcgcgacctgctccgagccgactcagtcgcccagctctgcaagagtatcgtcatggtgaacacccaagctgctgcagatgttgttgattgcagtaatccaaagaattcaaaatactatgtcgttgttgttcagtatatggcacggcttaacgctgaaaacatcaagaacttcctgtatgaactaaatgagaagcaaataccgaaaaagagatttaacatgaggttggcaccagaagaggagtcacacaagcttactgggtttgtgcataacgctgtcacttgcatcgggatggaaacaaacataccgatagatggtcctactctagttacgcaggattaagtgatgcatagtattaatagcaaatagttggaacttggaaggttttgaacactcagctatgggtcatcatagatgaagctatcaccaaattggatgaggatttcttctggttgggtggcggagaagttgacctcaagctcgggatgcgaacctcacaattcttaagtgtctttagtccattcgtggtgaaatgcagctgatgatagccgtgcagcctaagagaagcttctgattcatttatttctaccgagcctccatgcatccatcacatggaggtacaccacaatactaggaggttttgcttggatctggggtttggatgtctgtcttttttggagcaggctattcctgttcagttgctcgcctcacattatttacagctgattgttgttacgactgatgtggtggaggggacattcttgggaagattgagatatttgccacaactaggcatatacaataatactctctgtagtttgtgcctaaaattagcactggttacttgtgtaatcaacgagactcttactttcatcgaaaggatgacactatgagttggtgcgattttcttttatttttttcaaacactacacaatgtcatacccttagaagggtcggtgacacatttatagccctaagagcaactccaatcatgagtcccctagttgggccctataatttaagttagctacctgttctatttgtttagggtccaaatacaattgttgattcctaccgtggaccctaaaatagcttacatttgtaatcaacccatattcccctgtacgtagatcctctgttctgtgccactccgaacgccattcctgcgcagactgttttttgcgccgccgctaattccaggtggtgttccggcgctcatccagtagaagccgccattcctgcgcagactgttttttgcatcgaccaggattgctgccttcatttcaggatggtgtatggaagtaggagatcaaaaaggcaccaagaagatgatgagattgatgatgaccttcagcacattggtttttatgctaggtgaataccggaagaggaagaatgaagatcaacgtaaaaagcgtcgaggtttggtttttggacatgaggtatatgatcgtagtagaggagagcatgatttaaaattattcaatgactactttgctgagcgtccaacatatcctgggaagtatttccgacgacgctttcggatgagtcatcctcttttcttgcggatagctgaagctgttaaacaacatgatcactattttgctcagaaaaaaaaatgctgtcggtgctcttgggttttcttgtcttcaaaaggtgactgcagcttttagacagcttgcttatggtgttccagcagattacgttgacgagtatttgtggattggagaaagcacgactatcgagagcctacgaaaatttgtcagggcagtgtgtgaggtttttggaccagagtatttgagacctccaaatgaaaatgatatagctaggttgcttactattggtgaacaacgtggatttcctggaatgattggtagtgtcgattgtatgcattggaagtggaaaaattgtcctacaacttatcaaggcatgtattgtggtcatgtgaaagaaccaactattgtactagaggctgtggcgtctaccgatttatggatatggcatgcattctttggtctaccggggtctttcaatgatattaatgtcttgcacagattccatctttttgatagacttgctcaaggggaagccccatcagttaactatacaattaacggacacaattatgacaagggctactatttagcagatgggatctatcctaattggtcaacctttgtgaaaacaattaaggcaccagcaaatttgaaggacaaactattcagcagctcaggaatcccagcgaaaagatgttgaacgtgcatttggcgtattgcaagctcgctttgccattgttcgag

SEQ ID NO: 50985 - DNA, 3646 bp, Zea Mays
gtcggcctgcttccagtttaccgcagcggggcgactgacgcgcctccgacgacacgccaggtccggcatccatgggcgccgcggcggccgacctcgaggcgcgtcagctccgcatcctcggccgtatttctgacctcgagctcgccgcgcagcagcaccgcctcggggcgctctccatctccaccgcgccctcagagaaaggcgaggccgacgcgggggctaccgaggttcatctcgcagccctcctggccgcgcgcggcgtgcgggacttcgccttccgtcgcgttcccgccgactactacgaccgctccctcgaggagcggcgcgacctgctccgagccgactcagtcgcccagctctgcaagagtatcgtcatggtttggctcgccccctttccatttcctcgcggctgtttcgtcgagcactaagcatgccgtctgcctaactgttaggttgactacaattacgttaatttagcattttatagtgattttttgtgcgcataggatagtttgaataggataatttactgatgattgttgctattgaatattgaacaattaatcatgtactctctgaagactgcaaatagttatgttgaatttgtttgtataaatagtatcatgggcgcaattgctatggtttgttggtggctaagtaaagatcatgcgttatgcgttatggagtagtactgtgctatcctgttgaagattcaaaataagtgcataactgctgtttctcattatttcattgcatgtaggctgatggacagcagagtttgctgttttatatgctactatgttatgagctacggcaagttgcaacgaaatttgttatggcatttctatcttatatcagagataatcagtgccaagtttatcagaagcagttgttttttctccgaaataattaacactgtctataatgcgcttaatcctatataggatattacctaaatcaatttccctttatttttggtgcaagtagctgtgtttgctaatttgttgatcacatttgattgctatatggcatagataagagataaagaccactatatgcgagcacctcaaagtttgagttgaaaatttcctgctttgaacattaaggagagaggttgacatgcttgtgtgcttcatcagtttcttttagaatttttcacccatttaaaatatctgtgcaacaggaactttttaaatcgcattggacttatttaaattctacagttcattgagaatcagagttgtaatctgagcaatggtggagcatcactgcttatcagcttaattggattgtctgaacactaaacaagtactattttatcctgggaaggacatgcattgaagcatagagctacagttttttgatcctacctcaatttttttttcacgaacaatacactagaaccgcctgtcatttcactaagaagatcctgcctccaaatctgataataatctttctttaacattagttatgatgaattatgtccatcttttattaggtgaacacccaagctgctgcagatgttgttgattgcagtaatccaaagaattcaaaatactatgtcgttgttgttcagtatatggcacggcttaacgctgaaaacatcaagaacttcctgtatgaactaaatgagaagcaaataccgaaaaagagatttaacatgaggttggcaccagaagaggagtcacacaagcttactgggtttgtgcataacgctgtcacttgcatcgggatggaaacaaacataccggtcatcatagatgaagctatcaccaaattggatgaggatttcttctggttgggtggcggagaagttgacctcaagctcgggatgcgaacctcacaattcttaagtgtctttagtccattcgtggtgaaatgcagctgatgatagccgtgcagcctaagagaagcttctgattcatttatttctaccgagcctccatgcatccatcacatggaggtacaccacaatactaggaggttttgcttggatctggggtttggatgtctgtcttttttggagcaggctattcctgttcagttgctcgcctcacattatttacagctgattgttgttacgactgatgtggtggaggggacattcttgggaagattgagatatttgccacaactaggcatatacaataatactctctgtagtttgtgcctaaaattagcactggttacttgtgtaatcaacgagactcttactttcatcgaaaggatgacactatgagttggtgcgattttcttttatttttttcaaacactacacaatgtcatacccttagaagggtcggtgacacatttatagccctaagagcaactccaatcatgagtcccctagttgggccctataatttaagttagctacctgttctatttgtttagggtccaaatacaattgttgattcctaccgtggaccctaaaatagcttacatttgtaatcaacccatattcccctgtacgtagatcctctgttctgtgccactccgaacgccattcctgcgcagactgttttttgcgccgccgctaattccaggtggtgttccggcgctcatccagtagaagccgccattcctgcgcagactgttttttgcatcgaccaggattgctgccttcatttcaggatggtgtatggaagtaggagatcaaaaaggcaccaagaagatgatgagattgatgatgaccttcagcacattggtttttatgctaggtgaataccggaagaggaagaatgaagatcaacgtaaaaagcgtcgaggtttggtttttggacatgaggtatatgatcgtagtagaggagagcatgatttaaaattattcaatgactactttgctgagcgtccaacatatcctgggaagtatttccgacgacgctttcggatgagtcatcctcttttcttgcggatagctgaagctgttaaacaacatgatcactattttgctcagaaaaaaaaatgctgtcggtgctcttgggttttcttgtcttcaaaaggtgactgcagcttttagacagcttgcttatggtgttccagcagattacgttgacgagtatttgtggattggagaaagcacgactatcgagagcctacgaaaatttgtcagggcagtgtgtgaggtttttggaccagagtatttgagacctccaaatgaaaatgatatagctaggttgcttactattggtgaacaacgtggatttcctggaatgattggtagtgtcgattgtatgcattggaagtggaaaaattgtcctacaacttatcaaggcatgtattgtggtcatgtgaaagaaccaactattgtactagaggctgtggcgtctaccgatttatggatatggcatgcattctttggtctaccggggtctttcaatgatattaatgtcttgcacagattccatctttttgatagacttgctcaaggggaagccccatcagttaactatacaattaacggacacaattatgacaagggctactatttagcagatgggatctatcctaattggtcaacctttgtgaaaacaattaaggcaccagcaaatttgaaggacaaactattcagcagctcaggaatcccagcgaaaagatgttgaacgtgcatttggcgtattgcaagctcgctttgccattgttcgag

SEQ ID NO: 50986 - DNA, 2177 bp, Zea Mays
atcaatttccctttatttttggtgcaagtagctgtgtttgctaatttgttgatcacatttgattgctatatggcatagataagagataaagaccactatatgcgagcacctcaaagtttgagttgaaaatttcctgctttgaacattaaggagagaggttgacatgcttgtgtgcttcatcagtttcttttagaatttttcacccatttaaaatatctgtgcaacaggaactttttaaatcgcattggacttatttaaattctacagttcattgagaatcagagttgtaatctgagcaatggtggagcatcactgcttatcagcttaattggattgtctgaacactaaacaagtactattttatcctgggaaggacatgcattgaagcatagagctacagttttttgatcctacctcaatttttttttcacgaacaatacactagaaccgcctgtcatttcactaagaagatcctgcctccaaatctgataataatctttctttaacattagttatgatgaattatgtccatcttttattaggtgaacacccaagctgctgcagatgttgttgattgcagtaatccaaagaattcaaaatactatgtcgttgttgttcagtatatggcacggcttaacgctgaaaacatcaagaacttcctgtatgaactaaatgagaagcaaataccgaaaaagagatttaacatgaggttggcaccagaagaggagtcacacaagcttactgggtttgtgcataacgctgtcacttgcatcgggatggaaacaaacataccggtcatcatagatgaagctatcaccaaattggatgaggatttcttctggttgggtggcggagaagttgacctcaagctcgggatgcgaacctcacaattcttaagtgtctttagtccattcgtggtgaaatgcagctgatgatagccgtgcagcctaagagaagcttctgattcatttatttctaccgagcctccatgcatccatcacatggagatcctctgttctgtgccactccgaacgccattcctgcgcagactgttttttgcgccgccgctaattccaggtggtgttccggcgctcatccagtagaagccgccattcctgcgcagactgttttttgcatcgaccaggattgctgccttcatttcaggatggtgtatggaagtaggagatcaaaaaggcaccaagaagatgatgagattgatgatgaccttcagcacattggtttttatgctaggtgaataccggaagaggaagaatgaagatcaacgtaaaaagcgtcgaggtttggtttttggacatgaggtatatgatcgtagtagaggagagcatgatttaaaattattcaatgactactttgctgagcgtccaacatatcctgggaagtatttccgacgacgctttcggatgagtcatcctcttttcttgcggatagctgaagctgttaaacaacatgatcactattttgctcagaaaaaaaaatgctgtcggtgctcttgggttttcttgtcttcaaaaggtgactgcagcttttagacagcttgcttatggtgttccagcagattacgttgacgagtatttgtggattggagaaagcacgactatcgagagcctacgaaaatttgtcagggcagtgtgtgaggtttttggaccagagtatttgagacctccaaatgaaaatgatatagctaggttgcttactattggtgaacaacgtggatttcctggaatgattggtagtgtcgattgtatgcattggaagtggaaaaattgtcctacaacttatcaaggcatgtattgtggtcatgtgaaagaaccaactattgtactagaggctgtggcgtctaccgatttatggatatggcatgcattctttggtctaccggggtctttcaatgatattaatgtcttgcacagattccatctttttgatagacttgctcaaggggaagccccatcagttaactatacaattaacggacacaattatgacaagggctactatttagcagatgggatctatcctaattggtcaacctttgtgaaaacaattaaggcaccagcaaatttgaaggacaaactattcagcagctcaggaatcccagcgaaaagatgttgaacgtgcatttggcgtattgcaagctcgctttgccattgttcgag

SEQ ID NO: 50987 - DNA, 1982 bp, Zea Mays
gctattcggtgcccagcggaacggggctgcggaccccatcggaggcggaaagacgctgttctggccggaggggaaggcgaagacgctgttggagccgtggtccgtgctggactgcacgcggagccccagcaactcaacgtcgacgctgtcgtcgtccctgggcagcggcgctgaggactcgaccggcgtggcggtggtttcggacagaagcgccgccgccgaagccaccaaatggggagcccccggcgagcacggcggcggcggcgggaaggaggactgggccggcggctgtgagctgccgccgattcccaccggcctcgacatgggggtcgtggtcgccgacagctgggacgccatgctcggcaacgccgctgcggcggcgcaggaccagacgttcttgaactggttcattggggccgccggcgacttggatcagtcaggaccgccgcttcccgtgcaccaccagccgctcctcgacaatgtgggcttcgggttcccggcagcggaccctctgggtttcacgctcgatccccacctcggcggcgttgcctctgacatgtcgtcccctggtgcggtgtcgcaaactaccaacagtggcggcggtggcaacaaggcgtcctcggccttcggcctcttatccccggagtctgcttccttccagccgccgccgcttccggtgctgttccatgaaggcatcgacacaaagccccctcttgatacgcagtcgcccggcctcctccaccagtaccagcaccagccgacccccgccacaaccttcctcatgtccatcccctccttccccagctacaatcagcagtcgccactcgtccatccaccggccaaacgtcatcaatccataggaggcgacctctatctcgcccgaactcggcttctgccgccgccgccgacggggcaaggtcatgcctttccaccactaaatggtcctgctccattccagctccagccttcgccgccactgccccacggggcaatgaagaggacggctgcggaggcggcgcagcagcagttgctggacgagctggcggcggcggcaaaggccgctgaagctggcaattccattggcgcgcgagcgatattggcgcggctcaatcaccagcttcccccgctcgggaagccgttcctccgctccgcctcctacctcaaggaggccctcctcgcgctcgccgaaggccatcacggcggctgccacctcaaatcaccgctcgacgttgccctcaagctcgcggcgtacaagactttctctgatcactcgcccgtgctccagttcaccaacttcaccgcaacgcaggcacttcttgacgaaattggtggcagcacgtcgtcctattgagaagttcctgattcagccaagaattgaggattcggtgcttgggcggggcaaggtggacaatccaattgcatggagaagtgcatttgcagctgctaggttcgtgcctgttccacccagcaattgggcagaggcagaggccgattgcctcctgaaacgggtgcaggtccacggtttccatgtggagaaatgtggggtcgggctcacactatactggcagcatggcgagcttgtcactgtatcagcatggcggtgctgatcagcaatctacgcctgtgggcaccaatatttcaccaccatttgctagcagcttcaactccagtaacgtgtatttcgtcttgcaatttagtgttgcaaaggtaacaaatatattggtgttgaacccttcatgttgattatctttgcaacttattagctagaagtagaactagcggatttttagcaatgttggtgtcaatgtctctagtgtaatgatgttgctctaggtttttaccctgcttgctctcgggtcactagacattctaatgtgacttgaaacactgcttgtgaggagagggtataattaacctatcaaatgtctgtggtacagtataatacgtgtttcatgttcttttatatcagttcttcttcttat

SEQ ID NO: 50988 - DNA, 4811 bp, Zea Mays
ttggactagtggctagccccgccccggctagacgccacgatccattagccctagccaacgaccggctgccagactgcaacagccaccggcggtcggcacgacagcacggtccttccattgttgctcccagctccaacgcagcattactcatctccattctccagtccgataatccactcattacctcatcatcgtttccaaaagcaaagctttccacgcagattccaccattaaattgggcgaacttttttgaattaaaaactcaaatcctggaaaacgagatgcggtaggctggtagtaggaggactaatcatgtgggcgacgctacataaacccgtcgcgcacgccaacttgcgtctcctcctcacagtctccgccttctccggaccactccacttaggcaccgccagcgctgtcgcggcggcggttacgacccgacgctcgagttctagcaggggcgtcgcggccaccgcgatgccttcgtcgtctccgcctccgctgccaccagccgaggagacgaccgcctctgctgccgctctcgcccctgagggtggattctccctcaccgagccctcgttcctcgagtccctcatgccgaagaaggagatcggcgtcgaccgcttcctcgccgctcaccctgagtatgacgggcgcagcgcactcatcgctatcttcgattctggagtcgatccagctgctgctgggttacagactacttcagatggaaagcctaaaatccttgatgtacttgattgcactggtagtggtgatgttgacacgtccaaagtggtgaaagctgatgctgatggtgctattgttggtgcttcaggtgcccgtttggttataaacccctcatggaaaaacccttctcaagagtggcatgttggctgtaaattaatatatgaactgtttactgacacacttacatctcgattgaagaaagaaagaaagaagaaatgggacgaggaaaaccaggaatcaatttccgatgctctgaagcagctgaatgaatttgaaaagaagcatcctaagcctgatgacaccatgctgaagaaggcacatgaagacatgcaaagcagacttgattacctgaggaaacaagctgaaggttatgacgataaggggcctgtaattgacattgttacatggaatgatggtgatgtgtggagggttgctgtcgatacccagacccttgagggtaacaatgatggtggaaaactagcagattttgttcctctgacaaactacaggcttgaacgcaaatatgcaattttcagcaaattggatgcttgctcttttgtagcaaatgtttataatgatgggaaccttgtcagtatagtaactgactgctctccccatgctactcatgtcgcgggcattgcagctgcatttcatccagatgaacctctgctgaatggagttgcacctggagcacaattgatttcctgtaagattggagacactcgcttaggatctatggagacagggacggggctggtgagggccttgatagctgcagtagagcacaaatgtgatctgattaacatgagctatggagagcctacccttcttcctgactatggcagattcattgatctttctaatgaggttgtggacaaacatcgcattatatttattagtagcgccggaaacaatggaccggctttgaacactgtgggtgctccaggtgggactagtacaagcattattggtgttggtgcttatgtttcaccagccatggctgctggagctcactgtgttgtacaaccacctgcaaagggaatggagtacacatggtctagccgcgggcctactgctgatggggatcttggcgtttccattagtgcacctggtggtgcagttgctcctgtaccaacttggacgcttcaatctcgcatgctcatgaatggcacttccatgtcatctccttctgcctgtggtggggtagctcttcttgttagtggcatgaaggctgaaggcattccattaagcccttattctgtaagaaaagcaatagagaatacagccgcatctataagtaatgcacctgaggagaaactgaccacaggaaatgggcttttgcaagttgatagggcttttgaatatgcacagcaggctaagaagttgccacttgtttcttatagaatctcaatcaatcaagtgggaaagtcagttccaaaactaagaggaatatacctccgcgggggcaatgcatgctgccaaacaagtgagtggactgtgcaacttgacccaaaatttcatgagggcgcgagtaacttggagcaactggttccttttgaggagtgcctgcaactgcattctactgatacctctgtggttcaaattcctgagtatatactggtgacaaacaatggacgcagtttcaacattgttgtcaatcctgctaatatcagcagtggccttcactattttgaagtttatggcatagattacaaagcaccatggcgtgggcctattttccgtgtgccaattactgtaataaagcctattgctctattgggagagccaccactattgtcaatttcaaaccttcgttttcaatctggtcatattgaaaggaggttcataaatgtaccttttggagcttcatgggcggaagttactatgcgaacatcagcttttgatactcctagaagattctttttggacactgttcagatctgtccactgaagcgacctgttaaatgggaggctgttgttactttctcttctccatcttcaaagaatttcagttttcctgtagaaggtggcttaactttggagttgtccatagcccagttctggtctagtggaattgctagccatgaacctacctgtgttgattttgagattgtgctgcatggaatatccattgatcagaaagtaagtacccttgatggtgagtcacccttgcttatagttgctagatcacttctagcgtcagagaagcttgttcctgttggcaccctgaacaagatcaggataccttatcgacccgtggagtgtaatctttcttcacttcccactgaccgtgataaattgccctctggcaagcaaattattgccctgaccttaacttacaagttcaaattagaagacaatgctgaaataaagccccatgtgccactgcttaacaacagaatatatgacaataaatttgagtctcagttttatagaatatcagattcaaacaagcgtatttactcgtccggagacgtttaccctagttatgtcagactttccaaaggagaatacacgttgcaactgtacataaggcatgagaatgtgcaattcttagagaaactcaaggaactggttctgtttattgagaggaaactagacaaaaaggatttcgttccattgatgttctactcccaacctgatggtcctatagttggaagtggcaccttcaaatccactgttctagttccaggcgaacctgaagcattctatgtgggtcctccgtctagtgaaaaactcccaaagaatgctccacctggggctgttttggttgggtccataacctatggtactgtaagcacatttaacaagaaagatgaacaaaaccaccgtgctccagtatcttatagtatctcatataccattttgccatcaaaggttgatgataaagaaaagggggttttagttggtacaaagagcatacctgaacagttagatgaggaggttcgagacaccaagataaagtttctttccagcgttaagcaactaactgaggaggacaagtctgcctggtcagaacttgtggtttctctgaagtcagaatatccgaagtacacacctttgctttctaagattttgcaatgtgtcctccagaaaggaactgatggtgataagattagccatgaaaaagaggttattgctgcagccgatgaggttgtgggcagtattgataaagaggaactggctaagtatttatctctaaattcagatcctgaagatgaagaagcacagaaattcaagaaaaaaatagaagaaacgcgagatcagttggctgatgcactatatcaaaagtgtcttgcattggctgagattgaatcactgaagtctgatgagtcaattgaggtatctgctaaagatatttttgaggagaattacaaagaattgattaaatgggttgatgtcaaatctgcaaaatatggcacttcgactgttttgcgtgaaaaacgctgtggaagacctggtacagcattgaagattctaaatgatttgattcaaaatgaatctgaaccaaagaaaaagctttatgatttgaagatccagttgattgaggagatgggatggaaccatgtctcaacctacgaaaaacagtggatgcaagtccgctttcccccatgtctgccaccattttgattgtgaactcatttttacaatggctctatcatcctgggttcagtagttgtcattttcattgctgggtgcgtcagttcattatttcgatggcaaacagccaactaggcaagctactggatttgtgcgtttggggacacagttattccatagttattttgtggtacaatatcaggggagtcctttctccaaggagataagacggaacagagatattttgatggacttgaaggagattttatcctcttcaatccttataatgtctatcaaaccaaataaggtttataatccttgtcaaaccaaacaatgcctaaatgagcgtagaatagccgagaatgatatgggcttgtctttaacaatttggcattaaacatagttagctgaacattaagcaaaataactgcgtaaaagcatcacttgttaaggcacttcgaggacgcgag

SEQ ID NO: 50989 - DNA, 4738 bp, Zea Mays
ttggactagtggctagccccgccccggctagacgccacgatccattagccctagccaacgaccggctgccagactgcaacagccaccggcggtcggcacgacagcacggtccttccattgttgctcccagctccaacgcagcattactcatctccattctccagtccgataatccactcattacctcatcatcgtttccaaaagcaaagctttccacgcagattccaccattaaattgggcgaacttttttgaattaaaaactcaaatcctggaaaacgagatgcggtaggctggtagtaggaggactaatcatgtgggcgacgctacataaacccgtcgcgcacgccaacttgcgtctcctcctcacagtctccgccttctccggaccactccacttaggcaccgccagcgctgtcgcggcggcggttacgacccgacgctcgagttctagcaggggcgtcgcggccaccgcgatgccttcgtcgtctccgcctccgctgccaccagccgaggagacgaccgcctctgctgccgctctcgcccctgagggtggattctccctcaccgagccctcgttcctcgagtccctcatgccgaagaaggagatcggcgtcgaccgcttcctcgccgctcaccctgagtatgacgggcgcagcgcactcatcgctatcttcgattctggagtcgatccagctgctgctgggttacagactacttcagatggaaagcctaaaatccttgatgtacttgattgcactggtagtggtgatgttgacacgtccaaagtggtgaaagctgatgctgatggtgctattgttggtgcttcaggtgcccgtttggttataaacccctcatggaaaaacccttctcaagagtggcatgttggctgtaaattaatatatgaactgtttactgacacacttacatctcgattgaagaaagaaagaaagaagaaatgggacgaggaaaaccaggaatcaatttccgatgctctgaagcagctgaatgaatttgaaaagaagcatcctaagcctgatgacaccatgctgaagaaggcacatgaagacatgcaaagcagacttgattacctgaggaaacaagctgaaggttatgacgataaggggcctgtaattgacattgttacatggaatgatggtgatgtgtggagggttgctgtcgatacccagacccttgagggtaacaatgatggtggaaaactagcagattttgttcctctgacaaactacaggcttgaacgcaaatatgcaattttcagcaaattggatgcttgctcttttgtagcaaatgtttataatgatgggaaccttgtcagtatagtaactgactgctctccccatgctactcatgtcgcgggcattgcagctgcatttcatccagatgaacctctgctgaatggagttgcacctggagcacaattgatttcctgtaagattggagacactcgcttaggatctatggagacagggacggggctggtgagggccttgatagctgcagtagagcacaaatgtgatctgattaacatgagctatggagagcctacccttcttcctgactatggcagattcattgatctttctaatgaggttgtggacaaacatcgcattatatttattagtagcgccggaaacaatggaccggctttgaacactgtgggtgctccaggtgggactagtacaagcattattggtgttggtgcttatgtttcaccagccatggctgctggagctcactgtgttgtacaaccacctgcaaagggaatggagtacacatggtctagccgcgggcctactgctgatggggatcttggcgtttccattagtgcacctggtggtgcagttgctcctgtaccaacttggacgcttcaatctcgcatgctcatgaatggcacttccatgtcatctccttctgcctgtggtggggtagctcttcttgttagtggcatgaaggctgaaggcattccattaagcccttattctgtaagaaaagcaatagagaatacagccgcatctataagtaatgcacctgaggagaaactgaccacaggaaatgggcttttgcaagttgatagggcttttgaatatgcacagcaggctaagaagttgccacttgtttcttatagaatctcaatcaatcaagtgggaaagtcagttccaaaactaagaggaatatacctccgcgggggcaatgcatgctgccaaacaagtgagtggactgtgcaacttgacccaaaatttcatgagggcgcgagtaacttggagcaactggttccttttgaggagtgcctgcaactgcattctactgatacctctgtggttcaaattcctgagtatatactggtgacaaacaatggacgcagtttcaacattgttgtcaatcctgctaatatcagcagtggccttcactattttgaagtttatggcatagattacaaagcaccatggcgtgggcctattttccgtgtgccaattactgtaataaagcctattgctctattgggagagccaccactattgtcaatttcaaaccttcgttttcaatctggtcatattgaaaggaggttcataaatgtaccttttggagcttcatgggcggaagttactatgcgaacatcagcttttgatactcctagaagattctttttggacactgttcagatctgtccactgaagcgacctgttaaatgggaggctgttgttactttctcttctccatcttcaaagaatttcagttttcctgtagaaggtggcttaactttggagttgtccatagcccagttctggtctagtggaattgctagccatgaacctacctgtgttgattttgagattgtgctgcatggaatatccattgatcagaaagtaagtacccttgatggtgagtcacccttgcttatagttgctagatcacttctagcgtcagagaagcttgttcctgttggcaccctgaacaagatcaggataccttatcgacccgtggagtgtaatctttcttcacttcccactgaccgtgataaattgccctctggcaagcaaattattgccctgaccttaacttacaagttcaaattagaagacaatgctgaaataaagccccatgtgccactgcttaacaacagaatatatgacaataaatttgagtctcagttttatagaatatcagattcaaacaagcgtatttactcgtccggagacgtttaccctagttatgtcagactttccaaaggagaatacacgttgcaactgtacataaggatttcgttccattgatgttctactcccaacctgatggtcctatagttggaagtggcaccttcaaatccactgttctagttccaggcgaacctgaagcattctatgtgggtcctccgtctagtgaaaaactcccaaagaatgctccacctggggctgttttggttgggtccataacctatggtactgtaagcacatttaacaagaaagatgaacaaaaccaccgtgctccagtatcttatagtatctcatataccattttgccatcaaaggttgatgataaagaaaagggggttttagttggtacaaagagcatacctgaacagttagatgaggaggttcgagacaccaagataaagtttctttccagcgttaagcaactaactgaggaggacaagtctgcctggtcagaacttgtggtttctctgaagtcagaatatccgaagtacacacctttgctttctaagattttgcaatgtgtcctccagaaaggaactgatggtgataagattagccatgaaaaagaggttattgctgcagccgatgaggttgtgggcagtattgataaagaggaactggctaagtatttatctctaaattcagatcctgaagatgaagaagcacagaaattcaagaaaaaaatagaagaaacgcgagatcagttggctgatgcactatatcaaaagtgtcttgcattggctgagattgaatcactgaagtctgatgagtcaattgaggtatctgctaaagatatttttgaggagaattacaaagaattgattaaatgggttgatgtcaaatctgcaaaatatggcacttcgactgttttgcgtgaaaaacgctgtggaagacctggtacagcattgaagattctaaatgatttgattcaaaatgaatctgaaccaaagaaaaagctttatgatttgaagatccagttgattgaggagatgggatggaaccatgtctcaacctacgaaaaacagtggatgcaagtccgctttcccccatgtctgccaccattttgattgtgaactcatttttacaatggctctatcatcctgggttcagtagttgtcattttcattgctgggtgcgtcagttcattatttcgatggcaaacagccaactaggcaagctactggatttgtgcgtttggggacacagttattccatagttattttgtggtacaatatcaggggagtcctttctccaaggagataagacggaacagagatattttgatggacttgaaggagattttatcctcttcaatccttataatgtctatcaaaccaaataaggtttataatccttgtcaaaccaaacaatgcctaaatgagcgtagaatagccgagaatgatatgggcttgtctttaacaatttggcattaaacatagttagctgaacattaagcaaaataactgcgtaaaagcatcacttgttaaggcacttcgaggacgcgag

SEQ ID NO: 50990 - DNA, 2517 bp, Zea Mays
ccacgatccattagccctagccaacgaccggctgccagactgcaacagccaccggcggtcggcacgacagcacggtccttccattgttgctcccagctccaacgcagcattactcatctccattctccagtccgataatccactcattacctcatcatcgtttccaaaagcaaagctttccacgcagattccaccattaaattgggcgaacttttttgaattaaaaactcaaatcctggaaaacgagatgcggtaggctggtagtaggaggactaatcatgtgggcgacgctacataaacccgtcgcgcacgccaacttgcgtctcctcctcacagtctccgccttctccggaccactccacttaggcaccgccagcgctgtcgcggcggcggttacgacccgacgctcgagttctagcaggggcgtcgcggccaccgcgatgccttcgtcgtctccgcctccgctgccaccagccgaggagacgaccgcctctgctgccgctctcgcccctgagggtggattctccctcaccgagccctcgttcctcgagtccctcatgccgaagaaggagatcggcgtcgaccgcttcctcgccgctcaccctgagtatgacgggcgcagcgcactcatcgctatcttcgattctggagtcgatccagctgctgctgggttacagactacttcagatggaaagcctaaaatccttgatgtacttgattgcactggtagtggtgatgttgacacgtccaaagtggtgaaagctgatgctgatggtgctattgttggtgcttcaggtgcccgtttggttataaacccctcatggaaaaacccttctcaagagtggcatgttggctgtaaattaatatatgaactgtttactgacacacttacatctcgattgaagaaagaaagaaagaagaaatgggacgaggaaaaccaggaatcaatttccgatgctctgaagcagctgaatgaatttgaaaagaagcatcctaagcctgatgacaccatgctgaagaaggcacatgaagacatgcaaagcagacttgattacctgaggaaacaagctgaaggttatgacgataaggggcctgtaattgacattgttacatggaatgatggtgatgtgtggagggttgctgtcgatacccagacccttgagggtaacaatgatggtggaaaactagcagattttgttcctctgacaaactacaggcttgaacgcaaatatgcaattttcagcaaattggatgcttgctcttttgtagcaaatgtttataatgatgggaaccttgtcagtatagtaactgactgctctccccatgctactcatgtcgcgggcattgcagctgcatttcatccagatgaacctctgctgaatggagttgcacctggagcacaattgatttcctgtaagattggagacactcgcttaggatctatggagacagggacggggctggtgagggccttgatagctgcagtagagcacaaatgtgatctgattaacatgagctatggagagcctacccttcttcctgactatggcagattcattgatctttctaatgaggttgtggacaaacatcgcattatatttattagtagcgccggaaacaatggaccggctttgaacactgtgggtgctccaggtgggactagtacaagcattattggtgttggtgcttatgtttcaccagccatggctgctggagctcactgtgttgtacaaccacctgcaaagggaatggagtacacatggtctagccgcgggcctactgctgatggggatcttggcgtttccattagtgcacctggtggtgcagttgctcctgtaccaacttggacgcttcaatctcgcatgctcatgaatggcacttccatgtcatctccttctgcctgtggtggggtagctcttcttgttagtggcatgaaggctgaaggcattccattaagcccttattctgtaagaaaagcaatagagaatacagccgcatctataagtaatgcacctgaggagaaactgaccacaggaaatgggcttttgcaagttgatagggcttttgaatatgcacagcaggctaagaagttgccacttgtttcttatagaatctcaatcaatcaagtgggaaagtcagatcatccaggccccaagagtgatgagggagttcaggcctttcttaaccattccagatttccagatacagcagcggagcctggcctcacatccttcttggagtggtggaagggggctgcagaggcagtgcagggaatggtcaagaaagggctggattctctcattattttgggagcctggaagatatgtaacctccgcaatagatgtgtgtttgatggagagaaccccagcctttctcgaatcctgaagcaggctgatgaggagagaagcctttgggagctagcaggagccaagggtctctcctatttggctgctccattgtcggtagcctgaattcctcatggatttgtttatttatgcttgtttttggcctccgtaa

SEQ ID NO: 50991 - DNA, 4700 bp, Zea Mays
ccacgatccattagccctagccaacgaccggctgccagactgcaacagccaccggcggtcggcacgacagcacggtccttccattgttgctcccagctccaacgcagcattactcatctccattctccagtccgataatccactcattacctcatcatcgtttccaaaagcaaagctttccacgcagattccaccattaaattgggcgaacttttttgaattaaaaactcaaatcctggaaaacgagatgcggtaggctggtagtaggaggactaatcatgtgggcgacgctacataaacccgtcgcgcacgccaacttgcgtctcctcctcacagtctccgccttctccggaccactccacttaggcaccgccagcgctgtcgcggcggcggttacgacccgacgctcgagttctagcaggggcgtcgcggccaccgcgatgccttcgtcgtctccgcctccgctgccaccagccgaggagacgaccgcctctgctgccgctctcgcccctgagggtggattctccctcaccgagccctcgttcctcgagtccctcatgccgaagaaggagatcggcgtcgaccgcttcctcgccgctcaccctgagtatgacgggcgcagcgcactcatcgctatcttcgattctggagtcgatccagctgctgctgggttacagactacttcagatggaaagcctaaaatccttgatgtacttgattgcactggtagtggtgatgttgacacgtccaaagtggtgaaagctgatgctgatggtgctattgttggtgcttcaggtgcccgtttggttataaacccctcatggaaaaacccttctcaagagtggcatgttggctgtaaattaatatatgaactgtttactgacacacttacatctcgattgaagaaagaaagaaagaagaaatgggacgaggaaaaccaggaatcaatttccgatgctctgaagcagctgaatgaatttgaaaagaagcatcctaagcctgatgacaccatgctgaagaaggcacatgaagacatgcaaagcagacttgattacctgaggaaacaagctgaaggttatgacgataaggggcctgtaattgacattgttacatggaatgatggtgatgtgtggagggttgctgtcgatacccagacccttgagggtaacaatgatggtggaaaactagcagattttgttcctctgacaaactacaggcttgaacgcaaatatgcaattttcagcaaattggatgcttgctcttttgtagcaaatgtttataatgatgggaaccttgtcagtatagtaactgactgctctccccatgctactcatgtcgcgggcattgcagctgcatttcatccagatgaacctctgctgaatggagttgcacctggagcacaattgatttcctgtaagattggagacactcgcttaggatctatggagacagggacggggctggtgagggccttgatagctgcagtagagcacaaatgtgatctgattaacatgagctatggagagcctacccttcttcctgactatggcagattcattgatctttctaatgaggttgtggacaaacatcgcattatatttattagtagcgccggaaacaatggaccggctttgaacactgtgggtgctccaggtgggactagtacaagcattattggtgttggtgcttatgtttcaccagccatggctgctggagctcactgtgttgtacaaccacctgcaaagggaatggagtacacatggtctagccgcgggcctactgctgatggggatcttggcgtttccattagtgcacctggtggtgcagttgctcctgtaccaacttggacgcttcaatctcgcatgctcatgaatggcacttccatgtcatctccttctgcctgtggtggggtagctcttcttgttagtggcatgaaggctgaaggcattccattaagcccttattctgtaagaaaagcaatagagaatacagccgcatctataagtaatgcacctgaggagaaactgaccacaggaaatgggcttttgcaagttgatagggcttttgaatatgcacagcaggctaagaagttgccacttgtttcttatagaatctcaatcaatcaagtgggaaagtcagttccaaaactaagaggaatatacctccgcgggggcaatgcatgctgccaaacaagtgagtggactgtgcaacttgacccaaaatttcatgagggcgcgagtaacttggagcaactggttccttttgaggagtgcctgcaactgcattctactgatacctctgtggttcaaattcctgagtatatactggtgacaaacaatggacgcagtttcaacattgttgtcaatcctgctaatatcagcagtggccttcactattttgaagtttatggcatagattacaaagcaccatggcgtgggcctattttccgtgtgccaattactgtaataaagcctattgctctattgggagagccaccactattgtcaatttcaaaccttcgttttcaatctggtcatattgaaaggaggttcataaatgtaccttttggagcttcatgggcggaagttactatgcgaacatcagcttttgatactcctagaagattctttttggacactgttcagatctgtccactgaagcgacctgttaaatgggaggctgttgttactttctcttctccatcttcaaagaatttcagttttcctgtagaaggtggcttaactttggagttgtccatagcccagttctggtctagtggaattgctagccatgaacctacctgtgttgattttgagattgtgctgcatggaatatccattgatcagaaagtaagtacccttgatggtgagtcacccttgcttatagttgctagatcacttctagcgtcagagaagcttgttcctgttggcaccctgaacaagatcaggataccttatcgacccgtggagtgtaatctttcttcacttcccactgaccgtgataaattgccctctggcaagcaaattattgccctgaccttaacttacaagttcaaattagaagacaatgctgaaataaagccccatgtgccactgcttaacaacagaatatatgacaataaatttgagtctcagttttatagaatatcagattcaaacaagcgtatttactcgtccggagacgtttaccctagttatgtcagactttccaaaggagaatacacgttgcaactgtacataaggatttcgttccattgatgttctactcccaacctgatggtcctatagttggaagtggcaccttcaaatccactgttctagttccaggcgaacctgaagcattctatgtgggtcctccgtctagtgaaaaactcccaaagaatgctccacctggggctgttttggttgggtccataacctatggtactgtaagcacatttaacaagaaagatgaacaaaaccaccgtgctccagtatcttatagtatctcatataccattttgccatcaaaggttgatgataaagaaaagggggttttagttggtacaaagagcatacctgaacagttagatgaggaggttcgagacaccaagataaagtttctttccagcgttaagcaactaactgaggaggacaagtctgcctggtcagaacttgtggtttctctgaagaatatccgaagtacacacctttgctttctaagattttgcaatgtgtcctccagaaaggaactgatggtgataagattagccatgaaaaagaggttattgctgcagccgatgaggttgtgggcagtattgataaagaggaactggctaagtatttatctctaaattcagatcctgaagatgaagaagcacagaaattcaagaaaaaaatagaagaaacgcgagatcagttggctgatgcactatatcaaaagtgtcttgcattggctgagattgaatcactgaagtctgatgagtcaattgaggtatctgctaaagatatttttgaggagaattacaaagaattgattaaatgggttgatgtcaaatctgcaaaatatggcacttcgactgttttgcgtgaaaaacgctgtggaagacctggtacagcattgaagattctaaatgatttgattcaaaatgaatctgaaccaaagaaaaagctttatgatttgaagatccagttgattgaggagatgggatggaaccatgtctcaacctacgaaaaacagtggatgcaagtccgctttcccccatgtctgccaccattttgattgtgaactcatttttacaatggctctatcatcctgggttcagtagttgtcattttcattgctgggtgcgtcagttcattatttcgatggcaaacagccaactaggcaagctactggatttgtgcgtttggggacacagttattccatagttattttgtggtacaatatcaggggagtcctttctccaaggagataagacggaacagagatattttgatggacttgaaggagattttatcctcttcaatccttataatgtctatcaaaccaaataaggtttataatccttgtcaaaccaaacaatgcctaaatgagcgtagaatagccgagaatgatatgggcttgtctttaacaatttggcattaaacatagttagctgaacattaagcaaaataactgcgtaaaagcatcacttgttaaggcacttcgaggacgcgag

SEQ ID NO: 50992 - DNA, 5020 bp, Zea Mays
ccacgatccattagccctagccaacgaccggctgccagactgcaacagccaccggcggtcggcacgacagcacggtccttccattgttgctcccagctccaacgcagcattactcatctccattctccagtccgataatccactcattacctcatcatcgtttccaaaagcaaagctttccacgcagattccaccattaaattgggcgaacttttttgaattaaaaactcaaatcctggaaaacgagatgcggtaggctggtagtaggaggactaatcatgtgggcgacgctacataaacccgtcgcgcacgccaacttgcgtctcctcctcacagtctccgccttctccggaccactccacttaggcaccgccagcgctgtcgcggcggcggttacgacccgacgctcgagttctagcaggggcgtcgcggccaccgcgatgccttcgtcgtctccgcctccgctgccaccagccgaggagacgaccgcctctgctgccgctctcgcccctgagggtggattctccctcaccgagccctcgttcctcgagtccctcatgccgaagaaggagatcggcgtcgaccgcttcctcgccgctcaccctgagtatgacgggcgcagcgcactcatcgctatcttcgattctggagtcgatccagctgctgctgggttacagactacttcagatggaaagcctaaaatccttgatgtacttgattgcactggtagtggtgatgttgacacgtccaaagtggtgaaagctgatgctgatggtgctattgttggtgcttcaggtgcccgtttggttataaacccctcatggaaaaacccttctcaagagtggcatgttggctgtaaattaatatatgaactgtttactgacacacttacatctcgattgaagaaagaaagaaagaagaaatgggacgaggaaaaccaggaatcaatttccgatgctctgaagcagctgaatgaatttgaaaagaagcatcctaagcctgatgacaccatgctgaagaaggcacatgaagacatgcaaagcagacttgattacctgaggaaacaagctgaaggttatgacgataaggggcctgtaattgacattgttacatggaatgatggtgatgtgtggagggttgctgtcgatacccagacccttgagggtaacaatgatggtggaaaactagcagattttgttcctctgacaaactacaggcttgaacgcaaatatgcaattttcagcaaattggatgcttgctcttttgtagcaaatgtttataatgatgggaaccttgtcagtatagtaactgactgctctccccatgctactcatgtcgcgggcattgcagctgcatttcatccagatgaacctctgctgaatggagttgcacctggagcacaattgatttcctgtaagattggagacactcgcttaggatctatggagacagggacggggctggtgagggccttgatagctgcagtagagcacaaatgtgatctgattaacatgagctatggagagcctacccttcttcctgactatggcagattcattgatctttctaatgaggttgtggacaaacatcgcattatatttattagtagcgccggaaacaatggaccggctttgaacactgtgggtgctccaggtgggactagtacaagcattattggtgttggtgcttatgtttcaccagccatggctgctggagctcactgtgttgtacaaccacctgcaaagggaatggagtacacatggtctagccgcgggcctactgctgatggggatcttggcgtttccattagtgcacctggtggtgcagttgctcctgtaccaacttggacgcttcaatctcgcatgctcatgaatggcacttccatgtcatctccttctgcctgtggtggggtagctcttcttgttagtggcatgaaggctgaaggcattccattaagcccttattctgtaagaaaagcaatagagaatacagccgcatctataagtaatgcacctgaggagaaactgaccacaggaaatgggcttttgcaagttgatagggcttttgaatatgcacagcaggctaagaagttgccacttgtttcttatagaatctcaatcaatcaagtgggaaagtcagttccaaaactaagaggaatatacctccgcgggggcaatgcatgctgccaaacaagtgagtggactgtgcaacttgacccaaaatttcatgagggcgcgagtaacttggagcaactggttccttttgaggagtgcctgcaactgcattctactgatacctctgtggttcaaattcctgagtatatactggtgacaaacaatggacgcagtttcaacattgttgtcaatcctgctaatatcagcagtggccttcactattttgaagtttatggcatagattacaaagcaccatggcgtgggcctattttccgtgtgccaattactgtaataaagcctattgctctattgggagagccaccactattgtcaatttcaaaccttcgttttcaatctggtcatattgaaaggaggttcataaatgtaccttttggagcttcatgggcggaagttactatgcgaacatcagcttttgatactcctagaagattctttttggacactgttcagatctgtccactgaagcgacctgttaaatgggaggctgttgttactttctcttctccatcttcaaagaatttcagttttcctgtagaaggtggcttaactttggagttgtccatagcccagttctggtctagtggaattgctagccatgaacctacctgtgttgattttgagattgtgctgcatggaatatccattgatcagaaagtaagtacccttgatggtgagtcacccttgcttatagttgctagatcacttctagcgtcagagaagcttgttcctgttggcaccctgaacaagatcaggataccttatcgacccgtggagtgtaatctttcttcacttcccactgaccgtgataaattgccctctggcaagcaaattattgccctgaccttaacttacaagttcaaattagaagacaatgctgaaataaagccccatgtgccactgcttaacaacagaatatatgacaataaatttgagtctcagttttatagaatatcagattcaaacaagcgtatttactcgtccggagacgtttaccctagttatgtcagactttccaaaggagaatacacgttgcaactgtacataaggcatgagaatgtgcaattcttagagaaactcaaggaactggttctgtttattgagaggaaactagacaaaaaggatttcgttccattgatgttctactcccaacctgatggtcctatagttggaagtggcaccttcaaatccactgttctagttccaggcgaacctgaagcattctatgtgggtcctccgtctagtgaaaaactcccaaagaatgctccacctggggctgttttggttgggtccataacctatggtactgtaagcacatttaacaagaaagatgaacaaaaccaccgtgctccagtatcttatagtatctcatataccattttgccatcaaaggtcagtagtatagaatgcgccgtctccctattgtctacctttgttgttatgatgatccttgtgttagttctggatcaccagttcaggatcaccatacgggtacacagtcctgatcctgatactttttgtacagcatatatttgtgctctagattttgtctcatatatgttgcgatatattttgtttcatgctgtggttcattccttgttcggtcttcggtgtaatcaatacaagttattgcaggttgatgataaagaaaagggggttttagttggtacaaagagcatacctgaacagttagatgaggaggttcgagacaccaagataaagtttctttccagcgttaagcaactaactgaggaggacaagtctgcctggtcagaacttgtggtttctctgaagtcagaatatccgaagtacacacctttgctttctaagattttgcaatgtgtcctccagaaaggaactgatggtgataagattagccatgaaaaagaggttattgctgcagccgatgaggttgtgggcagtattgataaagaggaactggctaagtatttatctctaaattcagatcctgaagatgaagaagcacagaaattcaagaaaaaaatagaagaaacgcgagatcagttggctgatgcactatatcaaaagtgtcttgcattggctgagattgaatcactgaagtctgatgagtcaattgaggtatctgctaaagatatttttgaggagaattacaaagaattgattaaatgggttgatgtcaaatctgcaaaatatggcacttcgactgttttgcgtgaaaaacgctgtggaagacctggtacagcattgaagattctaaatgatttgattcaaaatgaatctgaaccaaagaaaaagctttatgatttgaagatccagttgattgaggagatgggatggaaccatgtctcaacctacgaaaaacagtggatgcaagtccgctttcccccatgtctgccaccattttgattgtgaactcatttttacaatggctctatcatcctgggttcagtagttgtcattttcattgctgggtgcgtcagttcattatttcgatggcaaacagccaactaggcaagctactggatttgtgcgtttggggacacagttattccatagttattttgtggtacaatatcaggggagtcctttctccaaggagataagacggaacagagatattttgatggacttgaaggagattttatcctcttcaatccttataatgtctatcaaaccaaataaggtttataatccttgtcaaaccaaacaatgcctaaatgagcgtagaatagccgagaatgatatgggcttgtctttaacaatttggcattaaacatagttagctgaacattaagcaaaataactgcgtaaaagcatcacttgttaaggcacttcgaggacgcgag

SEQ ID NO: 50993 - DNA, 4586 bp, Zea Mays
ccacgatccattagccctagccaacgaccggctgccagactgcaacagccaccggcggtcggcacgacagcacggtccttccattgttgctcccagctccaacgcagcattactcatctccattctccagtccgataatccactcattacctcatcatcgtttccaaaagcaaagctttccacgcagattccaccattaaattgggcgaacttttttgaattaaaaactcaaatcctggaaaacgagatgcggtaggctggtagtaggaggactaatcatgtgggcgacgctacataaacccgtcgcgcacgccaacttgcgtctcctcctcacagtctccgccttctccggaccactccacttaggcaccgccagcgctgtcgcggcggcggttacgacccgacgctcgagttctagcaggggcgtcgcggccaccgcgatgccttcgtcgtctccgcctccgctgccaccagccgaggagacgaccgcctctgctgccgctctcgcccctgagggtggattctccctcaccgagccctcgttcctcgagtccctcatgccgaagaaggagatcggcgtcgaccgcttcctcgccgctcaccctgagtatgacgggcgcagcgcactcatcgctatcttcgattctggagtcgatccagctgctgctgggttacagactacttcagatggaaagcctaaaatccttgatgtacttgattgcactggtagtggtgatgttgacacgtccaaagtggtgaaagctgatgctgatggtgctattgttggtgcttcaggtgcccgtttggttataaacccctcatggaaaaacccttctcaagagtggcatgttggctgtaaattaatatatgaactgtttactgacacacttacatctcgattgaagaaagaaagaaagaagaaatgggacgaggaaaaccaggaatcaatttccgatgctctgaagcagctgaatgaatttgaaaagaagcatcctaagcctgatgacaccatgctgaagaaggcacatgaagacatgcaaagcagacttgattacctgaggaaacaagctgaaggttatgacgataaggggcctgtaattgacattgttacatggaatgatggtgatgtgtggagggttgctgtcgatacccagacccttgagggtaacaatgatggtggaaaactagcagattttgttcctctgacaaactacaggcttgaacgcaaatatgcaattttcagcaaattggatgcttgctcttttgtagcaaatgtttataatgatgggaaccttgtcagtatagtaactgactgctctccccatgctactcatgtcgcgggcattgcagctgcatttcatccagatgaacctctgctgaatggagttgcacctggagcacaattgatttcctgtaagattggagacactcgcttaggatctatggagacagggacggggctggtgagggccttgatagctgcagtagagcacaaatgtgatctgattaacatgagctatggagagcctacccttcttcctgactatggcagattcattgatctttctaatgaggttgtggacaaacatcgcattatatttattagtagcgccggaaacaatggaccggctttgaacactgtgggtgctccaggtgggactagtacaagcattattggtgttggtgcttatgtttcaccagccatggctgctggagctcactgtgttgtacaaccacctgcaaagggaatggagtacacatggtctagccgcgggcctactgctgatggggatcttggcgtttccattagtgcacctggtggtgcagttgctcctgtaccaacttggacgcttcaatctcgcatgctcatgaatggcacttccatgtcatctccttctgcctgtggtggggtagctcttcttgttagtggcatgaaggctgaaggcattccattaagcccttattctgtaagaaaagcaatagagaatacagccgcatctataagtaatgcacctgaggagaaactgaccacaggaaatgggcttttgcaagttgatagggcttttgaatatgcacagcaggctaagaagttgccacttgtttcttatagaatctcaatcaatcaagtgggaaagtcagttccaaaactaagaggaatatacctccgcgggggcaatgcatgctgccaaacaagtgagtggactgtgcaacttgacccaaaatttcatgagggcgcgagtaacttggagcaactggttccttttgaggagtgcctgcaactgcattctactgatacctctgtggttcaaattcctgagtatatactggtgacaaacaatggacgcagtttcaacattgttgtcaatcctgctaatatcagcagtggccttcactattttgaagtttatggcatagattacaaagcaccatggcgtgggcctattttccgtgtgccaattactgtaataaagcctattgctctattgggagagccaccactattgtcaatttcaaaccttcgttttcaatctggtcatattgaaaggaggttcataaatgtaccttttggagcttcatgggcggaagttactatgcgaacatcagcttttgatactcctagaagattctttttggacactgttcagatctgtccactgaagcgacctgttaaatgggaggctgttgttactttctcttctccatcttcaaagaatttcagttttcctgtagaaggtggcttaactttggagttgtccatagcccagttctggtctagtggaattgctagccatgaacctacctgtgttgattttgagattgtgctgcatggaatatccattgatcagaaagtaagtacccttgatggtgagtcacccttgcttatagttgctagatcacttctagcgtcagagaagcttgttcctgttggcaccctgaacaagatcaggataccttatcgacccgtggagtgtaatctttcttcacttcccactgaccgtgataaattgccctctggcaagcaaattattgccctgaccttaaccgtatttactcgtccggagacgtttaccctagttatgtcagactttccaaaggagaatacacgttgcaactgtacataaggatttcgttccattgatgttctactcccaacctgatggtcctatagttggaagtggcaccttcaaatccactgttctagttccaggcgaacctgaagcattctatgtgggtcctccgtctagtgaaaaactcccaaagaatgctccacctggggctgttttggttgggtccataacctatggtactgtaagcacatttaacaagaaagatgaacaaaaccaccgtgctccagtatcttatagtatctcatataccattttgccatcaaaggttgatgataaagaaaagggggttttagttggtacaaagagcatacctgaacagttagatgaggaggttcgagacaccaagataaagtttctttccagcgttaagcaactaactgaggaggacaagtctgcctggtcagaacttgtggtttctctgaagtcagaatatccgaagtacacacctttgctttctaagattttgcaatgtgtcctccagaaaggaactgatggtgataagattagccatgaaaaagaggttattgctgcagccgatgaggttgtgggcagtattgataaagaggaactggctaagtatttatctctaaattcagatcctgaagatgaagaagcacagaaattcaagaaaaaaatagaagaaacgcgagatcagttggctgatgcactatatcaaaagtgtcttgcattggctgagattgaatcactgaagtctgatgagtcaattgaggtatctgctaaagatatttttgaggagaattacaaagaattgattaaatgggttgatgtcaaatctgcaaaatatggcacttcgactgttttgcgtgaaaaacgctgtggaagacctggtacagcattgaagattctaaatgatttgattcaaaatgaatctgaaccaaagaaaaagctttatgatttgaagatccagttgattgaggagatgggatggaaccatgtctcaacctacgaaaaacagtggatgcaagtccgctttcccccatgtctgccaccattttgattgtgaactcatttttacaatggctctatcatcctgggttcagtagttgtcattttcattgctgggtgcgtcagttcattatttcgatggcaaacagccaactaggcaagctactggatttgtgcgtttggggacacagttattccatagttattttgtggtacaatatcaggggagtcctttctccaaggagataagacggaacagagatattttgatggacttgaaggagattttatcctcttcaatccttataatgtctatcaaaccaaataaggtttataatccttgtcaaaccaaacaatgcctaaatgagcgtagaatagccgagaatgatatgggcttgtctttaacaatttggcattaaacatagttagctgaacattaagcaaaataactgcgtaaaagcatcacttgttaaggcacttcgaggacgcgag

SEQ ID NO: 50994 - DNA, 4947 bp, Zea Mays
ccacgatccattagccctagccaacgaccggctgccagactgcaacagccaccggcggtcggcacgacagcacggtccttccattgttgctcccagctccaacgcagcattactcatctccattctccagtccgataatccactcattacctcatcatcgtttccaaaagcaaagctttccacgcagattccaccattaaattgggcgaacttttttgaattaaaaactcaaatcctggaaaacgagatgcggtaggctggtagtaggaggactaatcatgtgggcgacgctacataaacccgtcgcgcacgccaacttgcgtctcctcctcacagtctccgccttctccggaccactccacttaggcaccgccagcgctgtcgcggcggcggttacgacccgacgctcgagttctagcaggggcgtcgcggccaccgcgatgccttcgtcgtctccgcctccgctgccaccagccgaggagacgaccgcctctgctgccgctctcgcccctgagggtggattctccctcaccgagccctcgttcctcgagtccctcatgccgaagaaggagatcggcgtcgaccgcttcctcgccgctcaccctgagtatgacgggcgcagcgcactcatcgctatcttcgattctggagtcgatccagctgctgctgggttacagactacttcagatggaaagcctaaaatccttgatgtacttgattgcactggtagtggtgatgttgacacgtccaaagtggtgaaagctgatgctgatggtgctattgttggtgcttcaggtgcccgtttggttataaacccctcatggaaaaacccttctcaagagtggcatgttggctgtaaattaatatatgaactgtttactgacacacttacatctcgattgaagaaagaaagaaagaagaaatgggacgaggaaaaccaggaatcaatttccgatgctctgaagcagctgaatgaatttgaaaagaagcatcctaagcctgatgacaccatgctgaagaaggcacatgaagacatgcaaagcagacttgattacctgaggaaacaagctgaaggttatgacgataaggggcctgtaattgacattgttacatggaatgatggtgatgtgtggagggttgctgtcgatacccagacccttgagggtaacaatgatggtggaaaactagcagattttgttcctctgacaaactacaggcttgaacgcaaatatgcaattttcagcaaattggatgcttgctcttttgtagcaaatgtttataatgatgggaaccttgtcagtatagtaactgactgctctccccatgctactcatgtcgcgggcattgcagctgcatttcatccagatgaacctctgctgaatggagttgcacctggagcacaattgatttcctgtaagattggagacactcgcttaggatctatggagacagggacggggctggtgagggccttgatagctgcagtagagcacaaatgtgatctgattaacatgagctatggagagcctacccttcttcctgactatggcagattcattgatctttctaatgaggttgtggacaaacatcgcattatatttattagtagcgccggaaacaatggaccggctttgaacactgtgggtgctccaggtgggactagtacaagcattattggtgttggtgcttatgtttcaccagccatggctgctggagctcactgtgttgtacaaccacctgcaaagggaatggagtacacatggtctagccgcgggcctactgctgatggggatcttggcgtttccattagtgcacctggtggtgcagttgctcctgtaccaacttggacgcttcaatctcgcatgctcatgaatggcacttccatgtcatctccttctgcctgtggtggggtagctcttcttgttagtggcatgaaggctgaaggcattccattaagcccttattctgtaagaaaagcaatagagaatacagccgcatctataagtaatgcacctgaggagaaactgaccacaggaaatgggcttttgcaagttgatagggcttttgaatatgcacagcaggctaagaagttgccacttgtttcttatagaatctcaatcaatcaagtgggaaagtcagttccaaaactaagaggaatatacctccgcgggggcaatgcatgctgccaaacaagtgagtggactgtgcaacttgacccaaaatttcatgagggcgcgagtaacttggagcaactggttccttttgaggagtgcctgcaactgcattctactgatacctctgtggttcaaattcctgagtatatactggtgacaaacaatggacgcagtttcaacattgttgtcaatcctgctaatatcagcagtggccttcactattttgaagtttatggcatagattacaaagcaccatggcgtgggcctattttccgtgtgccaattactgtaataaagcctattgctctattgggagagccaccactattgtcaatttcaaaccttcgttttcaatctggtcatattgaaaggaggttcataaatgtaccttttggagcttcatgggcggaagttactatgcgaacatcagcttttgatactcctagaagattctttttggacactgttcagatctgtccactgaagcgacctgttaaatgggaggctgttgttactttctcttctccatcttcaaagaatttcagttttcctgtagaaggtggcttaactttggagttgtccatagcccagttctggtctagtggaattgctagccatgaacctacctgtgttgattttgagattgtgctgcatggaatatccattgatcagaaagtaagtacccttgatggtgagtcacccttgcttatagttgctagatcacttctagcgtcagagaagcttgttcctgttggcaccctgaacaagatcaggataccttatcgacccgtggagtgtaatctttcttcacttcccactgaccgtgataaattgccctctggcaagcaaattattgccctgaccttaacttacaagttcaaattagaagacaatgctgaaataaagccccatgtgccactgcttaacaacagaatatatgacaataaatttgagtctcagttttatagaatatcagattcaaacaagcgtatttactcgtccggagacgtttaccctagttatgtcagactttccaaaggagaatacacgttgcaactgtacataaggatttcgttccattgatgttctactcccaacctgatggtcctatagttggaagtggcaccttcaaatccactgttctagttccaggcgaacctgaagcattctatgtgggtcctccgtctagtgaaaaactcccaaagaatgctccacctggggctgttttggttgggtccataacctatggtactgtaagcacatttaacaagaaagatgaacaaaaccaccgtgctccagtatcttatagtatctcatataccattttgccatcaaaggtcagtagtatagaatgcgccgtctccctattgtctacctttgttgttatgatgatccttgtgttagttctggatcaccagttcaggatcaccatacgggtacacagtcctgatcctgatactttttgtacagcatatatttgtgctctagattttgtctcatatatgttgcgatatattttgtttcatgctgtggttcattccttgttcggtcttcggtgtaatcaatacaagttattgcaggttgatgataaagaaaagggggttttagttggtacaaagagcatacctgaacagttagatgaggaggttcgagacaccaagataaagtttctttccagcgttaagcaactaactgaggaggacaagtctgcctggtcagaacttgtggtttctctgaagtcagaatatccgaagtacacacctttgctttctaagattttgcaatgtgtcctccagaaaggaactgatggtgataagattagccatgaaaaagaggttattgctgcagccgatgaggttgtgggcagtattgataaagaggaactggctaagtatttatctctaaattcagatcctgaagatgaagaagcacagaaattcaagaaaaaaatagaagaaacgcgagatcagttggctgatgcactatatcaaaagtgtcttgcattggctgagattgaatcactgaagtctgatgagtcaattgaggtatctgctaaagatatttttgaggagaattacaaagaattgattaaatgggttgatgtcaaatctgcaaaatatggcacttcgactgttttgcgtgaaaaacgctgtggaagacctggtacagcattgaagattctaaatgatttgattcaaaatgaatctgaaccaaagaaaaagctttatgatttgaagatccagttgattgaggagatgggatggaaccatgtctcaacctacgaaaaacagtggatgcaagtccgctttcccccatgtctgccaccattttgattgtgaactcatttttacaatggctctatcatcctgggttcagtagttgtcattttcattgctgggtgcgtcagttcattatttcgatggcaaacagccaactaggcaagctactggatttgtgcgtttggggacacagttattccatagttattttgtggtacaatatcaggggagtcctttctccaaggagataagacggaacagagatattttgatggacttgaaggagattttatcctcttcaatccttataatgtctatcaaaccaaataaggtttataatccttgtcaaaccaaacaatgcctaaatgagcgtagaatagccgagaatgatatgggcttgtctttaacaatttggcattaaacatagttagctgaacattaagcaaaataactgcgtaaaagcatcacttgttaaggcacttcgaggacgcgag

SEQ ID NO: 50995 - DNA, 4772 bp, Zea Mays
ccacgatccattagccctagccaacgaccggctgccagactgcaacagccaccggcggtcggcacgacagcacggtccttccattgttgctcccagctccaacgcagcattactcatctccattctccagtccgataatccactcattacctcatcatcgtttccaaaagcaaagctttccacgcagattccaccattaaattgggcgaacttttttgaattaaaaactcaaatcctggaaaacgagatgcggtaggctggtagtaggaggactaatcatgtgggcgacgctacataaacccgtcgcgcacgccaacttgcgtctcctcctcacagtctccgccttctccggaccactccacttaggcaccgccagcgctgtcgcggcggcggttacgacccgacgctcgagttctagcaggggcgtcgcggccaccgcgatgccttcgtcgtctccgcctccgctgccaccagccgaggagacgaccgcctctgctgccgctctcgcccctgagggtggattctccctcaccgagccctcgttcctcgagtccctcatgccgaagaaggagatcggcgtcgaccgcttcctcgccgctcaccctgagtatgacgggcgcagcgcactcatcgctatcttcgattctggagtcgatccagctgctgctgggttacagactacttcagatggaaagcctaaaatccttgatgtacttgattgcactggtagtggtgatgttgacacgtccaaagtggtgaaagctgatgctgatggtgctattgttggtgcttcaggtgcccgtttggttataaacccctcatggaaaaacccttctcaagagtggcatgttggctgtaaattaatatatgaactgtttactgacacacttacatctcgattgaagaaagaaagaaagaagaaatgggacgaggaaaaccaggaatcaatttccgatgctctgaagcagctgaatgaatttgaaaagaagcatcctaagcctgatgacaccatgctgaagaaggcacatgaagacatgcaaagcagacttgattacctgaggaaacaagctgaaggttatgacgataaggggcctgtaattgacattgttacatggaatgatggtgatgtgtggagggttgctgtcgatacccagacccttgagggtaacaatgatggtggaaaactagcagattttgttcctctgacaaactacaggcttgaacgcaaatatgcaattttcagcaaattggatgcttgctcttttgtagcaaatgtttataatgatgggaaccttgtcagtatagtaactgactgctctccccatgctactcatgtcgcgggcattgcagctgcatttcatccagatgaacctctgctgaatggagttgcacctggagcacaattgatttcctgtaagattggagacactcgcttaggatctatggagacagggacggggctggtgagggccttgatagctgcagtagagcacaaatgtgatctgattaacatgagctatggagagcctacccttcttcctgactatggcagattcattgatctttctaatgaggttgtggacaaacatcgcattatatttattagtagcgccggaaacaatggaccggctttgaacactgtgggtgctccaggtgggactagtacaagcattattggtgttggtgcttatgtttcaccagccatggctgctggagctcactgtgttgtacaaccacctgcaaagggaatggagtacacatggtctagccgcgggcctactgctgatggggatcttggcgtttccattagtgcacctggtggtgcagttgctcctgtaccaacttggacgcttcaatctcgcatgctcatgaatggcacttccatgtcatctccttctgcctgtggtggggtagctcttcttgttagtggcatgaaggctgaaggcattccattaagcccttattctgtaagaaaagcaatagagaatacagccgcatctataagtaatgcacctgaggagaaactgaccacaggaaatgggcttttgcaagttgatagggcttttgaatatgcacagcaggctaagaagttgccacttgtttcttatagaatctcaatcaatcaagtgggaaagtcagttccaaaactaagaggaatatacctccgcgggggcaatgcatgctgccaaacaagtgagtggactgtgcaacttgacccaaaatttcatgagggcgcgagtaacttggagcaactggttccttttgaggagtgcctgcaactgcattctactgatacctctgtggttcaaattcctgagtatatactggtgacaaacaatggacgcagtttcaacattgttgtcaatcctgctaatatcagcagtggccttcactattttgaagtttatggcatagattacaaagcaccatggcgtgggcctattttccgtgtgccaattactgtaataaagcctattgctctattgggagagccaccactattgtcaatttcaaaccttcgttttcaatctggtcatattgaaaggaggttcataaatgtaccttttggagcttcatgggcggaagttactatgcgaacatcagcttttgatactcctagaagattctttttggacactgttcagatctgtccactgaagcgacctgttaaatgggaggctgttgttactttctcttctccatcttcaaagaatttcagttttcctgtagaaggtggcttaactttggagttgtccatagcccagttctggtctagtggaattgctagccatgaacctacctgtgttgattttgagattgtgctgcatggaatatccattgatcagaaagtaagtacccttgatggtgagtcacccttgcttatagttgctagatcacttctagcgtcagagaagcttgttcctgttggcaccctgaacaaggataccttatcgacccgtggagtgtaatctttcttcacttcccactgaccgtgataaattgccctctggcaagcaaattattgccctgaccttaacttacaagttcaaattagaagacaatgctgaaataaagccccatgtgccactgcttaacaacagaatatatgacaataaatttgagtctcagttttatagaatatcagattcaaacaagcgtatttactcgtccggagacgtttaccctagttatgtcagactttccaaaggagaatacacgttgcaactgtacataaggcatgagaatgtgcaattcttagagaaactcaaggaactggttctgtttattgagaggaaactagacaaaaaggatttcgttccattgatgttctactcccaacctgatggtcctatagttggaagtggcaccttcaaatccactgttctagttccaggcgaacctgaagcattctatgtgggtcctccgtctagtgaaaaactcccaaagaatgctccacctggggctgttttggttgggtccataacctatggtactgtaagcacatttaacaagaaagatgaacaaaaccaccgtgctccagtatcttatagtatctcatataccattttgccatcaaaggttgatgataaagaaaagggggttttagttggtacaaagagcatacctgaacagttagatgaggaggttcgagacaccaagataaagtttctttccagcgttaagcaactaactgaggaggacaagtctgcctggtcagaacttgtggtttctctgaagtcagaatatccgaagtacacacctttgctttctaagattttgcaatgtgtcctccagaaaggaactgatggtgataagattagccatgaaaaagaggttattgctgcagccgatgaggttgtgggcagtattgataaagaggaactggctaagtatttatctctaaattcagatcctgaagatgaagaagcacagaaattcaagaaaaaaatagaagaaacgcgagatcagttggctgatgcactatatcaaaagtgtcttgcattggctgagattgaatcactgaagtctgatgagtcaattgaggtatctgctaaagatatttttgaggagaattacaaagaattgattaaatgggttgatgtcaaatctgcaaaatatggcacttcgactgttttgcgtgaaaaacgctgtggaagacctggtacagcattgaagattctaaatgatttgattcaaaatgaatctgaaccaaagaaaaagctttatgatttgaagatccagttgattgaggagatgggatggaaccatgtctcaacctacgaaaaacagtggatgcaagtccgctttcccccatgtctgccaccattttgattgtgaactcatttttacaatggctctatcatcctgggttcagtagttgtcattttcattgctgggtgcgtcagttcattatttcgatggcaaacagccaactaggcaagctactggatttgtgcgtttggggacacagttattccatagttattttgtggtacaatatcaggggagtcctttctccaaggagataagacggaacagagatattttgatggacttgaaggagattttatcctcttcaatccttataatgtctatcaaaccaaataaggtttataatccttgtcaaaccaaacaatgcctaaatgagcgtagaatagccgagaatgatatgggcttgtctttaacaatttggcattaaacatagttagctgaacattaagcaaaataactgcgtaaaagcatcacttgttaaggcacttcgaggacgcgag

SEQ ID NO: 50996 - DNA, 4841 bp, Zea Mays
ccacgatccattagccctagccaacgaccggctgccagactgcaacagccaccggcggtcggcacgacagcacggtccttccattgttgctcccagctccaacgcagcattactcatctccattctccagtccgataatccactcattacctcatcatcgtttccaaaagcaaagctttccacgcagattccaccattaaattgggcgaacttttttgaattaaaaactcaaatcctggaaaacgagatgcggtaggctggtagtaggaggactaatcatgtgggcgacgctacataaacccgtcgcgcacgccaacttgcgtctcctcctcacagtctccgccttctccggaccactccacttaggcaccgccagcgctgtcgcggcggcggttacgacccgacgctcgagttctagcaggggcgtcgcggccaccgcgatgccttcgtcgtctccgcctccgctgccaccagccgaggagacgaccgcctctgctgccgctctcgcccctgagggtggattctccctcaccgagccctcgttcctcgagtccctcatgccgaagaaggagatcggcgtcgaccgcttcctcgccgctcaccctgagtatgacgggcgcagcgcactcatcgctatcttcgattctggagtcgatccagctgctgctgggttacagactacttcagatggaaagcctaaaatccttgatgtacttgattgcactggtagtggtgatgttgacacgtccaaagtggtgaaagctgatgctgatggtgctattgttggtgcttcaggtgcccgtttggttataaacccctcatggaaaaacccttctcaagagtggcatgttggctgtaaattaatatatgaactgtttactgacacacttacatctcgattgaagaaagaaagaaagaagaaatgggacgaggaaaaccaggaatcaatttccgatgctctgaagcagctgaatgaatttgaaaagaagcatcctaagcctgatgacaccatgctgaagaaggcacatgaagacatgcaaagcagacttgattacctgaggaaacaagctgaaggttatgacgataaggggcctgtaattgacattgttacatggaatgatggtgatgtgtggagggttgctgtcgatacccagacccttgagggtaacaatgatggtggaaaactagcagattttgttcctctgacaaactacaggcttgaacgcaaatatgcaattttcagcaaattggatgcttgctcttttgtagcaaatgtttataatgatgggaaccttgtcagtatagtaactgactgctctccccatgctactcatgtcgcgggcattgcagctgcatttcatccagatgaacctctgctgaatggagttgcacctggagcacaattgatttcctgtaagattggagacactcgcttaggatctatggagacagggacggggctggtgagggccttgatagctgcagtagagcacaaatgtgatctgattaacatgagctatggagagcctacccttcttcctgactatggcagattcattgatctttctaatgaggttgtggacaaacatcgcattatatttattagtagcgccggaaacaatggaccggctttgaacactgtgggtgctccaggtgggactagtacaagcattattggtgttggtgcttatgtttcaccagccatggctgctggagctcactgtgttgtacaaccacctgcaaagggaatggagtacacatggtctagccgcgggcctactgctgatggggatcttggcgtttccattagtgcacctggtggtgcagttgctcctgtaccaacttggacgcttcaatctcgcatgctcatgaatggcacttccatgtcatctccttctgcctgtggtggggtagctcttcttgttagtggcatgaaggctgaaggcattccattaagcccttattctgtaagaaaagcaatagagaatacagccgcatctataagtaatgcacctgaggagaaactgaccacaggaaatgggcttttgcaagttgatagggcttttgaatatgcacagcaggctaagaagttgccacttgtttcttatagaatctcaatcaatcaagtgggaaagtcagttccaaaactaagaggaatatacctccgcgggggcaatgcatgctgccaaacaagtgagtggactgtgcaacttgacccaaaatttcatgagggcgcgagtaacttggagcaactggttccttttgaggagtgcctgcaactgcattctactgatacctctgtggttcaaattcctgagtatatactggtgacaaacaatggacgcagtttcaacattgttgtcaatcctgctaatatcagcagtggccttcactattttgaagtttatggcatagattacaaagcaccatggcgtgggcctattttccgtgtgccaattactgtaataaagcctattgctctattgggagagccaccactattgtcaatttcaaaccttcgttttcaatctggtcatattgaaaggaggttcataaatgtaccttttggagcttcatgggcggaagttactatgcgaacatcagcttttgatactcctagaagattctttttggacactgttcagatctgtccactgaagcgacctgttaaatgggaggctgttgttactttctcttctccatcttcaaagaatttcagttttcctgtagaaggtggcttaactttggagttgtccatagcccagttctggtctagtggaattgctagccatgaacctacctgtgttgattttgagattgtgctgcatggaatatccattgatcagaaagtaagtacccttgatggtgagtcacccttgcttatagttgctagatcacttctagcgtcagagaagcttgttcctgttggcaccctgaacaagatcaggataccttatcgacccgtggagtgtaatctttcttcacttcccactgaccgtgataaattgccctctggcaagcaaattattgccctgaccttaacttacaagttcaaattagaagacaatgctgaaataaagccccatgtgccactgcttaacaacagaatatatgacaataaatttgagtctcagttttatagaatatcagattcaaacaagcgtatttactcgtccggagacgtttaccctagttatgtcagactttccaaaggagaatacacgttgcaactgtacataagatccgtctacaaataaaatgctggcaggggggcatattatgagttcatgactagtattgataatgcatgagaatgtgcaattcttagagaaactcaaggaactggttctgtttattgagaggaaactagacaaaaaggatttcgttccattgatgttctactcccaacctgatggtcctatagttggaagtggcaccttcaaatccactgttctagttccaggcgaacctgaagcattctatgtgggtcctccgtctagtgaaaaactcccaaagaatgctccacctggggctgttttggttgggtccataacctatggtactgtaagcacatttaacaagaaagatgaacaaaaccaccgtgctccagtatcttatagtatctcatataccattttgccatcaaaggttgatgataaagaaaagggggttttagttggtacaaagagcatacctgaacagttagatgaggaggttcgagacaccaagataaagtttctttccagcgttaagcaactaactgaggaggacaagtctgcctggtcagaacttgtggtttctctgaagtcagaatatccgaagtacacacctttgctttctaagattttgcaatgtgtcctccagaaaggaactgatggtgataagattagccatgaaaaagaggttattgctgcagccgatgaggttgtgggcagtattgataaagaggaactggctaagtatttatctctaaattcagatcctgaagatgaagaagcacagaaattcaagaaaaaaatagaagaaacgcgagatcagttggctgatgcactatatcaaaagtgtcttgcattggctgagattgaatcactgaagtctgatgagtcaattgaggtatctgctaaagatatttttgaggagaattacaaagaattgattaaatgggttgatgtcaaatctgcaaaatatggcacttcgactgttttgcgtgaaaaacgctgtggaagacctggtacagcattgaagattctaaatgatttgattcaaaatgaatctgaaccaaagaaaaagctttatgatttgaagatccagttgattgaggagatgggatggaaccatgtctcaacctacgaaaaacagtggatgcaagtccgctttcccccatgtctgccaccattttgattgtgaactcatttttacaatggctctatcatcctgggttcagtagttgtcattttcattgctgggtgcgtcagttcattatttcgatggcaaacagccaactaggcaagctactggatttgtgcgtttggggacacagttattccatagttattttgtggtacaatatcaggggagtcctttctccaaggagataagacggaacagagatattttgatggacttgaaggagattttatcctcttcaatccttataatgtctatcaaaccaaataaggtttataatccttgtcaaaccaaacaatgcctaaatgagcgtagaatagccgagaatgatatgggcttgtctttaacaatttggcattaaacatagttagctgaacattaagcaaaataactgcgtaaaagcatcacttgttaaggcacttcgaggacgcgag

SEQ ID NO: 50997 - DNA, 4365 bp, Zea Mays
ccacgatccattagccctagccaacgaccggctgccagactgcaacagccaccggcggtcggcacgacagcacggtccttccattgttgctcccagctccaacgcagcattactcatctccattctccagtccgataatccactcattacctcatcatcgtttccaaaagcaaagctttccacgcagattccaccattaaattgggcgaacttttttgaattaaaaactcaaatcctggaaaacgagatgcggtaggctggtagtaggaggactaatcatgtgggcgacgctacataaacccgtcgcgcacgccaacttgcgtctcctcctcacagtctccgccttctccggaccactccacttaggcaccgccagcgctgtcgcggcggcggttacgacccgacgctcgagttctagcaggggcgtcgcggccaccgcgatgccttcgtcgtctccgcctccgctgccaccagccgaggagacgaccgcctctgctgccgctctcgcccctgagggtggattctccctcaccgagccctcgttcctcgagtccctcatgccgaagaaggagatcggcgtcgaccgcttcctcgccgctcaccctgagtatgacgggcgcagcgcactcatcgctatcttcgattctggagtcgatccagctgctgctgggttacagactacttcagatggaaagcctaaaatccttgatgtacttgattgcactggtagtggtgatgttgacacgtccaaagtggtgaaagctgatgctgatggtgctattgttggtgcttcaggtgcccgtttggttataaacccctcatggaaaaacccttctcaagagtggcatgttggctgtaaattaatatatgaactgtttactgacacacttacatctcgattgaaggtaaatttcattttcagtgcctacaccccaaaattttatattgaacttgatatcttaacaagggtctacccacccacacttcagaaagaaagaaagaagaaatgggacgaggaaaaccaggaatcaatttccgatgctctgaagcagctgaatgaatttgaaaagaagcatcctaagcctgatgacaccatgctgaagaaggcacatgaagacatgcaaagcagacttgattacctgaggaaacaagctgaaggttatgacgataaggggcctgtaattgacattgttacatggaatgatggtgatgtgtggagggttgctgtcgatacccagacccttgagggtaacaatgatggtggaaaactagcagattttgttcctctgacaaactacaggcttgaacgcaaatatgcaattttcagcaaattggatgcttgctcttttgtagcaaatgtttataatgatgggaaccttgtcagtatagtaactgactgctctccccatgctactcatgtcgcgggcattgcagctgcatttcatccagatgaacctctgctgaatggagttgcacctggagcacaattgatttcctgtaagattggagacactcgcttaggatctatggagacagggacggggctggtgagggccttgatagctgcagtagagcacaaatgtgatctgattaacatgagctatggagagcctacccttcttcctgactatggcagattcattgatctttctaatgaggttgtggacaaacatcgcattatatttattagtagcgccggaaacaatggaccggctttgaacactgtgggtgctccaggtgggactagtacaagcattattggtgttggtgcttatgtttcaccagccatggctgctggagctcactgtgttgtacaaccacctgcaaagggaatggagtacacatggtctagccgcgggcctactgctgatggggatcttggcgtttccattagtgcacctggtggtgcagttgctcctgtaccaacttggacgcttcaatctcgcatgctcatgaatggcacttccatgtcatctccttctgcctgtggtggggtagctcttcttgttagtggcatgaaggctgaaggcattccattaagcccttattctgtaagaaaagcaatagagaatacagccgcatctataagtaatgcacctgaggagaaactgaccacaggaaatgggcttttgcaagttgatagggcttttgaatatgcacagcaggctaagaagttgccacttgtttcttatagaatctcaatcaatcaagtgggaaagtcagttccaaaactaagaggaatatacctccgcgggggcaatgcatgctgccaaacaagtgagtggactgtgcaacttgacccaaaatttcatgagggcgcgagtaacttggagcaactggttccttttgaggagtgcctgcaactgcattctactgatacctctgtggttcaaattcctgagtatatactggtgacaaacaatggacgcagtttcaacattgttgtcaatcctgctaatatcagcagtggccttcactattttgaagtttatggcatagattacaaagcaccatggcgtgggcctattttccgtgtgccaattactgtaataaagcctattgctctattgggagagccaccactattgtcaatttcaaaccttcgttttcaatctggtcatattgaaaggaggttcataaatgtaccttttggagcttcatgggcggaagttactatgcgaacatcagcttttgatactcctagaagattctttttggacactgttcagatctgtccactgaagcgacctgttaaatgggaggctgttgttactttctcttctccatcttcaaagaatttcagttttcctgtagaaggtggcttaactttggagttgtccatagcccagttctggtctagtggaattgctagccatgaacctacctgtgttgattttgagattgtgctgcatggaatatccattgatcagaaagtaagtacccttgatggtgagtcacccttgcttatagttgctagatcacttctagcgtcagagaagcttgttcctgttggcaccctgaacaagatcaggataccttatcgacccgtggagtgtaatctttcttcacttcccactgaccgtgataaattgccctctggcaagcaaattattgccctgaccttaacttacaagttcaaattagaagacaatgctgaaataaagccccatgtgccactgcttaacaacagaatatatgacaataaatttgagtctcagttttatagaatatcagattcaaacaagcgtatttactcgtccggagacgtttaccctagttatgtcagactttccaaaggagaatacacgttgcaactgtacataaggcatgagaatgtgcaattcttagagaaactcaaggaactggttctgtttattgagaggaaactagacaaaaaggatttcgttccattgatgttctactcccaacctgatggtcctatagttggaagtggcaccttcaaatccactgttctagttccaggcgaacctgaagcattctatgtgggtcctccgtctagtgaaaaactcccaaagaatgctccacctggggctgttttggttgggtccataacctatggtactgtaagcacatttaacaagaaagatgaacaaaaccaccgtgctccagtatcttatagtatctcatataccattttgccatcaaaggttgatgataaagaaaagggggttttagttggtacaaagagcatacctgaacagttagatgaggaggttcgagacaccaagataaagtttctttccagcgttaagcaactaactgaggaggacaagtctgcctggtcagaacttgtggtttctctgaagtcagaatatccgaagtacacacctttgctttctaagattttgcaatgtgtcctccagaaaggaactgatggtgataagattagccatgaaaaagaggttattgctgcagccgatgaggttgtgggcagtattgataaagaggaactggctaagtatttatctctaaattcagatcctgaagatgaagaagcacagaaattcaagaaaaaaatagaagaaacgcgagatcagttggctgatgcactatatcaaaagtgtcttgcattggctgagattgaatcactgaagtctgatgagtcaattgaggtatctgctaaagatatttttgaggagaattacaaagaattgattaaatgggttgatgtcaaatctgcaaaatatggcacttcgactgttttgcgtgaaaaacgctgtggaagacctggtacagcattgaaggtgtggctactggagactctcctcaattggtgatattttcttttggagcatgactgggcatgggtgggcacggcattgtggcgacatcagaagaacatat

SEQ ID NO: 50998 - DNA, 4451 bp, Zea Mays
ccacgatccattagccctagccaacgaccggctgccagactgcaacagccaccggcggtcggcacgacagcacggtccttccattgttgctcccagctccaacgcagcattactcatctccattctccagtccgataatccactcattacctcatcatcgtttccaaaagcaaagctttccacgcagattccaccattaaattgggcgaacttttttgaattaaaaactcaaatcctggaaaacgagatgcggtaggctggtagtaggaggactaatcatgtgggcgacgctacataaacccgtcgcgcacgccaacttgcgtctcctcctcacagtctccgccttctccggaccactccacttaggcaccgccagcgctgtcgcggcggcggttacgacccgacgctcgagttctagcaggggcgtcgcggccaccgcgatgccttcgtcgtctccgcctccgctgccaccagccgaggagacgaccgcctctgctgccgctctcgcccctgagggtggattctccctcaccgagccctcgttcctcgagtccctcatgccgaagaaggagatcggcgtcgaccgcttcctcgccgctcaccctgagtatgacgggcgcagcgcactcatcgctatcttcgattctggagtcgatccagctgctgctgggttacagactacttcagatggaaagcctaaaatccttgatgtacttgattgcactggtagtggtgatgttgacacgtccaaagtggtgaaagctgatgctgatggtgctattgttggtgcttcaggtgcccgtttggttataaacccctcatggaaaaacccttctcaagagtggcatgttggctgtaaattaatatatgaactgtttactgacacacttacatctcgattgaagaaagaaagaaagaagaaatgggacgaggaaaaccaggaatcaatttccgatgctctgaagcagctgaatgaatttgaaaagaagcatcctaagcctgatgacaccatgctgaagaaggcacatgaagacatgcaaagcagacttgattacctgaggaaacaagctgaaggttatgacgataaggggcctgtaattgacattgttacatggaatgatggtgatgtgtggagggttgctgtcgatacccagacccttgagggtaacaatgatggtggaaaactagcagattttgttcctctgacaaactacaggcttgaacgcaaatatgcaattttcagcaaattggatgcttgctcttttgtagcaaatgtttataatgatgggaaccttgtcagtatagtaactgactgctctccccatgctactcatgtcgcgggcattgcagctgcatttcatccagatgaacctctgctgaatggagttgcacctggagcacaattgatttcctgtaagattggagacactcgcttaggatctatggagacagggacggggctggtgagggccttgatagctgcagtagagcacaaatgtgatctgattaacatgagctatggagagcctacccttcttcctgactatggcagattcattgatctttctaatgaggttgtggacaaacatcgcattatatttattagtagcgccggaaacaatggaccggctttgaacactgtgggtgctccaggtgggactagtacaagcattattggtgttggtgcttatgtttcaccagccatggctgctggagctcactgtgttgtacaaccacctgcaaagggaatggagtacacatggtctagccgcgggcctactgctgatggggatcttggcgtttccattagtgcacctggtggtgcagttgctcctgtaccaacttggacgcttcaatctcgcatgctcatgaatggcacttccatgtcatctccttctgcctgtggtggggtagctcttcttgttagtggcatgaaggctgaaggcattccattaagcccttattctgtaagaaaagcaatagagaatacagccgcatctataagtaatgcacctgaggagaaactgaccacaggaaatgggcttttgcaagttgatagggcttttgaatatgcacagcaggctaagaagttgccacttgtttcttatagaatctcaatcaatcaagtgggaaagtcagttccaaaactaagaggaatatacctccgcgggggcaatgcatgctgccaaacaagtgagtggactgtgcaacttgacccaaaatttcatgagggcgcgagtaacttggagcaactggttccttttgaggagtgcctgcaactgcattctactgatacctctgtggttcaaattcctgagtatatactggtgacaaacaatggacgcagtttcaacattgttgtcaatcctgctaatatcagcagtggccttcactattttgaagtttatggcatagattacaaagcaccatggcgtgggcctattttccgtgtgccaattactgtaataaagcctattgctctattgggagagccaccactattgtcaatttcaaaccttcgttttcaatctggtcatattgaaaggaggttcataaatgtaccttttggagcttcatgggcggaagttactatgcgaacatcagcttttgatactcctagaagattctttttggacactgttcagatctgtccactgaagcgacctgttaaatgggaggctgttgttactttctcttctccatcttcaaagaatttcagttttcctgtagaaggtggcttaactttggagttgtccatagcccagttctggtctagtggaattgctagccatgaacctacctgtgttgattttgagattgtgctgcatggaatatccattgatcagaaagtaagtacccttgatggtgagtcacccttgcttatagttgctagatcacttctagcgtcagagaagcttgttcctgttggcaccctgaacaagatcaggataccttatcgacccgtggagtgtaatctttcttcacttcccactgaccgtgataaattgccctctggcaagcaaattattgccctgaccttaacttacaagttcaaattagaagacaatgctgaaataaagccccatgtgccactgcttaacaacagaatatatgacaataaatttgagtctcagttttatagaatatcagattcaaacaagcgtatttactcgtccggagacgtttaccctagttatgtcagactttccaaaggagaatacacgttgcaactgtacataaggatttcgttccattgatgttctactcccaacctgatggtcctatagttggaagtggcaccttcaaatccactgttctagttccaggcgaacctgaagcattctatgtgggtcctccgtctagtgaaaaactcccaaagaatgctccacctggggctgttttggttgggtccataacctatggtactgtaagcacatttaacaagaaagatgaacaaaaccaccgtgctccagtatcttatagtatctcatataccattttgccatcaaaggtcagtagtatagaatgcgccgtctccctattgtctacctttgttgttatgatgatccttgtgttagttctggatcaccagttcaggatcaccatacgggtacacagtcctgatcctgatactttttgtacagcatatatttgtgctctagattttgtctcatatatgttgcgatatattttgtttcatgctgtggttcattccttgttcggtcttcggtgtaatcaatacaagttattgcaggttgatgataaagaaaagggggttttagttggtacaaagagcatacctgaacagttagatgaggaggttcgagacaccaagataaagtttctttccagcgttaagcaactaactgaggaggacaagtctgcctggtcagaacttgtggtttctctgaagtcagaatatccgaagtacacacctttgctttctaagattttgcaatgtgtcctccagaaaggaactgatggtgataagattagccatgaaaaagaggttattgctgcagccgatgaggttgtgggcagtattgataaagaggaactggctaagtatttatctctaaattcagatcctgaagatgaagaagcacagaaattcaagaaaaaaatagaagaaacgcgagatcagttggctgatgcactatatcaaaagtgtcttgcattggctgagattgaatcactgaagtctgatgagtcaattgaggtatctgctaaagatatttttgaggagaattacaaagaattgattaaatgggttgatgtcaaatctgcaaaatatggcacttcgactgttttgcgtgaaaaacgctgtggaagacctggtacagcattgaaggtgtggctactggagactctcctcaattggtgatattttcttttggagcatgactgggcatgggtgggcacggcattgtggcgacatcagaagaacatat

SEQ ID NO: 50999 - DNA, 4455 bp, Zea Mays
ccacgatccattagccctagccaacgaccggctgccagactgcaacagccaccggcggtcggcacgacagcacggtccttccattgttgctcccagctccaacgcagcattactcatctccattctccagtccgataatccactcattacctcatcatcgtttccaaaagcaaagctttccacgcagattccaccattaaattgggcgaacttttttgaattaaaaactcaaatcctggaaaacgagatgcggtaggctggtagtaggaggactaatcatgtgggcgacgctacataaacccgtcgcgcacgccaacttgcgtctcctcctcacagtctccgccttctccggaccactccacttaggcaccgccagcgctgtcgcggcggcggttacgacccgacgctcgagttctagcaggggcgtcgcggccaccgcgatgccttcgtcgtctccgcctccgctgccaccagccgaggagacgaccgcctctgctgccgctctcgcccctgagggtggattctccctcaccgagccctcgttcctcgagtccctcatgccgaagaaggagatcggcgtcgaccgcttcctcgccgctcaccctgagtatgacgggcgcagcgcactcatcgctatcttcgattctggagtcgatccagctgctgctgggttacagactacttcagatggaaagcctaaaatccttgatgtacttgattgcactggtagtggtgatgttgacacgtccaaagtggtgaaagctgatgctgatggtgctattgttggtgcttcaggtgcccgtttggttataaacccctcatggaaaaacccttctcaagagtggcatgttggctgtaaattaatatatgaactgtttactgacacacttacatctcgattgaaggtaaatttcattttcagtgcctacaccccaaaattttatattgaacttgatatcttaacaagggtctacccacccacacttcagaaagaaagaaagaagaaatgggacgaggaaaaccaggaatcaatttccgatgctctgaagcagctgaatgaatttgaaaagaagcatcctaagcctgatgacaccatgctgaagaaggcacatgaagacatgcaaagcagacttgattacctgaggaaacaagctgaaggttatgacgataaggggcctgtaattgacattgttacatggaatgatggtgatgtgtggagggttgctgtcgatacccagacccttgagggtaacaatgatggtggaaaactagcagattttgttcctctgacaaactacaggcttgaacgcaaatatgcaattttcagcaaattggatgcttgctcttttgtagcaaatgtttataatgatgggaaccttgtcagtatagtaactgactgctctccccatgctactcatgtcgcgggcattgcagctgcatttcatccagatgaacctctgctgaatggagttgcacctggagcacaattgatttcctgtaagattggagacactcgcttaggatctatggagacagggacggggctggtgagggccttgatagctgcagtagagcacaaatgtgatctgattaacatgagctatggagagcctacccttcttcctgactatggcagattcattgatctttctaatgaggttgtggacaaacatcgcattatatttattagtagcgccggaaacaatggaccggctttgaacactgtgggtgctccaggtgggactagtacaagcattattggtgttggtgcttatgtttcaccagccatggctgctggagctcactgtgttgtacaaccacctgcaaagggaatggagtacacatggtctagccgcgggcctactgctgatggggatcttggcgtttccattagtgcacctggtggtgcagttgctcctgtaccaacttggacgcttcaatctcgcatgctcatgaatggcacttccatgtcatctccttctgcctgtggtggggtagctcttcttgttagtggcatgaaggctgaaggcattccattaagcccttattctgtaagaaaagcaatagagaatacagccgcatctataagtaatgcacctgaggagaaactgaccacaggaaatgggcttttgcaagttgatagggcttttgaatatgcacagcaggctaagaagttgccacttgtttcttatagaatctcaatcaatcaagtgggaaagtcagttccaaaactaagaggaatatacctccgcgggggcaatgcatgctgccaaacaagtgagtggactgtgcaacttgacccaaaatttcatgagggcgcgagtaacttggagcaactggttccttttgaggagtgcctgcaactgcattctactgatacctctgtggttcaaattcctgagtatatactggtgacaaacaatggacgcagtttcaacattgttgtcaatcctgctaatatcagcagtggccttcactattttgaagtttatggcatagattacaaagcaccatggcgtgggcctattttccgtgtgccaattactgtaataaagcctattgctctattgggagagccaccactattgtcaatttcaaaccttcgttttcaatctggtcatattgaaaggaggttcataaatgtaccttttggagcttcatgggcggaagttactatgcgaacatcagcttttgatactcctagaagattctttttggacactgttcagatctgtccactgaagcgacctgttaaatgggaggctgttgttactttctcttctccatcttcaaagaatttcagttttcctgtagaaggtggcttaactttggagttgtccatagcccagttctggtctagtggaattgctagccatgaacctacctgtgttgattttgagattgtgctgcatggaatatccattgatcagaaagtaagtacccttgatggtgagtcacccttgcttatagttgctagatcacttctagcgtcagagaagcttgttcctgttggcaccctgaacaaggtcagttgagaatctgtagaaatctgaagagatttttttctttctttccgtatatttatttttaagcttgcagatcaggataccttatcgacccgtggagtgtaatctttcttcacttcccactgaccgtgataaattgccctctggcaagcaaattattgccctgaccttaacttacaagttcaaattagaagacaatgctgaaataaagccccatgtgccactgcttaacaacagaatatatgacaataaatttgagtctcagttttatagaatatcagattcaaacaagcgtatttactcgtccggagacgtttaccctagttatgtcagactttccaaaggagaatacacgttgcaactgtacataaggcatgagaatgtgcaattcttagagaaactcaaggaactggttctgtttattgagaggaaactagacaaaaaggatttcgttccattgatgttctactcccaacctgatggtcctatagttggaagtggcaccttcaaatccactgttctagttccaggcgaacctgaagcattctatgtgggtcctccgtctagtgaaaaactcccaaagaatgctccacctggggctgttttggttgggtccataacctatggtactgtaagcacatttaacaagaaagatgaacaaaaccaccgtgctccagtatcttatagtatctcatataccattttgccatcaaaggttgatgataaagaaaagggggttttagttggtacaaagagcatacctgaacagttagatgaggaggttcgagacaccaagataaagtttctttccagcgttaagcaactaactgaggaggacaagtctgcctggtcagaacttgtggtttctctgaagtcagaatatccgaagtacacacctttgctttctaagattttgcaatgtgtcctccagaaaggaactgatggtgataagattagccatgaaaaagaggttattgctgcagccgatgaggttgtgggcagtattgataaagaggaactggctaagtatttatctctaaattcagatcctgaagatgaagaagcacaggttttctcctatgacagaaattcaagaaaaaaatagaagaaacgcgagatcagttggctgatgcactatatcaaaagtgtcttgcattggctgagattgaatcactgaagtctgatgagtcaattgaggtatctgctaaagatatttttgaggagaattacaaagaattgattaaatgggttgatgtcaaatctgcaaaatatggcacttcgactgttttgcgtgaaaaacgctgtggaagacctggtacagcattgaaggtgtggctactggagactctcctcaattggtgatattttcttttggagcatgactgggcatgggtgggcacggcattgtggcgacatcagaagaacatat

SEQ ID NO: 51000 - DNA, 1679 bp, Zea Mays
tggacgcctagattctggagtcgatccagctgctgctgggttacagactacttcagatggaaagcctaaaatccttgatgtacttgattgcactggtagtggtgatgttgacacgtccaaagtggtgaaagctgatgctgatggtgctattgttggtgcttcaggtgcccgtttggttataaacccctcatggaaaaacccttctcaagagtggcatgttggctgtaaattaatatatgaactgtttactgacacacttacatctcgattgaagaaagaaagaaagaagaaatgggacgaggaaaaccaggaatcaatttccgatgctctgaagcagctgaatgaatttgaaaagaagcatcctaagcctgatgacaccatgctgaagaaggcacatgaagacatgcaaagcagacttgattacctgaggaaacaagctgaaggttatgacgataaggggcctgtaattgacattgttacatggaatgatggtgatgtgtggagggttgctgtcgatacccagacccttgagggtaacaatgatggtggaaaactagcagattttgttcctctgacaaactacaggcttgaacgcaaatatgcaattttcagcaaattggatgcttgctcttttgtagcaaatgtttataatgatgggaaccttgtcagtatagtaactgactgctctccccatgctactcatgtcgcgggcattgcagctgcatttcatccagatgaacctctgctgaatggagttgcacctggagcacaattgatttcctgtaagattggagacactcgcttaggatctatggagacagggacggggctggtgagggccttgatagctgcagtagagcacaaatgtgatctgattaacatgagctatggagagcctacccttcttcctgactatggcagattcattgatctttctaatgaggttgtggacaaacatcgcattatatttattagtagcgccggaaacaatggaccggctttgaacactgtgggtgctccaggtgggactagtacaagcattattggtgttggtgcttatgtttcaccagccatggctgctggagctcactgtgttgtacaaccacctgcaaagggaatggagtacacatggtctagccgcgggcctactgctgatggggatcttggcgtttccattagtgcacctggtggtgcagttgctcctgtaccaacttggacgcttcaatctcgcatgctcatgaatggcacttccatgtcatctccttctgcctgtggtggggtagctcttcttgttagtggcatgaaggctgaaggcattccattaagcccttattctgtaagaaaagcaatagagaatacagccgcatctataagtaatgcacctgaggagaaactgaccacaggaaatgggcttttgcaagttgatagggcttttgaatatgcacagcaggctaagaagttgccacttgtttcttatagaatctcaatcaatcaagtgggaaagtcagtggactgtgcaacttgacccaaaatttcatgagggcgcgagtaacttggagcaactggttccttttgaggagtgcctgcaactgcattctactgatacctctgtggttcaaattcctgagtatatactggtgacaaacaatggacgcagtttcaagcgtcacctcgcctta

SEQ ID NO: 51001 - DNA, 2458 bp, Zea Mays
gctgaatgttgtttcatatcaaaccataaacttgcattgttgtcaatcctgctaatatcagcagtggccttcactattttgaagtttatggcatagattacaaagcaccatggcgtgggcctattttccgtgtgccaattactgtaataaagcctattgctctattgggagagccaccactattgtcaatttcaaaccttcgttttcaatctggtcatattgaaaggaggttcataaatgtaccttttggagcttcatgggcggaagttactatgcgaacatcagcttttgatactcctagaagattctttttggacactgttcagatctgtccactgaagcgacctgttaaatgggaggctgttgttactttctcttctccatcttcaaagaatttcagttttcctgtagaaggtggcttaactttggagttgtccatagcccagttctggtctagtggaattgctagccatgaacctacctgtgttgattttgagattgtgctgcatggaatatccattgatcagaaagtaagtacccttgatggtgagtcacccttgcttatagttgctagatcacttctagcgtcagagaagcttgttcctgttggcaccctgaacaagatcaggataccttatcgacccgtggagtgtaatctttcttcacttcccactgaccgtgataaattgccctctggcaagcaaattattgccctgaccttaacttacaagttcaaattagaagacaatgctgaaataaagccccatgtgccactgcttaacaacagaatatatgacaataaatttgagtctcagttttatagaatatcagattcaaacaagcgtatttactcgtccggagacgtttaccctagttatgtcagactttccaaaggagaatacacgttgcaactgtacataaggcatgagaatgtgcaattcttagagaaactcaaggaactggttctgtttattgagaggaaactagacaaaaaggatttcgttccattgatgttctactcccaacctgatggtcctatagttggaagtggcaccttcaaatccactgttctagttccaggcgaacctgaagcattctatgtgggtcctccgtctagtgaaaaactcccaaagaatgctccacctggggctgttttggttgggtccataacctatggtactgtaagcacatttaacaagaaagatgaacaaaaccaccgtgctccagtatcttatagtatctcatataccattttgccatcaaaggttgatgataaagaaaagggggttttagttggtacaaagagcatacctgaacagttagatgaggaggttcgagacaccaagataaagtttctttccagcgttaagcaactaactgaggaggacaagtctgcctggtcagaacttgtggtttctctgaagtcagaatatccgaagtacacacctttgctttctaagattttgcaatgtgtcctccagaaaggaactgatggtgataagattagccatgaaaaagaggttattgctgcagccgatgaggttgtgggcagtattgataaagaggaactggctaagtatttatctctaaattcagatcctgaagatgaagaagcacagaaattcaagaaaaaaatagaagaaacgcgagatcagttggctgatgcactatatcaaaagtgtcttgcattggctgagattgaatcactgaagtctgatgagtcaattgaggtatctgctaaagatatttttgaggagaattacaaagaattgattaaatgggttgatgtcaaatctgcaaaatatggcacttcgactgttttgcgtgaaaaacgctgtggaagacctggtacagcattgaagattctaaatgatttgattcaaaatgaatctgaaccaaagaaaaagctttatgatttgaagatccagttgattgaggagatgggatggaaccatgtctcaacctacgaaaaacagtggatgcaagtccgctttcccccatgtctgccaccattttgattgtgaactcatttttacaatggctctatcatcctgggttcagtagttgtcattttcattgctgggtgcgtcagttcattatttcgatggcaaacagccaactaggcaagctactggatttgtgcgtttggggacacagttattccatagttattttgtggtacaatatcaggggagtcctttctccaaggagataagacggaacagagatattttgatggacttgaaggagattttatcctcttcaatccttataatgtctatcaaaccaaataaggtttataatccttgtcaaaccaaacaatgcctaaatgagcgtagaatagccgagaatgatatgggcttgtctttaacaatttggcattaaacatagttagctgaacattaagcaaaataactgcgtaaaagcatcacttgttaaggcacttcgaggacgcgag

SEQ ID NO: 51002 - DNA, 2026 bp, Zea Mays
gtcatattgaaaggaggttcataaatgtaccttttggagcttcatgggcggaagttactatgcgaacatcagcttttgatactcctagaagattctttttggacactgttcagatctgtccactgaagcgacctgttaaatgggaggctgttgttactttctcttctccatcttcaaagaatttcagttttcctgtagaaggtggcttaactttggagttgtccatagcccagttctggtctagtggaattgctagccatgaacctacctgtgttgattttgagattgtgctgcatggaatatccattgatcagaaagtaagtacccttgatggtgagtcacccttgcttatagttgctagatcacttctagcgtcagagaagcttgttcctgttggcaccctgaacaagcgtatttactcgtccggagacgtttaccctagttatgtcagactttccaaaggagaatacacgttgcaactgtacataaggcatgagaatgtgcaattcttagagaaactcaaggaactggttctgtttattgagaggaaactagacaaaaaggatttcgttccattgatgttctactcccaacctgatggtcctatagttggaagtggcaccttcaaatccactgttctagttccaggcgaacctgaagcattctatgtgggtcctccgtctagtgaaaaactcccaaagaatgctccacctggggctgttttggttgggtccataacctatggtactgtaagcacatttaacaagaaagatgaacaaaaccaccgtgctccagtatcttatagtatctcatataccattttgccatcaaaggttgatgataaagaaaagggggttttagttggtacaaagagcatacctgaacagttagatgaggaggttcgagacaccaagataaagtttctttccagcgttaagcaactaactgaggaggacaagtctgcctggtcagaacttgtggtttctctgaagtcagaatatccgaagtacacacctttgctttctaagattttgcaatgtgtcctccagaaaggaactgatggtgataagattagccatgaaaaagaggttattgctgcagccgatgaggttgtgggcagtattgataaagaggaactggctaagtatttatctctaaattcagatcctgaagatgaagaagcacagaaattcaagaaaaaaatagaagaaacgcgagatcagttggctgatgcactatatcaaaagtgtcttgcattggctgagattgaatcactgaagtctgatgagtcaattgaggtatctgctaaagatatttttgaggagaattacaaagaattgattaaatgggttgatgtcaaatctgcaaaatatggcacttcgactgttttgcgtgaaaaacgctgtggaagacctggtacagcattgaagattctaaatgatttgattcaaaatgaatctgaaccaaagaaaaagctttatgatttgaagatccagttgattgaggagatgggatggaaccatgtctcaacctacgaaaaacagtggatgcaagtccgctttcccccatgtctgccaccattttgattgtgaactcatttttacaatggctctatcatcctgggttcagtagttgtcattttcattgctgggtgcgtcagttcattatttcgatggcaaacagccaactaggcaagctactggatttgtgcgtttggggacacagttattccatagttattttgtggtacaatatcaggggagtcctttctccaaggagataagacggaacagagatattttgatggacttgaaggagattttatcctcttcaatccttataatgtctatcaaaccaaataaggtttataatccttgtcaaaccaaacaatgcctaaatgagcgtagaatagccgagaatgatatgggcttgtctttaacaatttggcattaaacatagttagctgaacattaagcaaaataactgcgtaaaagcatcacttgttaaggcacttcgaggacgcgag

SEQ ID NO: 51003 - DNA, 1916 bp, Zea Mays
cttaattcttggtctcctagataaatttattgtgctgcatggaatatccattgatcagaaagtaagtacccttgatggtgagtcacccttgcttatagttgctagatcacttctagcgtcagagaagcttgttcctgttggcaccctgaacaagatcaggataccttatcgacccgtggagtgtaatctttcttcacttcccactgaccgtgataaattgccctctggcaagcaaattattgccctgaccttaacttacaagttcaaattagaagacaatgctgaaataaagccccatgtgccactgcttaacaacagaatatatgacaataaatttgagtctcagttttatagaatatcagattcaaacaagcgtatttactcgtccggagacgtttaccctagttatgtcagactttccaaaggagaatacacgttgcaactgtacataaggatttcgttccattgatgttctactcccaacctgatggtcctatagttggaagtggcaccttcaaatccactgttctagttccaggcgaacctgaagcattctatgtgggtcctccgtctagtgaaaaactcccaaagaatgctccacctggggctgttttggttgggtccataacctatggtactgtaagcacatttaacaagaaagatgaacaaaaccaccgtgctccagtatcttatagtatctcatataccattttgccatcaaaggttgatgataaagaaaagggggttttagttggtacaaagagcatacctgaacagttagatgaggaggttcgagacaccaagataaagtttctttccagcgttaagcaactaactgaggaggacaagtctgcctggtcagaacttgtggtttctctgaagtcagaatatccgaagtacacacctttgctttctaagattttgcaatgtgtcctccagaaaggaactgatggtgataagattagccatgaaaaagaggttattgctgcagccgatgaggttgtgggcagtattgataaagaggaactggctaagtatttatctctaaattcagatcctgaagatgaagaagcacagaaattcaagaaaaaaatagaagaaacgcgagatcagttggctgatgcactatatcaaaagtgtcttgcattggctgagattgaatcactgaagtctgatgagtcaattgaggtatctgctaaagatatttttgaggagaattacaaagaattgattaaatgggttgatgtcaaatctgcaaaatatggcacttcgactgttttgcgtgaaaaacgctgtggaagacctggtacagcattgaagattctaaatgatttgattcaaaatgaatctgaaccaaagaaaaagctttatgatttgaagatccagttgattgaggagatgggatggaaccatgtctcaacctacgaaaaacagtggatgcaagtccgctttcccccatgtctgccaccattttgattgtgaactcatttttacaatggctctatcatcctgggttcagtagttgtcattttcattgctgggtgcgtcagttcattatttcgatggcaaacagccaactaggcaagctactggatttgtgcgtttggggacacagttattccatagttattttgtggtacaatatcaggggagtcctttctccaaggagataagacggaacagagatattttgatggacttgaaggagattttatcctcttcaatccttataatgtctatcaaaccaaataaggtttataatccttgtcaaaccaaacaatgcctaaatgagcgtagaatagccgagaatgatatgggcttgtctttaacaatttggcattaaacatagttagctgaacattaagcaaaataactgcgtaaaagcatcacttgttaaggcacttcgaggacgcgag

SEQ ID NO: 51004 - DNA, 1402 bp, Zea Mays
gacagcgtccgtgtcttccttgctcactctcctcaccactaccctgacctgacctgctcccaagctccctctgcctgcctttataaatcaccggggcagagcgcctcagtgacacacgccgctgctccaagaaaccaccgccgagcccaaccgcacaagcgcgcgaggcaggagagagagagaggcggggagcaaaacaatggaggggaaagaggaggacgtgcgcctgggcgccaacaagttctcggagcgccagcccatcgggacggcggcgcagggcgccgctgacgacaaggactacaaggagcccccgccggcgccgctgttcgagcccggggagctcaagtcctggtccttctaccgcgcgggcatcgccgagttcgtcgccaccttcctcttcctctacatcaccatcctcaccgtcatgggcgtctccaagtccacctccaagtgcgccaccgtcggcatccagggcatcgcctggtccttcggaggaatgatcttcgcgctcgtctactgcaccgccggcatctccgccaggaagctgtccctgactagggccctcttctacatcatcatgcaatgcctgggtgccatctgtggagctggagtggtgaagggcttccagcagggactttacatgggcaacggtggtggcgccaatgttgtcgcacctggctacaccaagggtgatggccttggcgctgagattgttggcaccttcatcctagtctacaccgtcttctcagccaccgatgccaagaggaatgccagggactcccatgttcctatccttgccccactgccaattgggttcgcggtgttcctggtccaccttgccaccatccccattactggcactggcatcaacccagctaggagccttggcgctgccatcatctacaacagggatcacgcctggaacgaccattggatcttctgggtcggccccttcattggcgctgctctggctgccatctaccaccaggtgatcatcagagccatcccgttcaagagcaggtcttaagctgccgtggccgtgccgagacatgccagtccgaagaacgggcgtcttcctgtgatgtcttcttgtctgcccacgcctagtttctctgtcgattcctattcgtcgtctcttcagggctggtgctcactgctgcgccgttctgttaaccgaaacaagaactctgtgtattcctgtaccgagctgtgcatgtttttttctttccatcgtggagaatttaagttattatccgtttgctgcaaggtttgccgtctcattttatgcgttgggatgttggcaagaaagggcagatgtcatgtgagaatttaagttaagtgaaatcgattcagggttttcttggtttcagtttcaacagaaatcggcactggctggattcgc

SEQ ID NO: 51005 - DNA, 1142 bp, Zea Mays
gtccgtgtcttccttgctcactctcctcaccactaccctgacctgacctgctcccaagctccctctgcctgcctttataaatcaccggggcagagcgcctcagtgacacacgccgctgctccaagaaaccaccgccgagcccaaccgcacaagcgcgcgaggcaggagagagagagaggcggggagcaaaacaatggaggggaaagaggaggacgtgcgcctgggcgccaacaagttctcggagcgccagcccatcgggacggcggcgcagggcgccgctgacgacaaggactacaaggagcccccgccggcgccgctgttcgagcccggggagctcaagtcctggtccttctaccgcgcgggcatcgccgagttcgtcgccaccttcctcttcctctacatcaccatcctcaccgtcatgggcgtctccaagtccacctccaagtgcgccaccgtcggcatccagggcatcgcctggtccttcggaggaatgatcttcgcgctcgtctactgcaccgccggcatctccgatccttgccccactgccaattgggttcgcggtgttcctggtccaccttgccaccatccccattactggcactggcatcaacccagctaggagccttggcgctgccatcatctacaacagggatcacgcctggaacgaccattggatcttctgggtcggccccttcattggcgctgctctggctgccatctaccaccaggtgatcatcagagccatcccgttcaagagcaggtcttaagctgccgtggccgtgccgagacatgccagtccgaagaacgggcgtcttcctgtgatgtcttcttgtctgcccacgcctagtttctctgtcgattcctattcgtcgtctcttcagggctggtgctcactgctgcgccgttctgttaaccgaaacaagaactctgtgtattcctgtaccgagctgtgcatgtttttttctttccatcgtggagaatttaagttattatccgtttgctgcaaggtttgccgtctcattttatgcgttgggatgttggcaagaaagggcagatgtcatgtgagaatttaagttaagtgaaatcgattcagggttttcttggtttcagtttcaacagaaatcggcactggctggattcgc

SEQ ID NO: 51006 - DNA, 1289 bp, Zea Mays
cttccttgctcactctcctcaccactaccctgacctgacctgctcccaagctccctctgcctgcctttataaatcaccggggcagagcgcctcagtgacacacgccgctgctccaagaaaccaccgccgagcccaaccgcacaagcgcgcgaggcaggagagagagagaggcggggagcaaaacaatggaggggaaagaggaggacgtgcgcctgggcgccaacaagttctcggagcgccagcccatcgggacggcggcgcagggcgccgctgacgacaaggactacaaggagcccccgccggcgccgctgttcgagcccggggagctcaagtcctggtccttctaccgcgcgggcatcgccgagttcgtcgccaccttcctcttcctctacatcaccatcctcaccgtcatgggcgtctccaagtccacctccaagtgcgccaccgtcggcatccagggcatcgcctggtccttcggaggaatgatcttcgcgctcgtctactgcaccgccggcatctccggaggacacatcaacccagctgtgactttcgggctgttcttagccaggaagctgtccctgactagggccctcttctacatcatcatgcaatgcctgggtgccatctgtggagctggagtggtgaagggcttccagcagggactttacatgggcaacggtggtggcgccaatgttgtcgcacctggctacaccaagggtgatggccttggcgctgagattgttggcaccttcatcctagtctacaccgtcttctcagccaccgatgccaagaggaatgccagggactcccatgttccttggatcttctgggtcggccccttcattggcgctgctctggctgccatctaccaccaggtgatcatcagagccatcccgttcaagagcaggtcttaagctgccgtggccgtgccgagacatgccagtccgaagaacgggcgtcttcctgtgatgtcttcttgtctgcccacgcctagtttctctgtcgattcctattcgtcgtctcttcagggctggtgctcactgctgcgccgttctgttaaccgaaacaagaactctgtgtattcctgtaccgagctgtgcatgtttttttctttccatcgtggagaatttaagttattatccgtttgctgcaaggtttgccgtctcattttatgcgttgggatgttggcaagaaagggcagatgtcatgtgagaatttaagttaagtgaaatcgattcagggttttcttggtttcagtttcaacagaaatcggcactggctggattcgc

SEQ ID NO: 51007 - DNA, 1284 bp, Zea Mays
ctcactctcctcaccactaccctgacctgacctgctcccaagctccctctgcctgcctttataaatcaccggggcagagcgcctcagtgacacacgccgctgctccaagaaaccaccgccgagcccaaccgcacaagcgcgcgaggcaggagagagagagaggcggggagcaaaacaatggaggggaaagaggaggacgtgcgcctgggcgccaacaagttctcggagcgccagcccatcgggacggcggcgcagggcgccgctgacgacaaggactacaaggagcccccgccggcgccgctgttcgagcccggggagctcaagtcctggtccttctaccgcgcgggcatcgccgagttcgtcgccaccttcctcttcctctacatcaacccagctgtgactttcgggctgttcttagccaggaagctgtccctgactagggccctcttctacatcatcatgcaatgcctgggtgccatctgtggagctggagtggtgaagggcttccagcagggactttacatgggcaacggtggtggcgccaatgttgtcgcacctggctacaccaagggtgatggccttggcgctgagattgttggcaccttcatcctagtctacaccgtcttctcagccaccgatgccaagaggaatgccagggactcccatgttcctatccttgccccactgccaattgggttcgcggtgttcctggtccaccttgccaccatccccattactggcactggcatcaacccagctaggagccttggcgctgccatcatctacaacagggatcacgcctggaacgaccattggatcttctgggtcggccccttcattggcgctgctctggctgccatctaccaccaggtgatcatcagagccatcccgttcaagagcaggtcttaagctgccgtggccgtgccgagacatgccagtccgaagaacgggcgtcttcctgtgatgtcttcttgtctgcccacgcctagtttctctgtcgattcctattcgtcgtctcttcagggctggtgctcactgctgcgccgttctgttaaccgaaacaagaactctgtgtattcctgtaccgagctgtgcatgtttttttctttccatcgtggagaatttaagttattatccgtttgctgcaaggtttgccgtctcattttatgcgttgggatgttggcaagaaagggcagatgtcatgtgagaatttaagttaagtgaaatcgattcagggttttcttggtttcagtttcaacagaaatcggcactggctggattcgc

SEQ ID NO: 51008 - DNA, 677 bp, Zea Mays
cttatgtcttttggggactggaatttagctgattccttaatcttgtgtttcaacaaattgaaaatatccttgccccactgccaattgggttcgcggtgttcctggtccaccttgccaccatccccattactggcactggcatcaacccagctaggagccttggcgctgccatcatctacaacagggatcacgcctggaacgaccattggatcttctgggtcggccccttcattggcgctgctctggctgccatctaccaccaggtgatcatcagagccatcccgttcaagagcaggtcttaagctgccgtggccgtgccgagacatgccagtccgaagaacgggcgtcttcctgtgatgtcttcttgtctgcccacgcctagtttctctgtcgattcctattcgtcgtctcttcagggctggtgctcactgctgcgccgttctgttaaccgaaacaagaactctgtgtattcctgtaccgagctgtgcatgtttttttctttccatcgtggagaatttaagttattatccgtttgctgcaaggtttgccgtctcattttatgcgttgggatgttggcaagaaagggcagatgtcatgtgagaatttaagttaagtgaaatcgattcagggttttcttggtttcagtttcaacagaaatcggcactggctggattcgc

SEQ ID NO: 51009 - DNA, 1593 bp, Zea Mays
tggccttcccgtcatcccgtggcggcggctcgcctcctcaaggcctccagactccagtgctcggcgtcgacgtgcgaatcagcgacctccaacacgccgccgcttcgtttctcctgtctcctgattcccgatccgctgagcgccagcgacgacctgctctgcgcgcctggccgtccccgtccttctgcgcagtgccttctctacctcttctcctcgccttccccgcaagactgccttggcgtctctggtagttgaatggcttcaagtgcacgggacattatgtttcggcctctcaaaacattaactataagcccggcactggcatctggtgtgatcagacagcgttaccagcttcaacagcatgcaccagtgagtggcacatccaaaggaaaggctaagctcaaagcaggtcagcctttgaagcgttccaccattggagcaaagaaaggggcaccttccgctgctggtggcggcggtggtcgtggtcgtcgtgaggccattgagcgcattattcagatttccgagtcatgtctcaatgcatctactccgttgcggcacttgcccctcaaggagcgtcttcgtgaggccaaacgtgaggaactgggtcttgtctccaaggagaggcaacgagagcttgatatagccaaagccaaatctaaagccaaatctaaaggtcctggtggagatgatggagaccgtgtgcttatgggtccaccgggccttgactatatcagtcttgggctagttgatgaggaggcaatccccaagtatgaactcacagtcgaggatggtcggcgacttgctaaagaatacagtcgtgtactaatgcggcggcaccgtgcaaggcaaacagcagagtcaatgcttctaaccctaaaaaaggaggccattgatgctctccctgagaagctacgagctgctgctatggtacctgacatgacaccgttccctgcaaaccggtacatggcgacactcacaccaccaattgaaggatatattgaaaaagtgcgggaagcggccaagaagcactctgtgaaggagaaacttcgctgagaattcaagagaggaaactgtttccgtaaggtgaataaatattcaacctaatgtacaagaacagctttggcacaaactgcaattgccatatttggtgatctaatcagacatcccaatttgctgagcagccattatctagtgaaatcctttttgccatttttatgcaactctacaggattgttttttttttttgcagttgtcgctagactgtcatttcattttctgtttttgctcatttaggatgtttgctgttgagaggcatgcttggtgcaagtgcaatggtgagagctgccttactcgttatcatgtcgcagtttcgatgcacctctttgtctttgcggggaaaagacttcgatttatcccctatttacacctcatttatagtcatgtgggagcctctaggacgtttgttgttgacagcaacttccgcaataaagggttagcagtgagaccatgaaactaagaatctcccgattcctcacaaatgccccccgtactattttatactctagattgctgatacagcaagggttatatgat

SEQ ID NO: 51010 - DNA, 1973 bp, Zea Mays
ccgtggcggcggctcgcctcctcaaggcctccagactccagtgctcggcgtcgacgtgcgaatcagcgacctccaacacgccgccgcttcgtttctcctgtctcctgattcccgatccgctgagcgccagcgacgacctgctctgcgcgcctggccgtccccgtccttctgcgcagtgccttctctacctcttctcctcgccttccccgcaagactgccttggcgtctctgaacgtccgatcagaacgtccggagccgatcaagggcaacgacgcgatgaggatgattaatcgtgactaatcgttcgatcagtttagaaacgatcagcctggctggctggattgaaatttcggcccagtggcccacttcacttgcccagcggcccagcccagcttccttttttccaattcccaccacttgagcagaagtcgcacaagtcacaaccaagagccaacagagcaacgcaggcacacacgacacgaaccaggcaaccagctgcggacggaggaaccctagcggaacactgtgccggtgacggcggcgcgctaccggtgacgggggatacggcggcatcggcccctcctccatccccggcgcggcggcgccagcagccggcctgcagcaaaggtagttgaatggcttcaagtgcacgggacattatgtttcggcctctcaaaacattaactataagcccggcactggcatctggtgtgatcagacagcgttaccagcttcaacagcatgcaccagtgagtggcacatccaaaggaaaggctaagctcaaagcaggtcagcctttgaagcgttccaccattggagcaaagaaaggggcaccttccgctgctggtggcggcggtggtcgtggtcgtcgtgaggccattgagcgcattattcagatttccgagtcatgtctcaatgcatctactccgttgcggcacttgcccctcaaggagcgtcttcgtgaggccaaacgtgaggaactgggtcttgtctccaaggagaggcaacgagagcttgatatagccaaagccaaatctaaagccaaatctaaaggtcctggtggagatgatggagaccgtgtgcttatgggtccaccgggccttgactatatcagtcttgggctagttgatgaggaggcaatccccaagtatgaactcacagtcgaggatggtcggcgacttgctaaagaatacagtcgtgtactaatgcggcggcaccgtgcaaggcaaacagcagagtcaatgcttctaaccctaaaaaaggaggccattgatgctctccctgagaagctacgagctgctgctatggtacctgacatgacaccgttccctgcaaaccggtacatggcgacactcacaccaccaattgaaggatatattgaaaaagtgcgggaagcggccaagaagcactctgtgaaggagaaacttcgctgagaattcaagagaggaaactgtttccgtaaggtgaataaatattcaacctaatgtacaagaacagctttggcacaaactgcaattgccatatttggtgatctaatcagacatcccaatttgctgagcagccattatctagtgaaatcctttttgccatttttatgcaactctacaggattgttttttttttttgcagttgtcgctagactgtcatttcattttctgtttttgctcatttaggatgtttgctgttgagaggcatgcttggtgcaagtgcaatggtgagagctgccttactcgttatcatgtcgcagtttcgatgcacctctttgtctttgcggggaaaagacttcgatttatcccctatttacacctcatttatagtcatgtgggagcctctaggacgtttgttgttgacagcaacttccgcaataaagggttagcagtgagaccatgaaactaagaatctcccgattcctcacaaatgccccccgtactattttatactctagattgctgatacagcaagggttatatgat

SEQ ID NO: 51011 - DNA, 2601 bp, Zea Mays
ccgtggcggcggctcgcctcctcaaggcctccagactccagtgctcggcgtcgacgtgcgaatcagcgacctccaacacgccgccgcttcgtttctcctgtctcctgattcccgatccgctgagcgccagcgacgacctgctctgcgcgcctggccgtccccgtccttctgcgcagtgccttctctacctcttctcctcgccttccccgcaagactgccttggcgtctctgaacgtccgatcagaacgtccggagccgatcaagggcaacgacgcgatgaggatgattaatcgtgactaatcgttcgatcagtttagaaacgatcagcctggctggctggattgaaatttcggcccagtggcccacttcacttgcccagcggcccagcccagcttccttttttccaattcccaccacttgagcagaagtcgcacaagtcacaaccaagagccaacagagcaacgcaggcacacacgacacgaaccaggcaaccagctgcggacggaggaaccctagcggaacactgtgccggtgacggcggcgcgctaccggtgacgggggatacggcggcatcggcccctcctccatccccggcgcggcggcgccagcagccggcctgcaggtacggtctccagtctccagatcgcccctctggcgatcaggaacgatcagccgatctgaaaacattgctgtggattcagatcctggggtggatggaatggttacttgttgattcgttacttgctgtgtcgttattttgtgtggcacttgggttggtgtgatctttacccatgctcgattgtgagccttacctgcaacccgaggtgacttgcgtttttgtcttgttttcgtatctcaagctatagtttgaacggtcggggttgtttggatctagaggtgctgatgacaatgtagtgcgcgtgtcagttgattttttgtgcccttccttgaataagtagtaatttatcaactatcatgtccgtcggaggtgccgtttggtatttcctatgagtttactcattttgttctttgttggacatagccagcacttgttttttattacatgttccatcgacgttattcagacacatcatattgtgtatttggcattcactttgctgcttaattgttttattgcactgtgtctgctcattttgataaattgtcttcataaaagatctattttttgtatgcccacaaaagaaaagaaaggaaaagttaagttaattgcatatttcccattggtgtagcaaaggtagttgaatggcttcaagtgcacgggacattatgtttcggcctctcaaaacattaactataagcccggcactggcatctggtgtgatcagacagcgttaccagcttcaacagcatgcaccagtgagtggcacatccaaaggaaaggctaagctcaaagcaggtcagcctttgaagcgttccaccattggagcaaagaaaggggcaccttccgctgctggtggcggcggtggtcgtggtcgtcgtgaggccattgagcgcattattcagatttccgagtcatgtctcaatgcatctactccgttgcggcacttgcccctcaaggagcgtcttcgtgaggccaaacgtgaggaactgggtcttgtctccaaggagaggcaacgagagcttgatatagccaaagccaaatctaaagccaaatctaaaggtcctggtggagatgatggagaccgtgtgcttatgggtccaccgggccttgactatatcagtcttgggctagttgatgaggaggcaatccccaagtatgaactcacagtcgaggatggtcggcgacttgctaaagaatacagtcgtgtactaatgcggcggcaccgtgcaaggcaaacagcagagtcaatgcttctaaccctaaaaaaggaggccattgatgctctccctgagaagctacgagctgctgctatggtacctgacatgacaccgttccctgcaaaccggtacatggcgacactcacaccaccaattgaaggatatattgaaaaagtgcgggaagcggccaagaagcactctgtgaaggagaaacttcgctgagaattcaagagaggaaactgtttccgtaaggtgaataaatattcaacctaatgtacaagaacagctttggcacaaactgcaattgccatatttggtgatctaatcagacatcccaatttgctgagcagccattatctagtgaaatcctttttgccatttttatgcaactctacaggattgttttttttttttgcagttgtcgctagactgtcatttcattttctgtttttgctcatttaggatgtttgctgttgagaggcatgcttggtgcaagtgcaatggtgagagctgccttactcgttatcatgtcgcagtttcgatgcacctctttgtctttgcggggaaaagacttcgatttatcccctatttacacctcatttatagtcatgtgggagcctctaggacgtttgttgttgacagcaacttccgcaataaagggttagcagtgagaccatgaaactaagaatctcccgattcctcacaaatgccccccgtactattttatactctagattgctgatacagcaagggttatatgat

SEQ ID NO: 51012 - DNA, 1433 bp, Zea Mays
caagagccaacagagcaacgcaggcacacacgacacgaaccaggcaaccagctgcggacggaggaaccctagcggaacactgtgccggtgacggcggcgcgctaccggtgacgggggatacggcggcatcggcccctcctccatccccggcgcggcggcgccagcagccggcctgcagacagcgttaccagcttcaacagcatgcaccagtgagtggcacatccaaaggaaaggctaagctcaaagcaggtcagcctttgaagcgttccaccattggagcaaagaaaggggcaccttccgctgctggtggcggcggtggtcgtggtcgtcgtgaggccattgagcgcattattcagatttccgagtcatgtctcaatgcatctactccgttgcggcacttgcccctcaaggagcgtcttcgtgaggccaaacgtgaggaactgggtcttgtctccaaggagaggcaacgagagcttgatatagccaaagccaaatctaaagccaaatctaaaggtcctggtggagatgatggagaccgtgtgcttatgggtccaccgggccttgactatatcagtcttgggctagttgatgaggaggcaatccccaagtatgaactcacagtcgaggatggtcggcgacttgctaaagaatacagtcgtgtactaatgcggcggcaccgtgcaaggcaaacagcagagtcaatgcttctaaccctaaaaaaggaggccattgatgctctccctgagaagctacgagctgctgctatggtacctgacatgacaccgttccctgcaaaccggtacatggcgacactcacaccaccaattgaaggatatattgaaaaagtgcgggaagcggccaagaagcactctgtgaaggagaaacttcgctgagaattcaagagaggaaactgtttccgtaaggtgaataaatattcaacctaatgtacaagaacagctttggcacaaactgcaattgccatatttggtgatctaatcagacatcccaatttgctgagcagccattatctagtgaaatcctttttgccatttttatgcaactctacaggattgttttttttttttgcagttgtcgctagactgtcatttcattttctgtttttgctcatttaggatgtttgctgttgagaggcatgcttggtgcaagtgcaatggtgagagctgccttactcgttatcatgtcgcagtttcgatgcacctctttgtctttgcggggaaaagacttcgatttatcccctatttacacctcatttatagtcatgtgggagcctctaggacgtttgttgttgacagcaacttccgcaataaagggttagcagtgagaccatgaaactaagaatctcccgattcctcacaaatgccccccgtactattttatactctagattgctgatacagcaagggttatatgat

SEQ ID NO: 51013 - DNA, 1661 bp, Zea Mays
aaacgcatgcaatctatcaccgcctcagctcgtgctctctgctctgcactatctactaccaaagaaagatgaaggacttggcggggctggggcacctgttcgtggtgtccttcctgttccacttcgcctccttcatggtgatcccggcggtcaccgacgtcaccatggaggccgcctgccccggccgcgacgagtgctccgtcgccatctacctcagcggcttccagaacgcagtcaccgggatgggggcgctcgtcgtcacccccatcgtcgggaacctgtcggacaggtacggccggaaggcgctcatgacgctgccggtcaccgtagccatcgcgccgctgtttatactggcatgcggccgctcggaggtgtacttctacgtgtactacgtggccaagatcatcgccggggtcttctgcgagggcaccatgcattgtctctgccttgcctacgtggctgaccacgtgggccccaggcgtcgcgcggcggcgttcggcctcctctccggcgtgtcggcagccgggttcgtgtcggggaccttgaccgcgcgcttcctcccgaccgcatccaccttccaggtcgccgccgccgtggccgtggcggcagcgctctacctcagggccttcctccccgacgctggcggcagcgtctcctgcgccgacgaagcctgcgaccctctcctccaggattcgtcctgcgcctcttccacatcatcctccgatgaagagctctcgcctcggctgccgccgcataagggaggcctgccgtctctgtccgacatggtcgcgcttctcactggcagtctggccttgtcgggggcagcaaccatcactttcttctacagtctaggtgaacatgggcttcagactgcattgctgtactacttgaaggcacaatttggttacaacaaagatgagtttgctaatctacttctaattgtcggtgctgccgggatgctatcacagctcactgtaatgcctatcttggctccgattctgggtgaagagatgctgcttattgttgggcttctaggtggatgtactcatgttttcttgtatggcattgcatggtcatattgggtaccttattttgctgcggcatttgtaattttgagtgcttttgttcacccatctataagaaccaatgtatcaaaaaatgtcggatcaaatgagcagggaattgctcaaggatgtatatctgggattagttcttttgcaagcatattaggtcccctcatctttactcccttaaccgcgtggtttctttctgaaacagagcccttcaacttcaaaggtttcagtattttgtgtgctggcttctgcacccttattgcgtttgttatcagtttgaggatgcctggtgctcgatctagtacgtgcaagaagaccgcagttcagcatgagcaagcatgacagaatatagtatagtgccacctactcttttttattctgcccaagtgcatagacagaaaaggacaggatgggaaaaaagtgacttcgagcaaaaggaaaagggtacctaatcatgttgaaatccccaaggaaaatccaaagcttgtcatcatcaatttcaaggttagagaattaggcaagaaaagcttctctaccatgagagcaaggggcatagatgttggagagccaccagacttgcccatttag

SEQ ID NO: 51014 - DNA, 3793 bp, Zea Mays
atgcggctgctccacgttgttccggaactttccgccccgccgtcccgcgagcagcaccgccagcgtaaaccggcgacgcgctattaatccagcccacaaccaagtcatcactgccaccaagtataccaggagcggagagggggtcgagccgtcgagcggagtggctgcggtgcccatcgatcttcggggagtgtctggggtcgccggcggcgaagccatggaccaggcgcgaagcaagagcggcctgcggtcgcacgggtccggcaaggcttcctcgcggccggggtcggggacgctgggatcgccggaggagcaaccgatgctttccgaccgccgggaagtcgtcgtgaaggtcgatgggaacgggaacgggcacgcgccgttttccttccacggcgcggacgcaggtggcgggggaaaggcggggaatgcgacctccagcacgcactccacggcgaccacgacgccggccgagagcaggccgaggtcgagcgaggcgaactcgcctcggtcgccgcccaaggtgtggcgggaggggagctacgagttctggaacaacgatggtggcggcgccggcgccgccgccaccgaggcgttcagcttcaagaaccgcccgccgccgcaggcgccgcagtcgtcgtccccttcgatgtcgccgacgcagccgccgcggccggaggggggcggcgtggaccctcccacgcggctcatcggcagcttcctccggaggcaggcggcgtccggcggcgaggtgtcgctcgacctcgacctggagatggaggagctcggcaggacggcgcagctgcgctcgcacccgtccttctccagctcgctcgagagggacggccgcgtgtcgttccaggaaccccagaagagtcactccacctcgtcctgttcctccgactctgacaccgacgacggccggaagcgccgcggcgacgacggcgaggtcgtccggtgcacgtcctcgtctaccgcagcgggaacggggccgttgctgcgagtcaagacgcgctcccggctaatggacccgccgccgcagtcgcagcccgcgccggcaccggcaccggcgccggcatcggtacctgccgcgtctcctgtcatcgacgaggagcggaaatcttcaggcttgcggacacctaccaagtccggtcgcctcttctccgggcttatgcacggcaacaagtccggccccgttggtggcaagtcaggtcccatggacgacgacgaggacgacccgttcgtggacgaggacatccccgatgacttcaagcgtgggaagtttgacgctttgaccgtcttgcagtggctcggcttgttcctcatcgtcgcggccttggcatgcagtctcagcataaagatcttgtccacgaagaaagtgctgggtctgcacctctggaagtgggagctcctcgtgttcgtgctcatctgtggccgtctcgtctccggatgggtcatcaggcttgccgtcttcggtgtcgaacgcaacttcttgctgaggaagcgcgtgctctacttcgtgtatggcgtgcgcagcgccgtgcagaacgctctctggctcggcctggtgctcgcctcgtggcacttcttgttcgacaagaacgtccagcaggagacgaactctccagtactgccctatgtgaccaagatactattttgcttccttgttgccacgctcatccgccttgtcaagacattgctgctcaaggtactggcctcgtcctttcatgtctccacgtatttcgatcggattcaagaggcattgttcaaccaatacgtcatcgagacactctctgggccgccactagtggatgaaaaccatgtgcttgcggaggttcatgagctgcaacgagcaggcgcaactataccaaaggagctgcgtgatgctgtaccaaccaagactgtgtctgggcaaaggaacattcagttatcaggggtcatgcctaagggagaaggcagcaagcagctgtcgaaggagaaaggggaggggatctctattgacgcacttcataagctcaaccagaaaaacatctcagcttggaacatgaagaggctgatgaggattgtccgctttgggacgctaacaactatggatgagcagatacaacaagcaacaggcgagggggatgaatcagcgacacagatacgaagtgaatatgaggcaaagattgctgccaagaagatctttcacaatgtagcaaagccaggttccaagtacatatacttgtcagacttgataagattcatgaggcaagaagaggctgttaaagcaatgaatctttttgaaggagcacaggagcacaacagggtcagcaagaggtctctcaagaactgggtggtgaatgcatttagagagcgcaaagctcttgcccttacactcaatgatacaaaaactgcagtaaacaagctgaaccagatggtcaatgtcgttgtggggataattgtgtttgttctctggcttcttattctgggaatagcaacaacacatttctttgtcttcctaagttcacagcttctcctggcagttttcgtatttgggaacacattgaagacagtttttgaggcaattgtcttcttgttcgtgatgcatccctttgatgttggtgaccgttgcgaaattgaaggtgttcaggcggtggttgaggaaatgaatatcatgacgacggtgtttctccgatatgataacctgaagatatattatccaaacagtgtacttgcaacaaaaccaattatgaatttttacagaagtcctgatatgggagaagcaattgacttctctattcatgtctcaactcctgtcgagaaactggccctgatgaaggaacgaatactgcggtatgttctgtcttcatcaatttgttttgttttcatttttcaatcagactacccaagagacttggatagtagagagggctagccctggctcagtttaaagagggcttttatatgaaaacatttcaaggtaaaagtattaatgtcagtgtaaagccaacaaataattttcaagtggagtccatgtatttgacatagtttgcagctagatcttacagttcatcaaagcatacatgatttaatctgttttgttacacagaaactaatgatcagttccacttgtattcccagctacattgacaacaagaaggaacattggtacccgggtgcgatggttgtactccgggacgtcgatgacaccaacaaactgaaagtgtcaatatggctgcggcacacgctcaacttccaggacatgggtatgcggttcgtcaggcgagagctagtgctccaggagatgatcaaagtcctgaaggacctcgagattgagtatcggatgctgccacttgatgtgaatgttcggaatgctcctccaattcagtccacaaggatgcctacaacatggagttattcgtgaatcagtgacagggccggaccatttggccgtgacgttgcagatgcggacttgctatggatttggtggtcttaagctgcaagaactggtggtagcacaagcggattaagctgcaggtgcttggtagcaaatattagaggtagagaatagtagcatattagctagcatgtagaaagctgttagctgtgcctgcagtcgtcacttgtgcaacttgtaattactgtattctcttgcgtgatgataattttctgtacatttgatggggaaatgatggtttggaaagagaagcaattgaaggagatgacatggtaatgtgtatgcaaatgtaacctgcctgattcccagttgcggtcatggctgaccgctgtggagatgctctcggcctggcca

SEQ ID NO: 51015 - DNA, 6835 bp, Zea Mays
attgatttggcctatggtggtgatgcctgcgtcaaggatgccaatgatcataacctcacccatgttgcccttgcaccacacgccatccctaacattgtcaagccatgatagctgcgaagaagccgacgcgtcgtcggaaataagcttgtagctcttgttcgggatgatctcgatgaactaggggaacctcgccacgtcatcgacctcctgccgtgtgagccacgccgagaacctgctcaccacatggctatacgagtagatgaggtgcgaccccaccatcgaaaaccgctctgcggtcaccgagtcgctagtgttgcacacctacttgaggaggtgtgtgtgcaagtgctcgagcgcctccagctcgtcgacaccaaccagaccatccgggcggtagacgacgatgaggtatgtagcgagcgggttgtcatggtcagacgcttgtcggatgggctaaatgaggtgagatgaacaaagaacgataaggagggtgaggtgataccagggtgtcatggttgcagcgagcgaggttttggtggagcttaaaaagagtagagacaaacgaaatacgcttttgtattacttcctccaacttcgtggagcctaaacttagtaaagctaggagtgtttcgtgttcatcttatgtggcatgaatttaaattgaaccctaattaattcaccaattgtttatcatattgtcgcagtattactgttttatgaaagtaatgtttgtaacttacaacagaacatgattactaggaatagacttctcctcaggactcagtccatgtctactaagactcatgagattcttatctctctcattttaaactccactatataaatggtgcaaaatagtgttttacgtgactatacacatgacctgctggtcatagcccgagtcaactaaactccagcgagctagggtctgtctaggctcgtccatgaggagagtggattgctagtaaggaaacaatagcctgtgttgaattgattcaaatagacaagtatatgcataggtaaaacaacactatctgttcacgtgggaaattgttaatactctagaaatgttgaaacaaacattatataaattccatttctttaaaacggatacaagttcatcccgaaaagtcatatttggttgtacttgtatccatctcaatcaatatatattgcaatggtttggagatgatggtttgagatttgcgatggatataaatgttgttaaataagagctgattgttggtcatctgttctcaattgatatgcacaataaaaatcaaggcaacataatgttaaaaagataatcaaccttcgtccttaaggagttatccctccttcgaagatgaaggttatgacttaattacctaaataagtaaggaatgtaaagaaattttaacataataattcatctttgatgtattaatatcatatttcttctttttcgtataatgaatttataatcgtaccttcggctctacagaatgagttagaacgaatgtgctctagagaaaagattacacacaacaattgttcagcccttcaaaaggaaatttatgcagggcactattcatctatttatacagaatcgtacagcttcatacaaaattacacttacactcacaaagattacacacatgagttacaaaaaatacaaggacaacattatcttttgctttcagtattcaggatgacaccttcttcttgcattgtctccctgtgttgctatgacgaatctagcttcgttgcccctccattgtcctgcatcgaaggtgctcgggtgccgaagctcctacaatacttggtaacatattgatagccaatgattaaacgtgtttttgaggaccttcaaaagacgaaggcccccaacattgattctaaatcaagccttagcaattagtaacatcaagtcatcttaaagactaatgtgtcattcaaccaacgatatatagggtatatttggatctcattcttattatgggactttgagttttaggcaatcaatataaaatttgaacattggattttaaaatgagacatgttagatctcattctcatagcaataattgtctttgtacagtagaagtctccaaataaatttatcgtagataactgatctaatatttcttacgcaacatcttatttttttaggagactcaaacaacgccacattagtttatgtttagcgttttattgtatgtttggttgcttgggctccataggcctaggtaggcacaagaagcatggatggggttagccttggtatgcctatttccttggcatgaattatgtacccttaggatagccttgtgaaaccaaagtatgtaaattacaaacttaggatcatgaatgctcaacatggtaagttgacaaattccaattggtttctaccttcacatgtctattggaatggtcaggatcaagggtgatgacaaagtttgtcagtcccatccagccccactgatacctcggaaaatatcgaagcattgctaatacttgctttatttaagtatttatatttgtgtaattatattcaagtattacattattagaattgacatgctagaataagattaaaacctagacgtaaaacttttgatcgtaacgtagaaaaacacttctaagcaaaaggggtgaagtgggctttttgctaagctttaatttacggggggggggatagacaagcccaattcatcctctcttggacatttagattctttcaacccaatataaatgtgggtagacccttctcatctaactaacacataagtgaaccttggatcagagtcaacaaccgcaaaaacaatttggttgtagtgtgtttctcccctaaagttatctccaccaacttactcatcttcatcttttatttcaaagtctactatataaacaatgcaatatacaacacaaaacaatgtttttgcacgaccatatggatgatctgctagccatagcctaagaaagcaaccttagaattaatagggacccttgtaaggacatgtgtcccatcaatagccccaatacggtcctagattatataactagaacattttaagttatttaatttacctaagaaagttaaggattatgggttaactacccaaccatgaaaagaggttaactaacatgtttgttggctagtgaggtcacaggactccgtgtaaaaagccacatgtggcttgggtacaaaactacaaacaagaccaacagagggaagaaaacaatatgagaggtagagcattttcatcaagctaatagtccacttttggattcgtcgtgtttggcttagatgcatgtgtagtcaaacatgtgagattcacattacactagtctgattgacctttaaccacacatgcaaacacacctttgacacacatgttttgtagattaccctgtttttagaattatttcgtttttccctatttatcttaggatcaatttggtagagcccgctccatgattttatagctctgagacttgaatctccatactccgctagagtgattttgagtgggtttttagcaagggtaaatctatctaacaaaaacaaagcgatttctaagggattagaccgaagtgtgaataaagtgatttctaacagaaagttgtaagaagatttatatataatagatatttcacttaggacatctgcaatggtcgtcttaaatacctagctgatagaagaataaaaatagtaatttatttcatcactagtatttggttccagacataatacattcagtttcttaaaatacttgaaatcttctcatatttttaactatgtagcaaagagattgaatctagctagtcattgggacacccttagcccataccataaggcatatcttttacggtggcggaaactcccttcatttctttcacctccgattcgattccttgtcccctcttgatccgagccgccaccaaaccctaactatctaaaccccccgtctcgctgtccgatggccgccgcctcgccgccgccctccccaccccacgcaaagcgccccaagatgtcctcctcctccgacccggaagccgatgctgagcccacctcggcctccgccgccgttgagggcgccgatcctgcgcagcgtcgtcccaggtacaagcgccgcaaggtcgccatccttctcgggtactgcggcgcggggtatcagggcatgcagaagaatccgggcgcgcgcaccatcgagggggacctcgaggaggcgctctaccaggcgggcgccgtgcccgaggccgaccggtccgcgccgcgccgttacgattgggcacgtgctgcgcgcaccgacaagggcgtcagcgccgcggcgcaggtggtgtccgggcgcttctacgtcgacccgccgggcttcatcgatcgcttgaacgcgcagctcgcgccgcagatccgcgcttacggctacgtgcgcgttaccaactcattcaacgcgaaaaagttctgcgaccgccggaggtacctgtatctgcttcccgtatttgctcttgaccccagcgcacacccggaccgcgaggccgtcatggcgagcatggggagtgggagcgagcttaccaagtgcctggagtgctccgagagaggcaggaagattcctggtgtcatgggccgggaggggaaactgcccagccccgggcagaatggtgttgatgctcccgtggagggaagtagccatgacgaatctggaacacttggggatgcaaaatgtgaccatacaagttcagatggtaataacccatttgcccatggggaagttggatcgaacagcaaggagaagcctgatttaccggtctctggtgatagaactgaagttgcaaatgcaaagatgggatcaaatggcgacggtgctgttgtatcatcagctgatgcagatatttatattgggaacgaggagaagaaacttgagcctgcagccactgaaaataaagctcaaggattctcaagtactatattgggacacacaatttccataacttcactacaagaaccaaagcagaggatcctgcagcaaaaagatttatcatttcctttgctgctgaccgtgttgtcagcctggatgggattgattttgtcaggtgtgaagttgttggacagagtttcatgctccatcagatccggaagatgattggtcttgctgtagctgtgatgaggaactgtgcacctgaatcaatttatgatgtcgcttttcgcaaggatgtcaatcttaatgtgcctactgcacctgaggtcggactgtacctagatgaatgtatgttcacatcatacaacaagaaatggaaggattcacatgaggcagtttccatggaaccttattctgaggaggccgaagagttcaagaaattatccagatttccgttacatggaaactgccgagcacaatcctggtgctgaagttgagagtattgctgctggtgcagagcccaaggttggagctgaagttgagaatactgaagaagtacagatgccaagcgacaatctaagtgagtaataaattttgccaaggggcatgcaaaactgaagaaaatatctgtttgtcgtgttactgagagggacctcaaacatttctaatgagatatcgtaatatagagaatgaaaactcatatgttctccaatggaatatgaacatcaagaggttaatgtgcatcactttatgccatcatgatccctatgttaatcttctgaaataagaacctataggtctatattagtcttatatctgaacttcattaattgcttccagacaattgtatgacaaatggcactcggaaatgtttcagcaatgtttttgtttgctgaaattattatgggattcactattttctcttatctacaatataggtttattttcttgcacttttttcttttcttttggtaatagctgtatatcacttagactgccatagtgcgtcaaatttcattgcagcataatatctattgatattgctagtacattttttgttgagcaaatgttggagccaaaggctgttccaggcatgccaaatattgtgagctttaagatacaaattcaacctgattagccctggtcctgctgatagttagctagggtaagtgcgatacagtggtagggagacaggtagcttattttcaagacagttgattttatctccaaattagtatcattaattgtctgtctggtgtttatttaaaagttagtattgattaaatactggatctatggctgcaagtcttgcggaaagttatacatttgaaagtgatgtattgtagcattttatcatttgttatgatgtcagaaagtgaactacatcagctttattcaaaaagaaattgttaaccttgaaagctaaattgtaatatgggacgggagaaaagaccaaatctgagctctataatccttgcttcatggtggtggattgttttggcaagatttccggagtcgatcttgtttaagttttcccccttctgggcttaagtcaggaggttatctgacatccgccaaatgtttttacatgttttattagttcatggtctgccttgataaagatcctcaagatcctcgtagttgcgcttaggctgttcacaatagactgtgtaaaataggggattaatattacactgaagtttgaaatagaggacgtaataggagcaggtttaccttcccgtttggaaaacaatggatttcaccatttttcctcgatttctctactttcggtcaggttttaactagattttgattcaaaatacaaaatacagaagtcaaattttggtaaaaaaacgaaattcgaatcttccaaacgaaattgtgaactctgaataggagatatgtgtttacagggatgtgatatgatagcttaggct

SEQ ID NO: 51016 - DNA, 2210 bp, Zea Mays
tgaagttgcaaatgcaaagatgggatcaaatggcgacggtgctgttgtatcatcagttcagctgatgcagatatttatattgggaacgaggagaagaaacttgagcctgcagccactgaaaataaagctcaaggtatggaatctgagaagatcaatggagaagagaaactgccaactaagagtaccttttcttacactgatgaagtgaaggagaggttcaacaggattctcaagtactatattgggacacacaatttccataacttcactacaagaaccaaagcagaggatcctgcagcaaaaagatttatcatttcctttgctgctgaccgtgttgtcagcctggatgggattgattttgtcaggtgtgaagttgttggacagagtttcatgctccatcagatccggaagatgattggtcttgctgtagctgtgatgaggaactgtgcacctgaatcaatttatgatgtcgcttttcgcaaggatgtcaatcttaatgtgcctactgcacctgaggtcggactgtacctagatgaatgtatgttcacatcatacaacaagaaatggaaggattcacatgaggcagtttccatggaaccttattctgaggaggccgaagagttcaaggtcaagtatattttcactcatattgcggcgatggaacacaaggagggagctgtagctttgtggttgcattcattgaaccacagaaattatccagatttccgttacatggaaactgccgagcacaatcctggtgctgaagttgagagtattgctgctggtgcagagcccaaggttggagctgaagttgagaatactgaagaagtacagatgccaagcgacaatctaagtgagtaataaattttgccaaggggcatgcaaaactgaagaaaatatctgtttgtcgtgttactgagagggacctcaaacatttctaatgagatatcgtaatatagagaatgaaaactcatatgttctccaatggaatatgaacatcaagaggttaatgtgcatcactttatgccatcatgatccctatgttaatcttctgaaataagaacctataggtctatattagtcttatatctgaacttcattaattgcttccagacaattgtatgacaaatggcactcggaaatgtttcagcaatgtttttgtttgctgaaattattatgggattcactattttctcttatctacaatataggtttattttcttgcacttttttcttttcttttggtaatagctgtatatcacttagactgccatagtgcgtcaaatttcattgcagcataatatctattgatattgctagtacattttttgttgagcaaatgttggagccaaaggctgttccaggcatgccaaatattgtgagctttaagatacaaattcaacctgattagccctggtcctgctgatagttagctagggtaagtgcgatacagtggtagggagacaggtagcttattttcaagacagttgattttatctccaaattagtatcattaattgtctgtctggtgtttatttaaaagttagtattgattaaatactggatctatggctgcaagtcttgcggaaagttatacatttgaaagtgatgtattgtagcattttatcatttgttatgatgtcagaaagtgaactacatcagctttattcaaaaagaaattgttaaccttgaaagctaaattgtaatatgggacgggagaaaagaccaaatctgagctctataatccttgcttcatggtggtggattgttttggcaagatttccggagtcgatcttgtttaagttttcccccttctgggcttaagtcaggaggttatctgacatccgccaaatgtttttacatgttttattagttcatggtctgccttgataaagatcctcaagatcctcgtagttgcgcttaggctgttcacaatagactgtgtaaaataggggattaatattacactgaagtttgaaatagaggacgtaataggagcaggtttaccttcccgtttggaaaacaatggatttcaccatttttcctcgatttctctactttcggtcaggttttaactagattttgattcaaaatacaaaatacagaagtcaaattttggtaaaaaaacgaaattcgaatcttccaaacgaaattgtgaactctgaataggagatatgtgtttacagggatgtgatatgatagcttaggct

SEQ ID NO: 51017 - DNA, 1032 bp, Zea Mays
ccactccattagctctataaatagcgcaccctgcaaagcagcacatacattacactgaagcaagagcagctgctgtggcctgtgggttcgtgggcaagcaagcagtagtagtcatgcgtgcttatcaaaggggcgcttactgaagagttccttggcattctgtccacctcctctcgccgatcttgcagaaagtttaccagttctgttgcattttttttggaggtgggcatactgccaatggagctgtgtaggcctccctttgtaaagcccacatgacataaatacgagctatacgttggatttgatcatcgcctgtgtcagaaacgccttcattaagctttgtttgctgccttttcttgcgtgtccatttgatgggccttttggtgtcgatcgaggtgccccggccgattcttcttgttttctttgctggggttaaggttcatcatggtcatggcccgtgatatgctttgggggcaaagttttgggggaaagcttttttaggctagctcttagctacatatggtaatctgatccgctctatttccagactaatctcgtctgcttcgaggccgcgcggccatggttttgaccttttgggtgaagacaaaagattacccctctccccgcttcctcgtgcccttcttacggatccaccatttttttttttgcgcgctgccaagttcttcggaagattaaccccgcagtttaggctttctttctgatttcgcatgcaggcggcaggcctgttcctggatctctgaagagattcatctgcagatcatgaggccaggggccagtgttgagaagacagaagcacactaacctcatgactcctcctgaggcccaatgccagctgtaccgtctgtgatactgaccgagtgggagctttttgtgttggtctaaggaactactagtagtatggcagtccaaagcctgctcctccttccactcgtctggtagactggtagcttcctcggatgaagatgatggttcggtgtttcgtttgtagtctagttgaatgtactctagatt

SEQ ID NO: 51018 - DNA, 1159 bp, Zea Mays
atacattacactgaagcaagagcagctgctgtggcctgtgggttcgtgggcaagcaagcagtagtagtcatgcgtgcttatcaaaggggcgcttactgaagagttccttggcattctgtccacctcctctcgccgatcttgcagaaagtttaccagttctgttgcattttttttggaggtgggcatactgccaatggagctgtgtaggcctccctttgtaaagcccacatgacataaatacgagctatacgttggatttgatcatcgcctgtgtcagaaacgccttcattaagctttgtttgctgccttttcttgcgtgtccatttgatgggccttttggtgtcgatcgaggtgccccggccgattcttcttgttttctttgctggggttaaggttcatcatggtcatggcccgtgatatgctttgggggcaaagttttgggggaaagcttttttaggctagctcttagctacatatggtaatctgatccgctctatttccagactaatctcgtctgcttcgaggccgcgcggccatggttttgaccttttgggtgaagacaaaagattacccctctccccgcttcctcgtgcccttcttacggatccaccatttttttttttgcgcgctgccaagttcttcggaagattaaccccgcagtttaggctttctttctgatttcgcatgcaggcggcaggcctgttcctggatctctgaagagattcatctgcagatcatgaggccaggggccagtgttgagaagacagaagcacactatagctctgccttccaattaaggaaaaaaaatagagtgtacaaggttgagagcctagccaagctctcaagtcacccttacagacaaggaggaagccccctagggagatccctaactcattcttacagaagcggtttcacccctatagagagagaagatccttattaacactccccacattaattgttcatatgacgttgaatcgtcgatattctatgtatagactgaaggattagcatgatgttttcatgcattggctatattattgaaggttggagtatctagtgtatgctaacaatctccagttcagtatgtgtctgaaagccatgtccatatgttcactatctggattattagtttatggactcaagaagtaaaaggttg

SEQ ID NO: 51019 - DNA, 1641 bp, Zea Mays
aacaaatccagcccaagtcgcggccttgtctgccccactcacacttccagatgggccccatccacctcgatgaaacaaaagtatgttctgtctgccaggtaggtcccgccggaacggatcccctgcttcttctaccgaaatcgttgcttccgacgcaccagggccgcgcgccgccggcgaccttgccgtggcccttctacaaaaccgacccgcgccggagctccgccgtcggatgtggcggagacggcgtcaatggcgtcctcctctgctgccgagtccagctcccgcctctctgatcgagcgaggaggtcggcgctgggactcagattcatggtgctcctgatgcacgtgctgttcgttggcgctgtcttcatcctcgatccgaccctcgactggcgaatccacggggagccgtggtatatagggttgtatggagtgcttgttctgctcacgctagtgcaatacttctatacagctggctcatgtccagggtatgttattgatgtaatgagagctggttccatgatgcatgcaaccttcgtcaacactgctgctctttcaaatcaaattcaagaaatggaaacataaattctccgacgagtcgtgctcaactacagaaacttagcacgatgactcctacatcttcatgggcacagatggttatggatctttatcctccagggtcaagcagcagggattggacttgcacttactgcaggattgttcaggtggtacatatttgaagaaacaatcttgtgtatctggactgctgctctctgcatcgagtcattgtgtttagatgtggacaaggcctggtggaaggactttgttggtgttatcctgttggcagcgcttatccttatcctgatattcctactactattgtggttatttcattcgtacattgctctaacaaatcaaacaacctacgaaattgccagaaggaagcgaatattctacctaaggggagtccctgaaagagttcttccattcagcaaaggcatatgcagaaatctctacgatttctgctgttctagccagaagggatatattctggaagctgtgcccccaagtgaagagctggaagctagagctgcccgttacacgtgccgagatgtcatttgctgtcgttgctgctgataggttgtaccatagcattctgcccgtatagcccagttgcgctgttctctgttcaaggttaagttaatggaagcaaattttagtgacctgcgaccgttagatgcccccagagttcattatttgtgcatagtcatttgtacatttcactcagaaaaatgtgcgctctgagatccagttgttcacattctgtatggctttgaattcaaataggttttcaggacagagaactgatctgtacttcagttttttagtcgaaatgtgtgttggtaatttattttaagattttcttatatttattcctagccatatattttatatttatttatcttgagggcttgtgttgtaacacccactttgtaattgctaggaataataccagtagaggaacaatttctctttatgagagttggatctttatgcatcatcttatgtgaacatcatgcccaaaacaattaataaaaaaacatatgctaccaaattatgcatcatgctcgattttat

SEQ ID NO: 51020 - DNA, 1606 bp, Zea Mays
cacacttccagatgggccccatccacctcgatgaaacaaaagtatgttctgtctgccaggtaggtcccgccggaacggatcccctgcttcttctaccgaaatcgttgcttccgacgcaccagggccgcgcgccgccggcgaccttgccgtggcccttctacaaaaccgacccgcgccggagctccgccgtcggatgtggcggagacggcgtcaatggcgtcctcctctgctgccgagtccagctcccgcctctctgatcgagcgaggaggtcggcgctgggactcagattcatggtgctcctgatgcacgtgctgttcgttggcgctgtcttcatcctcgatccgaccctcgactggcgaatccacggggagccgtggtatatagggttgtatggagtgcttgttctgctcacgctagtgcaatacttctatacagctggctcatgtccagggtatgttattgatgtaatgagagctggttccatgatgcatgcaaccttcgtcaacactgctgctctttcaaagcagtcaaattcaagaaatggaaacataaattctccgacgagtcgtgctcaactacagaaacttagcacgatgactcctacatcttcatgggcacagatggttatggatctttatcctccagggtcaagcagcagggattggacttgcacttactgcaggattgttcaggtggtacatatttgaagaaacaatcttgtgtatctggactgctgctctctgcatcgagtcattgtgtttagatgtggacaaggcctggtggaaggactttgttggtgttatcctgttggcagcgcttatccttatcctgatattcctactactattgtggttatttcattcgtacattgctctaacaaatcaaacaacctacgaaattgccagaaggaagcgaatattctacctaaggggagtccctgaaagagttcttccattcagcaaaggcatatgcagaaatctctacgatttctgctgttctagccagaagggatatattctggaagctgtgcccccaagtgaagagctggaagctagagctgcccgttacacgtgccgagatgtcatttgctgtcgttgctgctgataggttgtaccatagcattctgcccgtatagcccagttgcgctgttctctgttcaaggttaagttaatggaagcaaattttagtgacctgcgaccgttagatgcccccagagttcattatttgtgcatagtcatttgtacatttcactcagaaaaatgtgcgctctgagatccagttgttcacattctgtatggctttgaattcaaataggttttcaggacagagaactgatctgtacttcagttttttagtcgaaatgtgtgttggtaatttattttaagattttcttatatttattcctagccatatattttatatttatttatcttgagggcttgtgttgtaacacccactttgtaattgctaggaataataccagtagaggaacaatttctctttatgagagttggatctttatgcatcatcttatgtgaacatcatgcccaaaacaattaataaaaaaacatatgctaccaaattatgcatcatgctcgattttat

SEQ ID NO: 51021 - DNA, 2943 bp, Zea Mays
ccccatccacctcgatgaaacaaaagtatgttctgtctgccaggtaggtcccgccggaacggatcccctgcttcttctaccgaaatcgttgcttccgacgcaccagggccgcgcgccgccggcgaccttgccgtggcccttctacaaaaccgacccgcgccggagctccgccgtcggatgtggcggagacggcgtcaatggcgtcctcctctgctgccgagtccagctcccgcctctctgatcgagcgaggaggtcggcgctgggactcagattcatggtgctcctgatgcacgtgctgttcgttggcgctgtcttcatcctcgatccgaccctcgactggcgaatccacggggagccgtggtatatagggttgtatggagtgcttgttctgctcacgctagtgcaatacttctatacagctggctcatgtccagggtatgttattgatgtaatgagagctggttccatgatgcatgcaaccttcgtcaacactgctgctctttcaaatcaaattcaagaaatggaaacataaattctccgacgagtcgtgctcaactacagaaacttagcacgatgactcctacatcttcatgggcacagatggttatggatctttatcctccagggtcaagcagcagggattggacttgcacttactgcaggattgttcaggtattcttgtatcctcacgcgctaaatgttctctaagttttacaagtaagtaggaattaatatagttttgttatacaaaaattgagttggttgcatgagttattaactttgagttatgcaccaccaatttgtttgactaaaatttaagaataatatacattcaatacatccttcaaaatttaccaagtctgttaaaaaaactatgtaaaagtctgaaatgaatttgtggtatgtttgattatatttgtcagtgtagttaaagttactagaagatttgctcttcacatccttgattggctagtggtttatttaccagtttgtgacattcaaagattcgtttctgatcatgaaggttatttgtgcattaagaatcttctaaaacttaatacattgattggttgatgagtaactgattcgcaatgcagcgggcacaggacctctctcttagaaaagtaaacttatgctatcttatttgctcagaattgttcctccaaaatctcatggtttcatgctaatttcatctattatgtctttagaaagtttcccataccttgttgcttctgatagtcagagttaaagttttgctaccaacatctttttgcagccacctcgcacccgacactgccatgactgtgataaatgtgtccttcaatttgatcatcactgtatatggcttggaacatgcattggcaaaaggaaccattgtcgttttttgtgagcttttaatgtgttttcacctatatgttccattcacttgcacgtcagttgtggtgtgatgtgttataaactcactgtttgcgtacacagccgtttaacccacgtacacagcggttatttgtgtaaatgctacagtggcttattgtgtccatttaatcagccatttataccgtttagcccaattaaatagccaaaaaggttgtgactgtttagtcatttaaatgtttaggctaacactgtataaactaccatacttgttgcggaaacactatagttatttctttgattcggacactgataaactttctttggagtatctatagatgttttccagagttgtagttttgtgactgaaagtacatattgatcagaccaatgttatcgagtatttacattgtgcaccattaaacagatagaacataaatgccactgagtatttcagaaccaacacccctcctcttgtaatataatgatttaccttatttattgacataacataactactgcttctactactttattgtgaattgtgattacacattgagacttccatgttgtctctcgccatgctgtacgattgcagtatgatactattgttttaatctcttggttcttatggttgtataaccgcctttactaggtggtacatatttgaagaaacaatcttgtgtatctggactgctgctctctgcatcgagtcattgtgtttagatgtggacaaggcctggtggaaggactttgttggtgttatcctgttggcagcgcttatccttatcctgatattcctactactattgtggttatttcattcgtacattgctctaacaaatcaaacaacctacgaaattgccagaaggaagcgaatattctacctaaggggagtccctgaaagagttcttccattcagcaaaggcatatgcagaaatctctacgatttctgctgttctagccagaagggatatattctggaagctgtgcccccaagtgaagagctggaagctagagctgcccgttacacgtgccgagatgtcatttgctgtcgttgctgctgataggttgtaccatagcattctgcccgtatagcccagttgcgctgttctctgttcaaggttaagttaatggaagcaaattttagtgacctgcgaccgttagatgcccccagagttcattatttgtgcatagtcatttgtacatttcactcagaaaaatgtgcgctctgagatccagttgttcacattctgtatggctttgaattcaaataggttttcaggacagagaactgatctgtacttcagttttttagtcgaaatgtgtgttggtaatttattttaagattttcttatatttattcctagccatatattttatatttatttatcttgagggcttgtgttgtaacacccactttgtaattgctaggaataataccagtagaggaacaatttctctttatgagagttggatctttatgcatcatcttatgtgaacatcatgcccaaaacaattaataaaaaaacatatgctaccaaattatgcatcatgctcgattttat

SEQ ID NO: 51022 - DNA, 2931 bp, Zea Mays
gaaacaaaagtatgttctgtctgccaggtaggtcccgccggaacggatcccctgcttcttctaccgaaatcgttgcttccgacgcaccagggccgcgcgccgccggcgaccttgccgtggcccttctacaaaaccgacccgcgccggagctccgccgtcggatgtggcggagacggcgtcaatggcgtcctcctctgctgccgagtccagctcccgcctctctgatcgagcgaggaggtcggcgctgggactcagattcatggtgctcctgatgcacgtgctgttcgttggcgctgtcttcatcctcgatccgaccctcgactggcgaatccacggggagccgtggtatatagggttgtatggagtgcttgttctgctcacgctagtgcaatacttctatacagctggctcatgtccagggtatgttattgatgtaatgagagctggttccatgatgcatgcaaccttcgtcaacactgctgctctttcaaagcagtcaaattcaagaaatggaaacataaattctccgacgagtcgtgctcaactacagaaacttagcacgatgactcctacatcttcatgggcacagatggttatggatctttatcctccagggtcaagcagcagggattggacttgcacttactgcaggattgttcaggtattcttgtatcctcacgcgctaaatgttctctaagttttacaagtaagtaggaattaatatagttttgttatacaaaaattgagttggttgcatgagttattaactttgagttatgcaccaccaatttgtttgactaaaatttaagaataatatacattcaatacatccttcaaaatttaccaagtctgttaaaaaaactatgtaaaagtctgaaatgaatttgtggtatgtttgattatatttgtcagtgtagttaaagttactagaagatttgctcttcacatccttgattggctagtggtttatttaccagtttgtgacattcaaagattcgtttctgatcatgaaggttatttgtgcattaagaatcttctaaaacttaatacattgattggttgatgagtaactgattcgcaatgcagcgggcacaggacctctctcttagaaaagtaaacttatgctatcttatttgctcagaattgttcctccaaaatctcatggtttcatgctaatttcatctattatgtctttagaaagtttcccataccttgttgcttctgatagtcagagttaaagttttgctaccaacatctttttgcagccacctcgcacccgacactgccatgactgtgataaatgtgtccttcaatttgatcatcactgtatatggcttggaacatgcattggcaaaaggaaccattgtcgttttttgtgagcttttaatgtgttttcacctatatgttccattcacttgcacgtcagttgtggtgtgatgtgttataaactcactgtttgcgtacacagccgtttaacccacgtacacagcggttatttgtgtaaatgctacagtggcttattgtgtccatttaatcagccatttataccgtttagcccaattaaatagccaaaaaggttgtgactgtttagtcatttaaatgtttaggctaacactgtataaactaccatacttgttgcggaaacactatagttatttctttgattcggacactgataaactttctttggagtatctatagatgttttccagagttgtagttttgtgactgaaagtacatattgatcagaccaatgttatcgagtatttacattgtgcaccattaaacagatagaacataaatgccactgagtatttcagaaccaacacccctcctcttgtaatataatgatttaccttatttattgacataacataactactgcttctactactttattgtgaattgtgattacacattgagacttccatgttgtctctcgccatgctgtacgattgcagtatgatactattgttttaatctcttggttcttatggttgtataaccgcctttactaggtggtacatatttgaagaaacaatcttgtgtatctggactgctgctctctgcatcgagtcattgtgtttagatgtggacaaggcctggtggaaggactttgttggtgttatcctgttggcagcgcttatccttatcctgatattcctactactattgtggttatttcattcgtacattgctctaacaaatcaaacaacctacgaaattgccagaaggaagcgaatattctacctaaggggagtccctgaaagagttcttccattcagcaaaggcatatgcagaaatctctacgatttctgctgttctagccagaagggatatattctggaagctgtgcccccaagtgaagagctggaagctagagctgcccgttacacgtgccgagatgtcatttgctgtcgttgctgctgataggttgtaccatagcattctgcccgtatagcccagttgcgctgttctctgttcaaggttaagttaatggaagcaaattttagtgacctgcgaccgttagatgcccccagagttcattatttgtgcatagtcatttgtacatttcactcagaaaaatgtgcgctctgagatccagttgttcacattctgtatggctttgaattcaaataggttttcaggacagagaactgatctgtacttcagttttttagtcgaaatgtgtgttggtaatttattttaagattttcttatatttattcctagccatatattttatatttatttatcttgagggcttgtgttgtaacacccactttgtaattgctaggaataataccagtagaggaacaatttctctttatgagagttggatctttatgcatcatcttatgtgaacatcatgcccaaaacaattaataaaaaaacatatgctaccaaattatgcatcatgctcgattttat

SEQ ID NO: 51023 - DNA, 2323 bp, Zea Mays
gaaacaaaagtatgttctgtctgccaggtaggtcccgccggaacggatcccctgcttcttctaccgaaatcgttgcttccgacgcaccagggccgcgcgccgccggcgaccttgccgtggcccttctacaaaaccgacccgcgccggagctccgccgtcggatgtggcggagacggcgtcaatggcgtcctcctctgctgccgagtccagctcccgcctctctgatcgagcgaggaggtcggcgctgggactcagattcatggtgctcctgatgcacgtgctgttcgttggcgctgtcttcatcctcgatccgaccctcgactggcgaatccacggggagccgtggtatatagggttgtatggagtgcttgttctgctcacgctagtgcaatacttctatacagctggctcatgtccagggtatgttattgatgtaatgagagctggttccatgatgcatgcaaccttcgtcaacactgctgctctttcaaatcaaattcaagaaatggaaacataaattctccgacgagtcgtgctcaactacagaaacttagcacgatgactcctacatcttcatgggcacagatggttatggatctttatcctccagggtcaagcagcagggattggacttgcacttactgcaggattgttcagccacctcgcacccgacactgccatgactgtgataaatgtgtccttcaatttgatcatcactgtatatggcttggaacatgcattggcaaaaggaaccattgtcgttttttgtgagcttttaatgtgttttcacctatatgttccattcacttgcacgtcagttgtggtgtgatgtgttataaactcactgtttgcgtacacagccgtttaacccacgtacacagcggttatttgtgtaaatgctacagtggcttattgtgtccatttaatcagccatttataccgtttagcccaattaaatagccaaaaaggttgtgactgtttagtcatttaaatgtttaggctaacactgtataaactaccatacttgttgcggaaacactatagttatttctttgattcggacactgataaactttctttggagtatctatagatgttttccagagttgtagttttgtgactgaaagtacatattgatcagaccaatgttatcgagtatttacattgtgcaccattaaacagatagaacataaatgccactgagtatttcagaaccaacacccctcctcttgtaatataatgatttaccttatttattgacataacataactactgcttctactactttattgtgaattgtgattacacattgagacttccatgttgtctctcgccatgctgtacgattgcagtatgatactattgttttaatctcttggttcttatggttgtataaccgcctttactaggtggtacatatttgaagaaacaatcttgtgtatctggactgctgctctctgcatcgagtcattgtgtttagatgtggacaaggcctggtggaaggactttgttggtgttatcctgttggcagcgcttatccttatcctgatattcctactactattgtggttatttcattcgtacattgctctaacaaatcaaacaacctacgaaattgccagaaggaagcgaatattctacctaaggggagtccctgaaagagttcttccattcagcaaaggcatatgcagaaatctctacgatttctgctgttctagccagaagggatatattctggaagctgtgcccccaagtgaagagctggaagctagagctgcccgttacacgtgccgagatgtcatttgctgtcgttgctgctgataggttgtaccatagcattctgcccgtatagcccagttgcgctgttctctgttcaaggttaagttaatggaagcaaattttagtgacctgcgaccgttagatgcccccagagttcattatttgtgcatagtcatttgtacatttcactcagaaaaatgtgcgctctgagatccagttgttcacattctgtatggctttgaattcaaataggttttcaggacagagaactgatctgtacttcagttttttagtcgaaatgtgtgttggtaatttattttaagattttcttatatttattcctagccatatattttatatttatttatcttgagggcttgtgttgtaacacccactttgtaattgctaggaataataccagtagaggaacaatttctctttatgagagttggatctttatgcatcatcttatgtgaacatcatgcccaaaacaattaataaaaaaacatatgctaccaaattatgcatcatgctcgattttat

SEQ ID NO: 51024 - DNA, 1079 bp, Zea Mays
gtcaaattcaagaaatggaaacataaattctccgacgagtcgtgctcaactacagaaacttagcacgatgactcctacatcttcatgggcacagatggttatggatctttatcctccagggtcaagcagcagggattggacttgcacttactgcaggattgttcaggtggtacatatttgaagaaacaatcttgtgtatctggactgctgctctctgcatcgagtcattgtgtttagatgtggacaaggcctggtggaaggactttgttggtgttatcctgttggcagcgcttatccttatcctgatattcctactactattgtggttatttcattcgtacattgctctaacaaatcaaacaacctacgaaattgccagaaggaagcgaatattctacctaaggggagtccctgaaagagttcttccattcagcaaaggcatatgcagaaatctctacgatttctgctgttctagccagaagggatatattctggaagctgtgcccccaagtgaagagctggaagctagagctgcccgttacacgtgccgagatgtcatttgctgtcgttgctgctgataggttgtaccatagcattctgcccgtatagcccagttgcgctgttctctgttcaaggttaagttaatggaagcaaattttagtgacctgcgaccgttagatgcccccagagttcattatttgtgcatagtcatttgtacatttcactcagaaaaatgtgcgctctgagatccagttgttcacattctgtatggctttgaattcaaataggttttcaggacagagaactgatctgtacttcagttttttagtcgaaatgtgtgttggtaatttattttaagattttcttatatttattcctagccatatattttatatttatttatcttgagggcttgtgttgtaacacccactttgtaattgctaggaataataccagtagaggaacaatttctctttatgagagttggatctttatgcatcatcttatgtgaacatcatgcccaaaacaattaataaaaaaacatatgctaccaaattatgcatcatgctcgattttat

SEQ ID NO: 51025 - DNA, 3388 bp, Zea Mays
gctggcctgttcgctcctcctcggctcctctctcgcgagctcgcgtccgtccaagcacaagcggacaaaggaaagggagggttaaagaggaagggcggccttagacaacagctcttcttcccatcctcgcctcccttcacgttccccgcactcgctggaggagacgagaggggcagagagagagaccaagaccatcgtcgtcccactccaccccctgtttcgtttcgtgatttcgtctgtttcactccattccctcacccacccaccccgcaacccaacaagcgccgcctgccacaacaagcctggaaaaaagagagagagaggggctcagggccgctcgacgacgcgagtgcaaacaaacccaagagaagattctcccatcaacaacaccccggcggcgcacgatccgtctgtctgcagtgcagcccacgcgccgcatccgccgcgttataatcatccccagcagtccaccccggcaccgtttcgctctcgctcactcccggcgtcagcgtctcccttcaccgcagacccacaaccacggcgtgcctgcccaagcccttggccgagcgccatgccgcgcagcgccggcgccgcgagggtctgagcgaagctttcggcctagcgtttccgggttgagccagccagccagccaggcgatcgatggggtgcaaagggtccaagctggacgaccaggaggccgtggcgctgtgccggggccgcgccgacctgctcgcggcggccgtgcgccaccgctacgcgctcgccgacgcgcacggcgcgctggcggactcgctcgcgtccgtcgccgcggcgctccacctcctcatgaccgccccgggccagccgcgcctcgcgctccccgccgcgcgcaaggccgcggacgtggacgcgccgcccgccgccgccgccgcctccgcctcgccgccgcactcctcgtcgcacatcaacttcgcgccgtcctccgactccgactccggctccgtcacctcctcgcccccgcgccgcctcgccgccggctacgaccacctctcccaccaccacccgctcccgttcccgcactacggctacggctacgcgcccgagcccccctacggtgggtacccgccgccgggatcgctgcgcctctactacgcgcgtagccgcccgcccccggcctcggtcgccatcgagcagcgcgccccgccgtcggagcgcgtgtaccacgggtccgtcgaaccggcgggtgggcacccgcagtactactcgtacgggggcgagcccgcaggcagggcggccgcgccgccgcccccgtccccgccgaggaccacctcgtgggacttcttcaatgtgttcgccgactacgacgtgtacgacaactactgctacgacgacgccggcggcgtcggggccacgtcggcggcgtacacgccgagcaggagctcgcgagaggtgcgggaggaagagggcatcccagacctcgaggaggaggacgccgtcgtcaagcaggtggccggcgagttctcggcgcccgggagtggcgcacgcagccggcgcagctcgatcggcggcgtcagcagcggcattgcccaagtcgaccaagaggacagttctgtcgtcgataagcaagtcattggcgggggtaacgtggcgccggcgcaacgtaacactgcatcctctgcgcccacaccccgtaggcccgtcgacactacagacgttgccggggagatcaaggcgcagttcgttcgagctgcagacgctgtcagggcactttcaccacttcttgagatcgggaggcggaggtaccaccaccgaagctcagtgtaccatgtttcatcaagcatggtgtcagcgattgccttgccgcattcggacgttggaggcatcgaactcctggacgttggaagtgagaaggtgttgggaggaagaagcctgtgttcgacactggagaagctctatgtctgggagaagaaattgtatgatgaggttaaggctgaagagaaaatgcgtctgctgcttacaaagaatgcaaagcggctgaagtacttggatctgaaaggtgcagaagctcagaagatcgatccgatccgaaatatggtcaggaagttgtcaacaaaattaagaatatctgtaagagtaattaccaaggtctccaaaaagataaacagagtaagggacgaagaattgtggccacaaattaatgccttaatccaagggtttgtaagaatgtggcgagacaagttggactgctaccagatacagtgtcaaatgatctcagaggcaaaaaatctggattcaattgttcctcatggaaacaatcgagacttggcattagagcttgaactagagatgatgaaatggattgtcaatttttcctcctgggtgaacgaacagaggagcttcgtcaaggcgctgaacggatggctatcactttgtcttgactacaaagttgacgagacagtcgacggagttcctccttattcacctggaagggtgggtgctccccttgtgtttgtcatctgcaacagctggtctcaagccatggatcggttctccgagaaggaagtggttacctcgatgcaagctcttgtgtccagtgtgcgcaagctgttggataaacagaatgtggagcaaatggagcagacgatcgctacacgggaaagggaaaaatggaacaaaatactggaaaagaaaactgtggagatcaacaaggaggcagatgtgttgaacaggaagttggccctgataccaggtcggcacagccggcttccaagcgcgcaaacataccaggaacatcttcttgacgcaagcagtttgcagagtagcttgcaccgtgtcgtccaagccctagaaagcttcacctccaattcgctgcaagcattcgagcagaccctgagacatgccgaagaggaaaggtcgtccagggagagcgccaaagtttcatagtgaacaagaatgtagcactatgagcatgttcttactgggaggcatcgacgccgaacatactgggcaaatgctgctcacatagaatttttggtggacaaatcctaactactgtgtttaactgaccaaggctcgtttagggctttaggcgaaggtcccatcggcgtccgtcagcgtagatatatgtagcagcaatttttttataggagaagtgcccttttcggtggtggtatgcttacgaggcgcatcgagttttgtttcattgtgtcgctatggaatgccgtttgttaaggccatgtttgctatagttttaccaacagatccagatttatttttttcctaagcgttttcatctccgccaaccctagaccaaattggtggagatttgccgtcaaatccaaatttaatgtaattaagaacaaaatactcgccatgccactcgttatagataaaaatatttttattgcat

SEQ ID NO: 51026 - DNA, 1463 bp, Zea Mays
atcatttttatagccttatcttctgtagcagttgaatcctaaggctgaagagaaaatgcgtctgctgcttacaaagaatgcaaagcggctgaagtacttggatctgaaaggtgcagaagctcagaagatcgatccgatccgaaatatggtcaggaagttgtcaacaaaattaagaatatctgtaagagtaattaccaaggtctccaaaaagataaacagagtaagggacgaagaattgtggccacaaattaatgccttaatccaagggtttgtaagaatgtggcgagacaagttggactgctaccagatacagtgtcaaatgatctcagaggcaaaaaatctggattcaattgttcctcatggaaacaatcgagacttggcattagagcttgaactagagatgatgaaatggattgtcaatttttcctcctgggtgaacgaacagaggagcttcgtcaaggcgctgaacggatggctatcactttgtcttgactacaaagttgacgagacagtcgacggagttcctccttattcacctggaagggtgggtgctccccttgtgtttgtcatctgcaacagctggtctcaagccatggatcggttctccgagaaggaagtggttacctcgatgcaagctcttgtgtccagtgtgcgcaagctgttggataaacagaatgtggagcaaatggagcagacgatcgctacacgggaaagggaaaaatggaacaaaatactggaaaagaaaactgtggagatcaacaaggaggcagatgtgttgaacaggaagttggccctgataccaggtcggcacagccggcttccaagcgcgcaaacataccaggaacatcttcttgacgcaagcagtttgcagagtagcttgcaccgtgtcgtccaagccctagaaagcttcacctccaattcgctgcaagcattcgagcagaccctgagacatgccgaagaggaaaggtcgtccagggagagcgccaaagtttcatagtgaacaagaatgtagcactatgagcatgttcttactgggaggcatcgacgccgaacatactgggcaaatgctgctcacatagaatttttggtggacaaatcctaactactgtgtttaactgaccaaggctcgtttagggctttaggcgaaggtcccatcggcgtccgtcagcgtagatatatgtagcagcaatttttttataggagaagtgcccttttcggtggtggtatgcttacgaggcgcatcgagttttgtttcattgtgtcgctatggaatgccgtttgttaaggccatgtttgctatagttttaccaacagatccagatttatttttttcctaagcgttttcatctccgccaaccctagaccaaattggtggagatttgccgtcaaatccaaatttaatgtaattaagaacaaaatactcgccatgccactcgttatagataaaaatatttttattgcat

SEQ ID NO: 51027 - DNA, 1455 bp, Zea Mays
gttttcttatggtggatttgtttgtaactttataagctgaagagaaaatgcgtctgctgcttacaaagaatgcaaagcggctgaagtacttggatctgaaaggtgcagaagctcagaagatcgatccgatccgaaatatggtcaggaagttgtcaacaaaattaagaatatctgtaagagtaattaccaaggtctccaaaaagataaacagagtaagggacgaagaattgtggccacaaattaatgccttaatccaagggtttgtaagaatgtggcgagacaagttggactgctaccagatacagtgtcaaatgatctcagaggcaaaaaatctggattcaattgttcctcatggaaacaatcgagacttggcattagagcttgaactagagatgatgaaatggattgtcaatttttcctcctgggtgaacgaacagaggagcttcgtcaaggcgctgaacggatggctatcactttgtcttgactacaaagttgacgagacagtcgacggagttcctccttattcacctggaagggtgggtgctccccttgtgtttgtcatctgcaacagctggtctcaagccatggatcggttctccgagaaggaagtggttacctcgatgcaagctcttgtgtccagtgtgcgcaagctgttggataaacagaatgtggagcaaatggagcagacgatcgctacacgggaaagggaaaaatggaacaaaatactggaaaagaaaactgtggagatcaacaaggaggcagatgtgttgaacaggaagttggccctgataccaggtcggcacagccggcttccaagcgcgcaaacataccaggaacatcttcttgacgcaagcagtttgcagagtagcttgcaccgtgtcgtccaagccctagaaagcttcacctccaattcgctgcaagcattcgagcagaccctgagacatgccgaagaggaaaggtcgtccagggagagcgccaaagtttcatagtgaacaagaatgtagcactatgagcatgttcttactgggaggcatcgacgccgaacatactgggcaaatgctgctcacatagaatttttggtggacaaatcctaactactgtgtttaactgaccaaggctcgtttagggctttaggcgaaggtcccatcggcgtccgtcagcgtagatatatgtagcagcaatttttttataggagaagtgcccttttcggtggtggtatgcttacgaggcgcatcgagttttgtttcattgtgtcgctatggaatgccgtttgttaaggccatgtttgctatagttttaccaacagatccagatttatttttttcctaagcgttttcatctccgccaaccctagaccaaattggtggagatttgccgtcaaatccaaatttaatgtaattaagaacaaaatactcgccatgccactcgttatagataaaaatatttttattgcat

SEQ ID NO: 51028 - DNA, 1736 bp, Zea Mays
ggccggcctcgcgtgccatgcgatgttgttccccaggcgcagcagcacggcagtcctccgtttcctcctcgtcgctcgccccggttgtctcctcctcgacctcccccgtcgcgacaccgcccgatctctctagcgcacggcggacggagaagaggaggagggggggacgatctcattcatcggaccggcgtgcctggaataataacaacggggcgagctcctcgtcgtcgaggctggacccggcggcgccgctgctgccgcgccacggcagcagcgggggccgcgagggtggtggcctgtcgtcgcagcccaagacgttcgccaacgtcttcatcgcggtggtcggcgccggcgtgctggggctgccgtacaccttctcgcgcaccgggtgggcggcgggctcgctgctgctcttctccgtcgccgcgctcaccttctactgcatgatgctgctcgttgcgtgccgccgccgcctcgccgacgagcaccctaagatcgcctcgttcggggacctgggggacgccgtgttcggcgcgcatgggcggttcgccgtggacgtgatgctggtgctcagccaattcagcttctgcgtcggctacctcatcttcatctccaacaccatggcgcacctctatccgattaccgccgcggcctcgtcctcctccgcgctcctctcccccaaggcgctcgtcatctgggcgatgctgcctttccagctggggctcaactccatcaagacgctgacgctgctcgcgccgctcagcatcttcgccgacgtcgtcgacctcggcgccatgggcgtggtcctcggccaggacgtcgccgcctggctcgccaagcccgtgcccgtggtcgccttcggcggcgcaggcgcgcttctctacgggctcggcgtctccgtgtacgcgttcgagggcatcggcatggtgctgccgctggaggcagaggcggcgaacaagagcaagttcggcgtcacgctcgggctgtccatggcgttcatcgccgtcatgtacgggctgttcggcgtcatgggctacgtcgcgttcggcgacgccacgcgggacatcatcaccaccaacctcggagccgggtggctgtcggccgccgtgcagctggggctctgcatcaacctcttcttcaccatgccggtgatgatgaaccccgtgtacgaggtcgccgagcgcctgctccacggcaagcggtactgctggtggcttaggtggctgctggtcgtcgtcgtcggactcgccgccatgtacgtgcccaacttcacggacttcctggcgctcgtcgggagcagtgtctgcgtcctcctcgggttcgtgctgccggcctcgttccacctcaaggtattcggcgccgagatggaatggcccggagtgctgtccgatgtcctgctggtcgtgatcggcctcgcgctcgccgtgttcgggacgtacacgtcgctgctgcaaatcttccaatcgtcaagcgcttgatcgacgcgcgttccgctgcgcgtcgatcatcgcattctccagggcaactacgatacatgtgttgagtgttgttcgtgagtggcttgtattggacgggggaaatctgtacgcttttcgtaccacagatttcagttactcccggtagcagtgtatgtgtatgcgtcctagatgttcctcctgctgtgcacgatgggggatacgatgaaaggacaagattttcacttcgtggaaaaagcttattttgctgttaaataaaaa

SEQ ID NO: 51029 - DNA, 1259 bp, Zea Mays
agaatctctcgtgaaactatgtttgaaaatggcttagtggcaaagctcattgccatcagccatgacgttatttgtgccaagcccgtcatgacattaataacggcaactaactcgctctaaaaaaataaagggtccttcgctccttcggtcgcagcctaggaaaaaaaaacgcataatttcagattgagatcgccatggccgccatgggatggtccgacctcccctccgagctcctcaccgacatcgccggtaggatcaacgagctcgccgacatcgcccggtttcgctccgtctgctcgtcatggcgatcggcggcgcgggacgccgtggccgccccgccgccgcagccgccgtggcttctcctcccgtcgtccccgtctcggctcttcttctgcccccgggaggaccgaatctacccaaacctccgcctgccccaccccgccgcagaggtgcaccaccgccgcccccgcccccacctgtacgcgtccccgcatggatgggcgctcgccatcgacccgacagatctggctgcttccctcgtccatcccttcaccggcgccacccgcccgctcccgccgctccccttcttcttcgcggagacggaggacctggcctgggactggtctccgcacggcgtcatggcgtccagcggcgaaggcctgctcttctgcgccgccgatccgacgacagccgcctcctggtccccgatccgtgcactgtacgattgcaacgccagcagcatcaactacgccggcggcaagttcttcgtcttcgaggaggacgtctgccgcaccaccatcgtcgacgcggtcacccttgccatcgccgccgtgatcccggcccccgccgtcgagctccccgccgaggcgcgcgtcgctgtcgccggcgacgagctcttcctcctcgtcaagtcaaagtggatgtacctcttcagcgacgacgttgacttctcgaaggccttccatgtcaaccaccgcagcgtcaattcagcctggcaggagctcacaggcatcggcgagcgtgcgctattcgtagattcccaccacgggttcgcagtgccgacggcggggtttggcaatctcgagagcaacacaatctattcagtgagcagcaagaaggtgaactacagcgtttcggcatttagcctggagacccgtacctcgaagaaacttgcgtgccgcctcaacgaccaggagatggcgatgcgtggtgagatgccatcgtggatcgtaccaagattggatgaagtctgaatatgt

SEQ ID NO: 51030 - DNA, 1968 bp, Zea Mays
agaatctctcgtgaaactatgtttgaaaatggcttagtggcaaagctcattgccatcagccatgacgttatttgtgccaagcccgtcatgacattaataacggcaactaactcgctctaaaaaaataaagggtccttcgctccttcggtcgcagcctaggaaaaaaaaacgcataatttcagattgagatcgccatggccgccatgggatggtccgacctcccctccgagctcctcaccgacatcgccggtaggatcaacgagctcgccgacatcgcccggtttcgctccgtctgctcgtcatggcgatcggcggcgcgggacgccgtggccgccccgccgccgcagccgccgtggcttctcctcccgtcgtccccgtctcggctcttcttctgcccccgggaggaccgaatctacccaaacctccgcctgccccaccccgccgcagaggtgcaccaccgccgcccccgcccccacctgtacgcgtccccgcatggatgggcgctcgccatcgacccgacagatctggctgcttccctcgtccatcccttcaccggcgccacccgcccgctcccgccgctccccttcttcttcgcggagacggaggacctggcctgggactggtctccgcacggcgtcatggcgtccagcggcgaaggcctgctcttctgcgccgccgatccgacgacagccgcctcctggtccccgatccgtgcactgtacgattgcaacgccagcagcatcaactacgccggcggcaagttcttcgtcttcgaggaggacgtctgccgcaccaccatcgtcgacgcggtcacccttgccatcgccgccgtgatcccggcccccgccgtcgagctccccgccgaggcgcgcgtcgctgtcgccggcgacgagctcttcctcctcgtcaagtcaaagtggatgtacctcttcagcgacgacgttgacttctcgaaggccttccatgtcaaccaccgcagcgtcaattcagcctggcaggagctcacaggcatcggcgagcgtgcgctattcgtagattcccaccacgggttcgcagtgccgacggcggggtttggcaatctcgagagcaacacaatctattcagtgagcagcaagaaggtgaactacagcgtttcggcatttagcctggagacccgtacctcgaagaaacttgcgtgccgcctcaacgaccaggagatggcgatgcgtggtgagatgccatcgtggatcgtaccaagattggatgaagtctgaatctgcagggttgggagattcatcattgttgtgcaatcactgttgatatatggttctaggtcgtaataacaaggaaggtgatggctgtttggagttttagggcaatccgaagcacaggtgaaccatatgccaagccaagatatactaaatcatgacatgtgttctatgggggacgaaggggactagagagtcttagggtgtatttgattcgtggctaactgtgtcacactttgctaaaagttagttgttcgaattgaagaactaaccttaggcagaaaagtaattaggcaaagtgtgacaagctagtcagtgaatcaaatatgttaatccgtctgattggttgctcacatcgtctcattttagaccactgtatttattgattttatctgaaattatgtttagttacctgcatataagagacaagagacgtgtactgtataagagatataaaataagttattttgcctgcatctagcggtaagcttaaatcatgtgtatccggccggtcaccctcccgagagtagcgcgcaggcatccaatcagctccaatataactgcaccctgcaccactgcctctaaacttctgaagtatctccccttgaagtatcttacagaggtagattgccctgtgccaaaagatatatgatggtgttgatatgcctgtcctgtgttcttcatcctttttttactctttttcgtcattcctttataggac

SEQ ID NO: 51031 - DNA, 2663 bp, Zea Mays
cggaaagtagagaggagagagagaaaagtatgacaagaatgagaaagaaatcagacaacaaccttcttagcctcctccatatcctcctctccacttcttctccttcgccatgagttctatgctaggccagcaagaaccatagcgagagcaagcaacagctagtggcagcactcgagaacgagctaggggaggaagagagaagatcgacagccctgctagtgtccaacaacccagaggcaagggcggctaccgaaagggaaaagattcccttgttcttgaccggcttctcagggacaaatctggaggcggcgatggcatccaattcatcagcggccgctgtggcagccatgtttggaattagggatgccgaccaccaagaccagatgaagccgctgcttgcgcagcagcaccagcaccagcaccagcaccagatgccacctgcgccgctgctcaacgccgcttcgtcgtcggcggggcccggccaggcggcaggggcaaccccgccggcagtgaagaagaagagaaacctaccagaccctgacgcggaggtgatcgcgctatcgcccaagacgctgctggcgacgaaccggttcgtgtgcgaggtgtgcaacaaggggttccagcgggagcagaacctgcagctgcaccggcgcgggcacaacctgccgtggaagctgaagcagaaggacccgtcgcaggcgcagcggcggcgcgtgtacctgtgcccggagccgacgtgcgcgcaccacgacccctcccgcgcgctcggcgacctgacggggatcaagaagcacttctgccgcaagcacggcgagaagaagtggaagtgcgacaagtgctccaagcgctacgccgtgcagtcggactggaaggcgcactccaaggtctgcggcacgcgcgagtaccgctgcgactgcggcacactcttctcgcggagggatagcttcatcacccacaggggctttctgcgacgccctcgcgcaggagagcgcccgggctgccgcccccaggcctcaccgccagccacctctacggcgccaccaacgcggccaacatggggctcagcctctcgcaggtcggttcccacctcgcatccacactcggtgcggacgctcacggccaccatcaggacctcctccggctcggtggcagcaacgccgcgagccgctttgagcatcttctggggccgtccaacgcctccgcgttccggcccctgccgcctccaccatcgtcggcatttctcatgggcgctccgcaggagtttggcgcaggcgacggcagcgggtcccacgggttcttgcagggcaagccgttccacagtctcatgcatctgccggatctccaaggcaacggcgccgggggtgcctcggcgtcgtcggctacgggtctcttcaaccttggctacatcgcaaacagtgcaaacagctcaggtacttccagccatggccatgcaagccagggacacctgacaagtgatcagttcagcgaaggaggtggcggcggcggctccgagtcatcggccgcgatgctttttagcggcggcgggaacttcgccggtggtgaccaccaagttgctcctggcgggatgtacaacaatgatccggccgtgatgctgccgcagatgtccgcgacggcgcttctgcagaaggcgtcccagatgggctccagcgcgagcgcgcacggcggcgtgtccgtgtttggggggctcgtgggctcgtcggcgccctccgctaggcacgcccgggcacccatgctcgaccagagccagatgcacctacagagcttgatgagctcgctggctgccggcggcatgttcggcggcgccaacagcggcagcatgattgacccgaggatgtatgacatgaaccaagatgtgaagtttagccagggccgtggtggcgctgagatgacgcgcgacttccttggcgtcggcggcgatggtgtcatgagaggcatgacagtggcgagagcgggggcaccaagacggtgccgatgacatgaactccttggaagccgagatgaagtcggcctcgtcgcccttcactggagacaggatgcaataagagttcccaataagagaaccttgtgtgctcgcatagtgagcgagtcctgtgcagcctgccatgcatgcacccatgggtgtactgaatccattacagcaggttgttatagcgtacactgcacaaggcatgggagtagtataaggttgctgcattccatgcaatgatgcaataaagggtaaagacaggtttgcacctaatccgaagacttgcatggtgagcaatgagtatcattcttgatttgctactaatccaaagaggctagatcaagtagaatcatgtgatctattatctattgctccatgcttggtggtttcgttcctgtgtcaaacatttgttttttctgaactatatgtaattggattaattatacctgaggagagatagtattaagcagtaatgctgtagctagctaggttagtagtactgggctactggctatatatattaggggacgatataagagttcatgcccctaaaacttcttctgtttgttgtttttccttctattgtgcttgtgcttaccgtgtactctttaatttggagcaaaaccatttttgttgcttattacaatgcatttaataaccacagcgtacccgtcgg

SEQ ID NO: 51032 - DNA, 2489 bp, Zea Mays
cggaaagtagagaggagagagagaaaagtatgacaagaatgagaaagaaatcagacaacaaccttcttagcctcctccatatcctcctctccacttcttctccttcgccatgagttctatgctaggccagcaagaaccatagcgagagcaagcaacagctagtggcagcactcgagaacgagctaggggaggaagggagggtagagagaagatcgacagccctgctagtgtccaacaacccagaggcaagggcggctaccgaaagggaaaagattcccttgttcttgaccggcttctcagggacaaatctggaggcggcgatggcatccaattcatcagcggccgctgtggcagccatgtttggaattagggatgccgaccaccaagaccagatgaagccgctgcttgcgcagcagcaccagcaccagcaccagcaccagatgccacctgcgccgctgctcaacgccgcttcgtcgtcggcggggcccggccaggcggcaggggcaaccccgccggcagtgaagaagaagagaaacctaccagaccctgacgcggaggtgatcgcgctatcgcccaagacgctgctggcgacgaaccggttcgtgtgcgaggtgtgcaacaaggggttccagcgggagcagaacctgcagctgcaccggcgcgggcacaacctgccgtggaagctgaagcagaaggacccgtcgcaggcgcagcggcggcgcgtgtacctgtgcccggagccgacgtgcgcgcaccacgacccctcccgcgcgctcggcgacctgacggggatcaagaagcacttctgccgcaagcacggcgagaagaagtggaagtgcgacaagtgctccaagcgctacgccgtgcagtcggactggaaggcgcactccaaggtctgcggcacgcgcgagtaccgctgcgactgcggcacactcttctcgcggagggatagcttcatcacccacaggggctttctgcgacgccctcgcgcaggagagcgcccgggctgccgcccccaggcctcaccgccagccacctctacggcgccaccaacgcggccaacatggggctcagcctctcgcaggagtttggcgcaggcgacggcagcgggtcccacgggttcttgcagggcaagccgttccacagtctcatgcatctgccggatctccaaggcaacggcgccgggggtgcctcggcgtcgtcggctacgggtctcttcaaccttggctacatcgcaaacagtgcaaacagctcaggtacttccagccatggccatgcaagccagggacacctgacaagtgatcagttcagcgaaggaggtggcggcggcggctccgagtcatcggccgcgatgctttttagcggcggcgggaacttcgccggtggtgaccaccaagttgctcctggcgggatgtacaacaatgatccggccgtgatgctgccgcagatgtccgcgacggcgcttctgcagaaggcgtcccagatgggctccagcgcgagcgcgcacggcggcgtgtccgtgtttggggggctcgtgggctcgtcggcgccctccgctaggcacgcccgggcacccatgctcgaccagagccagatgcacctacagagcttgatgagctcgctggctgccggcggcatgttcggcggcgccaacagcggcagcatgattgacccgaggatgtatgacatgaaccaagatgtgaagtttagccagggccgtggtggcgctgagatgacgcgcgacttccttggcgtcggcggcgatggtgtcatgagaggcatgacagtggcgagagcgggggcaccaagacggtgccgatgacatgaactccttggaagccgagatgaagtcggcctcgtcgcccttcactggagacaggatgcaataagagttcccaataagagaaccttgtgtgctcgcatagtgagcgagtcctgtgcagcctgccatgcatgcacccatgggtgtactgaatccattacagcaggttgttatagcgtacactgcacaaggcatgggagtagtataaggttgctgcattccatgcaatgatgcaataaagggtaaagacaggtttgcacctaatccgaagacttgcatggtgagcaatgagtatcattcttgatttgctactaatccaaagaggctagatcaagtagaatcatgtgatctattatctattgctccatgcttggtggtttcgttcctgtgtcaaacatttgttttttctgaactatatgtaattggattaattatacctgaggagagatagtattaagcagtaatgctgtagctagctaggttagtagtactgggctactggctatatatattaggggacgatataagagttcatgcccctaaaacttcttctgtttgttgtttttccttctattgtgcttgtgcttaccgtgtactctttaatttggagcaaaaccatttttgttgcttattacaatgcatttaataaccacagcgtacccgtcgg

SEQ ID NO: 51033 - DNA, 1400 bp, Zea Mays
atgaaagagaccaaggccatgcagtgtagagcaggagctgtctagcaacgcatgaaggactaccaaggccacagcgctaccacaccgtgtggcagtggcactggcaccacgggagaggggcgaggcgactgactgataaggaagaagcaggtccgagctcgccagcagctagccgagcgcgcgtggccgagatgggtggcgccggcggcggcgggaggaacggggcggcgacgaggcggtacaacaggtccaaggtgccccggctcaggtggaccagcgagctccatcgcaacttcgtccgagccgtcgactgccttggcggacaggacaaagctactcctaagctaattctccagctcatggatgtcggagggcttaccattgcccatgtcaagagccaccttcagatgtacagaagctcaggacaagacattaggaggagagaggtgcaaccgcggcggctaggacatctggtggagcactactcattcgccattgatgaggagggaggccccaaagaattcgtctgctgcccacacatgaaaagggcggaggcagggccagaagctgcggccacggccacggccacgcacgaaagcgtgcaggggaacagtgacatgggggctcctggcacccggcgctgcggcgatgattacacgcgagcgattcccattcccatggggagcagcagtagcaggagcaggaggataaccgagggcctcgcatggcagtggcagagcagcggtgccgcctctgccgctcgtgctgccacggccgcttccacgctgcgcgagctgggattctgggtgcgaggaaccgagcccttcaaggtacggcagaccggcaggcccatggcaaatcgtctcagccctgtggcgaggcagctatcttccaagtccaaggagatcaagtgcggagacgacggacgcttcttgttcggcactgcgactagagacgaagcggccaggagacactcgccgtcgcggcggccagactccattgacccaaaggctgtggccgctgtctcttggtccagcgaaggaggcgcctgcgccctcccgccgccgctgtcgtcgaccggcttgagtgcgcgctcagggccgtcaggcagttgcgtattcgccaggcagagagttaacctggacctttccctgtccatatgtggatcatagcttaatcacccgtgctgaattttgtacattcaatgttccatgatgcattgcatgctgtcgatgtgattccgtttggatatcaatggcggcgtgcatgccagcgccacagcctgcggtgattgcccgtctagagtctagaactgtgtgttctaatgaagatctgaagaatggcagttcacatgttccgttctgtgttagtgttaatggtaaaggcgaaattgtctgctg

SEQ ID NO: 51034 - DNA, 1921 bp, Zea Mays
atgaaagagaccaaggccatgcagtgtagagcaggagctgtctagcaacgcatgaaggactaccaaggccacagcgctaccacaccgtgtggcagtggcactggcaccacgggagaggggcgaggcgactgactgataaggaagaagcaggtccgagctcgccagcagctagccgagcgcgcgtggccgagatgggtggcgccggcggcggcgggaggaacggggcggcgacgaggcggtacaacaggtccaaggtgccccggctcaggtggaccagcgagctccatcgcaacttcgtccgagccgtcgactgccttggcggacaggacagtacgttctgttcctgtcttctcacctctcacgctaagcatgcatgcatacatacatacatgtctttggtttggtgtcctctctatatctctctttcctcgtcggccaaaatggccctgggctcattcatgtgctctcttcgtggtcgatgtcgactgcatgcagaagctactcctaagctaattctccagctcatggatgtcggagggcttaccattgcccatgtcaagagccaccttcagatgtacagaagctcaggacaagacattaggaggagaggtgagagagatgctactatactgtgtctttgtctttatctgttcctgttcctctcagctcaatttcttactagagcgatcttcttagtttttcccgttgatggagcctcttccttgggatttggggttaagatccttagctaaaacacaggaccgtcgtcttgacaccgctaaacagccatcattagctgcaagattgctcggcatgtgccatgcatatgcatatgttctgttgtctcccacacttgcacacgcgtggtgcgaaatggaaactggaaagccgaaccgctttttttagtgccctaaaccacctttatttattgggttactacctctcctcttttccatgtcggtcgttgccattagaggtgcaaccgcggcggctaggacatctggtggagcactactcattcgccattgatgaggagggaggccccaaagaattcgtctgctgcccacacatgaaaagggcggaggcagggccagaagctgcggccacggccacggccacgcacgaaagcgtgcaggggaacagtgacatgggggctcctggcacccggcgctgcggcgatgattacacgcgagcgattcccattcccatggggagcagcagtagcaggagcaggaggataaccgagggcctcgcatggcagtggcagagcagcggtgccgcctctgccgctcgtgctgccacggccgcttccacgctgcgcgagctgggattctgggtgcgaggaaccgagcccttcaagaccggcaggcccatggcaaatcgtctcagccctgtggcgaggcagctatcttccaagtccaaggagatcaagtgcggagacgacggacgcttcttgttcggcactgcgactagagacgaagcggccaggagacactcgccgtcgcggcggccagactccattgacccaaaggctgtggccgctgtctcttggtccagcgaaggaggcgcctgcgccctcccgccgccgctgtcgtcgaccggcttgagtgcgcgctcagggccgtcaggcagttgcgtattcgccaggcagagagttaacctggacctttccctgtccatatgtggatcatagcttaatcacccgtgctgaattttgtacattcaatgttccatgatgcattgcatgctgtcgatgtgattccgtttggatatcaatggcggcgtgcatgccagcgccacagcctgcggtgattgcccgtctagagtctagaactgtgtgttctaatgaagatctgaagaatggcagttcacatgttccgttctgtgttagtgttaatggtaaaggcgaaattgtctgctg

SEQ ID NO: 51035 - DNA, 1048 bp, Zea Mays
ctcttcttcgataataactcgttttgtagccttggttcgtggcgcgctcgacgcggctatccagcttcagcggacaccgcttcatcgacctcttcgggctgcctccgtcggtgtccaccgccagctgcgtcgagttcaccggctcccatgtggcttcattggtgtcggacctggcgtccgcgcttaaggatgtcagtgccaagaggacaagacgaccacaacgacaaagggagaaggttaggagtctattgtctaggggagcggatggatctagatgccgaggtaggggagtagatgtaactgggtgccaagaggtgcaagacggagggaggcgaggggaacctaaaccaaaatcccacactagagcaggccgacatcgatagctccggcgagaacgacgggcaaaaccagaagccatcaggcaaggggaagaatataatacgggtagagtcccccaaggactacgccatgtctaggacaggagagggcagactactaacagcacatatcacttctatgggaaggtgattccacaccaacaagaagaagccaacattctataatttttgtagacaagggaacaccaaaccaacaactaatgatcgaccaaaggatgaagattcttcaagacccgatgccaggatgtcgccaggatgtcggtggtctggtttatgaatgaggaagcaggaaaatcaagaagcggtagaagttgatctatcccttgactagccacaaggcttacagaatccttctgctgagatgttgccagttcaggtgatcaacaaggcactaatgctctacgtgcaatcactgtaacaacagtttgaggcaagtagtatagtccgttcgaagctaatcatgtgccgtgggattcatccacctttcgaaagtcctacgaatttcactattttttggcatcgactcctctttatcgagcttgtgactgtgagcccgctcgactttagcgacataactaccctcatgcaagaagttgtaagttgagcatgtcctataatggatcagttcagtccaccagattagtggttgc

SEQ ID NO: 51036 - DNA, 1028 bp, Zea Mays
ctcttcttcgataataactcgttttgtagccttggttcgtggcgcgctcgacgcggctatccagcttcagcggacaccgcttcatcgacctcttcgggctgcctccgtcggtgtccaccgccagctgcgtcgagttcaccggctcccatgtggcttcattggtgtcggacctggcgtccgcgcttaaggatgtcagtgccaagaggacaagacgaccacaacgacaaagggagaaggggagcggatggatctagatgccgaggtaggggagtagatgtaactgggtgccaagaggtgcaagacggagggaggcgaggggaacctaaaccaaaatcccacactagagcaggccgacatcgatagctccggcgagaacgacgggcaaaaccagaagccatcaggcaaggggaagaatataatacgggtagagtcccccaaggactacgccatgtctaggacaggagagggcagactactaacagcacatatcacttctatgggaaggtgattccacaccaacaagaagaagccaacattctataatttttgtagacaagggaacaccaaaccaacaactaatgatcgaccaaaggatgaagattcttcaagacccgatgccaggatgtcgccaggatgtcggtggtctggtttatgaatgaggaagcaggaaaatcaagaagcggtagaagttgatctatcccttgactagccacaaggcttacagaatccttctgctgagatgttgccagttcaggtgatcaacaaggcactaatgctctacgtgcaatcactgtaacaacagtttgaggcaagtagtatagtccgttcgaagctaatcatgtgccgtgggattcatccacctttcgaaagtcctacgaatttcactattttttggcatcgactcctctttatcgagcttgtgactgtgagcccgctcgactttagcgacataactaccctcatgcaagaagttgtaagttgagcatgtcctataatggatcagttcagtccaccagattagtggttgc

SEQ ID NO: 51037 - DNA, 735 bp, Zea Mays
cttggttcgtggcgcgctcgacgcggctatccagcttcagcggacaccgcttcatcgacctcttcgggctgcctccgtcggtgtccaccgccagctgcgtcgagttcaccggctcccatgtggcttcattggtgtcggacctggcgtccgcgcttaaggatgtcagtgccaagaggacaagacgaccacaacgacaaagggagaagggaaggtgattccacaccaacaagaagaagccaacattctataatttttgtagacaagggaacaccaaaccaacaactaatgatcgaccaaaggatgaagattcttcaagacccgatgccaggatgtcgccaggatgtcggtggtctggtttatgaatgaggaagcaggaaaatcaagaagcggtagaagttgatctatcccttgactagccacaaggcttacagaatccttctgctgagatgttgccagttcaggtgatcaacaaggcactaatgctctacgtgcaatcactgtaacaacagtttgaggcaagtagtatagtccgttcgaagctaatcatgtgccgtgggattcatccacctttcgaaagtcctacgaatttcactattttttggcatcgactcctctttatcgagcttgtgactgtgagcccgctcgactttagcgacataactaccctcatgcaagaagttgtaagttgagcatgtcctataatggatcagttcagtccaccagattagtggttgc

SEQ ID NO: 51038 - DNA, 694 bp, Zea Mays
tcagcggacaccgcttcatcgacctcttcgggctgcctccgtcggtgtccaccgccagctgcgtcgagttcaccggctcccatgtggcttcattggtgtcggacctggcgtccgcgcttaaggatgtcagtgccaagaggacaagacgaccacaacgacaaagggagaaggtgattccacaccaacaagaagaagccaacattctataatttttgtagacaagggaacaccaaaccaacaactaatgatcgaccaaaggatgaagattcttcaagacccgatgccaggatgtcgccaggatgtcggtggtctggtttatgaatgaggaagcaggaaaatcaagaagcggtagaagttgatctatcccttgactagccacaaggcttacagaatccttctgctgagatgttgccagttcaggtgatcaacaaggcactaatgctctacgtgcaatcactgtaacaacagtttgaggcaagtagtatagtccgttcgaagctaatcatgtgccgtgggattcatccacctttcgaaagtcctacgaatttcactattttttggcatcgactcctctttatcgagcttgtgactgtgagcccgctcgactttagcgacataactaccctcatgcaagaagttgtaagttgagcatgtcctataatggatcagttcagtccaccagattagtggttgc

SEQ ID NO: 51039 - DNA, 2534 bp, Zea Mays
aattaagctcatcacacctagcccgtggggtttaccttccccttccttcgcggaccccaacttgccggaagcccgcaaccactagcttgatcgatccaaaaccctcatcgatctcgtcgcatacggccatggaagcgcagaccgactccgcccccggcggcggcgacgatcttgcgatcatgcgcgagcagtgccggacactggaggagtccatttccacccgccgtgaggcgcagctcgacctcatcggctccctgcagcacctcgtccccgacctggttccatccctcgaacaatcgctccgcctcatcgccgccttcaacggccgccccttcgtccccacgctgtaccccaacgccagcgtccacgtgcagaaccccaaccttaagccccagcaccgccgcgccctccccggcccggcccgctccacacgcctcaagacctcgccggggtcctccccagcttccgccgccgcccggtgtgcgggaaccagtggtggcatccacgccgttcgtaccatggttgccgtctgtctcctcgagctcgtcccctttgccgagatcgatgccgccgcgctcgcgcgccgcctgcagtccgaaacgtcgtctgccagcgaggccgagcgcgctgctctggccgacctcgccgcggagcttgggggctccgcccccgctgctgttgctcttgccctccgtcgcatcgcagaagacagcggcggcttgcagatcgaggaggccttcattgggggcaagcagatgactatggtctgggccatcgaccggagcaaactcctcaaagagctaccagaatccgcttctgtgctccaaatccaacctccaccaactccacaggtggttcccctcgatactgatactaacatcataccaaggcctccgccactgcagcagtcggatatgtggggtaacccaatgccaccgatgttcccacgtcccaggggcatgacaatgccaagaattccgccaggtttgatgccgctgcagcgaccattcatggcaccaggggcagttatcccaatgggtggtggtccggtgccgagttccacacagctgaagctgaggacagaggaagatgatcttaaggaccttgaactgctgctaaacaagaagacgtatagagagaagcagaatacaaagactggagaggagctgctggatctcattcaccggcctacagctaaggagactgcagtcgctgcaaagttaaaacaaagggtggctcccagctgaaggaatattgtaccaacttaactaaagaagattgccgacgccaaacaggttcttttgtggcctgtgataaggtccactttcggcgtattatagctccacatactgatacaaatctaggagattgttctttcctagacacatgccgtcacacaaagacttgcaagtatgtccactacgagcttgatcaaacgccagatgtacctcaaatgatggcaggtgccattgcaccacctaggcaaataaagccccagagagctgaatattgttcagaaatagagcttggagaatcgcaatggataaactgtgacattcggaacttcaggatggacatcttaggacaatttggagtaattatggctgaccccccttgggatattcatatggagctaccatatggcacaatggctgatgatgaaatgaggacgcttaatgttccaactctgcaaactgatggtttgatttttttatgggtcactggtcgtgccatggagcttgggcgagaatgtctggagctctggggttacaagcgtgttgaagaaattatttgggtgaagaccaatcaacttcaacgtatcattcgaactggtcgcactggccattggttgaatcacagcaaagaacattgtcttgttggaataaaaggaaaccctttagtgaacaggaacatagataccgatgttattgttgctgaagtccgtgaaacaagcagaaaacctgatgagatgtacgcaatgctagaacgaattagcccaaggacaaggaagttggaactgtttgcaaggatgcataatacacaagctggatggctttcactgggtaaccaattaaatggagtaaggcttgttgatcaagggttgagagcaaggtacaaagctgcttaccctgatgttgaggtccagccaccatcacctcccaggacaagcacgccaatggatgttgaccaaagtagttcacagaaggttgctgcgctagatggtggcgagaggcccgcctgatgctagcaaacttacttgcgagttatcgtgtcaggacccactactgatcatataggtttcatcgcgttacccctgttgtaaaattaggcagctcagtttgtgtttggctactgaggattgtttcagtatatcatgtgaaagaaattgcactgtaacagccccagcaaatattgccgccaatgtaatcagggcccatcttgtcttattttcgaaattccaagtgcatctgtatatccaaaaaattgaaaagaaatctgcttctcttttctgggggcaataattttattccttg

SEQ ID NO: 51040 - DNA, 2495 bp, Zea Mays
tagcccgtggggtttaccttccccttccttcgcggaccccaacttgccggaagcccgcaaccactagcttgatcgatccaaaaccctcatcgatctcgtcgcatacggccatggaagcgcagaccgactccgcccccggcggcggcgacgatcttgcgatcatgcgcgagcagtgccggacactggaggagtccatttccacccgccgtgaggcgcagctcgacctcatcggctccctgcagcacctcgtccccgacctggttccatccctcgaacaatcgctccgcctcatcgccgccttcaacggccgccccttcgtccccacgctgtaccccaacgccagcgtccacgtgcagaaccccaaccttaagccccagcaccgccgcgccctccccggcccggcccgctccacacgcctcaagacctcgccggggtcctccccagcttccgccgccgcccggtgtgcgggaaccagtggtggcatccacgccgttcgtaccatggttgccgtctgtctcctcgagctcgtcccctttgccgagatcgatgccgccgcgctcgcgcgccgcctgcagtccgaaacgtcgtctgccagcgaggccgagcgcgctgctctggccgacctcgccgcggagcttgggggctccgcccccgctgctgttgctcttgccctccgtcgcatcgcagaagacagcggcggcttgcagatcgaggaggccttcattgggggcaagcagatgactatggtctgggccatcgaccggagcaaactcctcaaagagctaccagaatccgcttctgtgctccaaatccaacctccaccaactccacaggtggttcccctcgatactgatactaacatcataccaaggcctccgccactgcagcagtcggatatgtggggtaacccaatgccaccgatgttcccacgtcccaggggcatgacaatgccaagaattccgccaggtttgatgccgctgcagcgaccattcatggcaccaggggcagttatcccaatgggtggtggtccggtgccgagttccacacagctgaagctgaggacagaggaagatgatcttaaggaccttgaactgctgctaaacaagaagacgtatagagagaagcagaatacaaagactggagaggagctgctggatctcattcaccggcctacagctaaggagactgcagtcgctgcaaagtttaaaacaaagggtggctcccagctgaaggaatattgtaccaacttaactaaagaagattgccgacgccaaacaggttcttttgtggcctgtgataagctccacatactgatacaaatctaggagattgttctttcctagacacatgccgtcacacaaagacttgcaagtatgtccactacgagcttgatcaaacgccagatgtacctcaaatgatggcaggtgccattgcaccacctaggcaaataaagccccagagagctgaatattgttcagaaatagagcttggagaatcgcaatggataaactgtgacattcggaacttcaggatggacatcttaggacaatttggagtaattatggctgaccccccttgggatattcatatggagctaccatatggcacaatggctgatgatgaaatgaggacgcttaatgttccaactctgcaaactgatggtttgatttttttatgggtcactggtcgtgccatggagcttgggcgagaatgtctggagctctggggttacaagcgtgttgaagaaattatttgggtgaagaccaatcaacttcaacgtatcattcgaactggtcgcactggccattggttgaatcacagcaaagaacattgtcttgttggaataaaaggaaaccctttagtgaacaggaacatagataccgatgttattgttgctgaagtccgtgaaacaagcagaaaacctgatgagatgtacgcaatgctagaacgaattagcccaaggacaaggaagttggaactgtttgcaaggatgcataatacacaagctggatggctttcactgggtaaccaattaaatggagtaaggcttgttgatcaagggttgagagcaaggtacaaagctgcttaccctgatgttgaggtccagccaccatcacctcccaggacaagcacgccaatggatgttgaccaaagtagttcacagaaggttgctgcgctagatggtggcgagaggcccgcctgatgctagcaaacttacttgcgagttatcgtgtcaggacccactactgatcatataggtttcatcgcgttacccctgttgtaaaattaggcagctcagtttgtgtttggctactgaggattgtttcagtatatcatgtgaaagaaattgcactgtaacagccccagcaaatattgccgccaatgtaatcagggcccatcttgtcttattttcgaaattccaagtgcatctgtatatccaaaaaattgaaaagaaatctgcttctcttttctgggggcaataattttattccttg

SEQ ID NO: 51041 - DNA, 2223 bp, Zea Mays
catcataaagttcaggtgccatgaattctggggtacctgcagaatgtaagacaaatgtcccacatgatagaagtgtatctcataaatcagaaagcaaacatgaacagatgagaagaagtttaacattgtcaaacaataataaataatcaatctcaaaacgatgattaataatgtcataaatacatcaagagcaacagagaaaacacaagaccactagtcacatgcatatacaatgattctattcattcacccacacaataaagctctattttaataagaaaaagtagcagttttccatgacagaacttcaacactacagcatggtagtcctagtctggtatgacacggtgcaaataaggtaccacagagaaagtaatccaaggtgacatgtatgaataggaatagggataagttccactttttttgtgcatgtgcatgtggagagggggtctaaaaaatggcatgacgcaatatctaaaacctagctcaggaaacaccattgggtaccaaggttgcattctcagcagggaagtttggtcaaggattctgctaccgctaggcctatccagcttggctgctcgtcaggagattgacgctttactctggtggattcagacaagaaaacaggttcagtgttagatcagaaaaggatttgattccttggttatgcttgccagttggtcgctctggaaagaaaggaatgctcggacattttagaaagtgaactgctcacatcagcaatcacacagcagataatccaggaagcagtggtttgatgcaggtggggtacagcgtacaggcaccttcagtagctaatgagtcttttgtaataacaagtttcactagcctgtgtttttagttttttttttcttctgccaccttttggctggcgcctgctgatgaaaacctttggttgccatcaagggtttcagcctttgtaatcgttttttattcccttaggtatggttgcggaaaaaaaaacttgtggatatataaagcaagctgatttcaatgaggcataggtcatttaggaacaatgcttatgcatgcaacagatgtcagtgagttaggccagtaagtggctaattggctctgcacataaataagactgacagctacgagggggggggtatccagtgccgtaggcttcccgtactgtgcggggtctgggcaaggctatctttaagtgccaagccttccccgcataatatgcagaggctggggctcgaacccaggaccttccggttacagacggtaggctctaccgctgcaccaagcccgcccttccggttactgacagctactgggacagcaaattctgtgcaaccacggtccacaatatccttcgtagctcagatccaatcaagaataactagggaataaataaatctcaattctccttccaaataatcagtatcaatgaaatggtcacctagattatctctcgactgcgaaagggcctctagccgaaatggctaggtggtctgagtagcactccttaggtcctgggttcgattggggggggggggggggggcgtatccagtgtcgtaggcttaccgtattgtgcggggtctgggcaagggtatctttaagcgccaagccttccccgcataatatgcagaggctggggctcgaacccgtgaccttccggttacagacgataggctctaccgctgcaccaggcccgcccttccggttactgacagctactgggacagcaaattctgtgcaaccacggtccacaatatccttcgtagctcagatccaatcaagaataactagggaataaataaatctcaattctcctttcaaataatcagtatcaatgaaatggtcacctagattatctctcgactgcgaaagggcctctagccgaaatggctaggtggtctgagtagcactccttaggtcctgggttcgactctccgtgggagcgaatttcaggctgtggttaaaaaaaaatccccttatctgtcccacgccaaagcacaggtctaaggggcttcggagccactgtgtatgggtgggataggggttcaagatttttctcgacttgtgtgagaaggtcttcttcttaaaaaaaatcccgggggctgtcttaccccctgtaggtcgagtttttttatctctcgactgaaggacattagataacaagagatttattgatagtaaattgagaatctgaagccataaaatgacaagatcattaccaataacactcc

SEQ ID NO: 51042 - DNA, 1706 bp, Zea Mays
ctcatctatgttgatttgattccaggcgacctcaatgccttcgacctcatcaaatgccttataactatataaatttaatgaagaaaaaaaattagacataccaaacttaatatattctaacgagttgaagacaattcagaaaaaacataaaaaaccatgtgccattatgattgtgtaccgaatttctaataagcatatcccttctgaattgcagtagatcactaccatgtttggcatgcaacagtaatgcctttctcctgatgtgaaagagaggtggggaatatatcttaaacaacggttattactgtcaaccgccaaaatgccagacgaaccaatcagctcaacagcccgacactcccactctagcaaaacatatctacttttaaagaagttggtcacaggctcacagctcttgacatcagcctatgactagttaaaacgtgcaccttgtgttcagccacatcttgcatgtttccaagatcttttcacccaatatattttcaattagacaagatgccgaggggtagagggaataattgcgagcaaaagaatctatttaacaaggaaatgttaagtggacaaagaggacgctgaggagcagagggcatacacagtcttgaaagctcctctccccagaatcaaattatactgcaccaaggaaagagaatcagatcaatacaactggcagagtcatgtcgtttcttgtgtcattttgcatgacatgttttcaatcattttttaggataatcttgtcttaatcagaaacacgtcaaccaatagactacataccaataaacatcaggagacagatacattttcactgaattgatgtatgcatgcgttgttttttcagtaaatcgattaacagagtggtgcggcatatcattaaagcttaacataataccatggagatgtcaaatcacaatatcacattcacatcgaacaaacctaaaatttatcataaatccatgacaggataaatccagatagggatgacaaggaacttacgcgcatgtatcgcccggttggatctacttccgcgtattcagcatcgaccacatcgttgtgggtcccacaaccaaacacctccattccggatcggccccgacaagcaaatgactctacgagcgagagggggggagggggagagagagagagagagagagagaggaagcaaagaggaatggagatcgccgaagatgtcggtggtccgcccgcggctcctacgcactgtgcgcggcagcagggtatgatggtgcggcgggtgccgggggttcagtgaagggctcggagaacggggcgtaagacggccgcatgcggaggcagcgtcggctgcgcagcgacgacgtcggattggcccgtcccgcgacgcccatggcccggcacccggcggaggatacgcggcagacgcagcacctcattctccatcgatcggcgtcctctcggcggcgtatgcggaacccatgggaggaaaattcctcgcggcgaacatggacggatcggaatcaggtgaggccaggctgggctaggctagggttacgacggattggcggtgcggagcggaagtcggcacgtggaggagggggaggtggtaggcgacggtgaataagcggtaggtaggtggtggggagggaaaggtgggatagggagaaccggagaagacagaagagatactagtagttgggcgttcggaatcaggggcgaag

SEQ ID NO: 51043 - DNA, 2723 bp, Zea Mays
ccccacacgtcacctctccccgcctcgtccagcacagcagcactccagccgcccatcgcccccacttatttatcaagccgcgcgctccgcgcttaaaacccttgcactccccgcagattttactacactagccgcttgcttcgatacgaccggtggtgtagcgtgctgactggctcgatggcggaggcgctgggagcgctgtgccgcgccgggggatggtcctacggcgcgatctggcgccctgaccggcgcgacccacggttgcttactgtaggagaatgccactgtgaagatgaagcgagaaaagtggtcgacaagatggtcaatcaggtccatgtcgtcggagaaggccttataggaaggactctaataagtggggagcaccaatggatttctgatgacatccccttcagtttctctcagataagcgatgaagataacctaggtttatgtcagggttatacttggtggcaacatcagttcctaagtggaataaagactattgctgtagtacctatgccggcgtttggtgtggcacagttcggttccatgcaaaaggtttctgaaagcttgcagtttctggatcaagttaaaggtgcaacatttctgatggaaagtctttcatggtctccttcaacaaaagatgctcagaaagacgctttcatgtacaatccacaatttcaactcgattcttcaaccactagagagggtcttccacgcactaaggctgaaccagaaaactcaaggttggagaatgcaatatccatagattctctgaagaactttgcaattacttcaaatggtctgaatcctcacgtagtggccatgccagtgaactccaaatcgataagtactgttaaattaattcaaagtgacagcaatttgcggtacaataatatttcagagaatgctcaacaattcaaatccgccaaacaacctgattctagttgggcaagtgcagctacatgtttttcaaatttgaccaatcttcaaagaatagagcgcgggctgtcatgcacacctaacaaactacgacattgccttcaaagtgaaaaatcctcaggcttcctggattcgtactcatcaatagtttctacagatgctgagctgaaatgcactttgtttgacaatgccactccatttgttcagagtgatgtgatccaagaggttggtactagtggatctactcgtgcttgtgggctacatgaattgccaaatgaaatatgggcagaaattgcctcaggggaaatgaaaccagtcataaaagaagtcaacgaaaataatggctttctcgaaagcacagcatttgatccagtcatgaatgattggtggggtgacactgccctactagcaggaaacacttcacatctgagtgctactaccatgaactctgtttcaggacaggcaagtagtgaacaattatcaattgaagatagagggctgttttcggaatctgtctttgaggagctgcttggctttgatggtaatgtcggcccagttatggatagcaccgaaccattagctggttttgtctccggttgtcatttgccgaggtacaaccttcaaggttcactttcagtgtgcaaggcacaagtaccgccattgatactcccttccggtagctgtacatccgaaaatgttgtgatgggatcatcaaaagaagcccccgtgtcactgcagaatttatctatggatgattgtggcagtttgaacaccgcaagttccaagatcagccaggtaaagaagcctgaaggagagaaggttgttaagaaaagagctaggccaggtgaaagtacacggccaagaccaaaggaccggcagcagatacaagagcgtgtaaaggagttacgtgagatagttccaaatagtgcaaagtgtagcattgatgctttgttggatcgaacaatcaagcatatgctctttctacaaagtgtgacaaagtatgcagaaaagattaagcaagccgatgaacctaatatgataagcaaggacaatggttctgtattgaatgataactcacatggagttgtcttgaaagacaatccaagtggtggaagcaatggaggtgcgacatgggcctatgaggttgcagggcagactatggtttgtccaataattgttgaggatcttgcaccgcctggtcagatgcttgttgagatgctatgtgaggaacgcggattttttctagagatagctgacaccatacggggatttggacttacaatcttgaagggattgatggaacttcgtgatggaaaaataatggctcgatttcttgttgaggcaaacaagaacgtgacgaggatggatatatttctatcacttgttcagttactgcagcagaacagccgcaatcgatcttcggatcagctagttaaggccatatttttcaacgagcgttaatgggtacggtttggagttctgattagtacttggtggtgcccgccaactgttgatagaaacgacaggtgttaaggatgtagcaaacgcacattgcggtgtcccgtgtccgaagaaaattcagttagaagatgcacagattctcatgtaacaggtttaggaacattggtgttgtcgtttgtaatttggacactggtgtagtggtgtgaggtagcctatgttgttgtgaagttggtgtgcagtcagtagcaaaattgcctgtgttgctacggtaaataacatttgaaaattaagtgtctgtgttctctttttgatctgctcta

SEQ ID NO: 51044 - DNA, 2780 bp, Zea Mays
cacagcagcactccagccgcccatcgcccccacttatttatcaagccgcgcgctccgcgcttaaaacccttgcactccccgcagattttactacactagccgcttgcttcgatacgaccggtggtgtagcgtgctgactggctcgatggcggaggcgctgggagcgctgtgccgcgccgggggatggtcctacggcgcgatctggcgccctgaccggcgcgacccacggttgcttactgtaggagaatgccactgtgaagatgaagcgagaaaagtggtcgacaagatggtcaatcaggtccatgtcgtcggagaaggccttataggaaggactctaataagtggggagcaccaatggatttctgatgacatccccttcagtttctctcagataagcgatgaagataacctaggtttatgtcagggttatacttggtggcaacatcagttcctaagtggaataaagactattgctgtagtacctatgccggcgtttggtgtggcacagttcggttccatgcaaaagtttctggatcaagttaaaggtgcaacatttctgatggaaagtctttcatggtctccttcaacaaaagatgctcagaaagacgctttcatgtacaatccacaatttcaactcgattcttcaaccactagagagggtcttccacgcactaaggctgaaccagaaaactcaaggttggagaatgcaatatccatagattctctgaagaactttgcaattacttcaaatggtctgaatcctcacgtagtggccatgccagtgaactccaaatcgataagtactgttaaattaattcaaagtgacagcaatttgcggtacaataatatttcagagaatgctcaacaattcaaatccgccaaacaacctgattctagttgggcaagtgcagctacatgtttttcaaatttgaccaatcttcaaagaatagagcgcgggctgtcatgcacacctaacaaactacgacattgccttcaaagtgaaaaatcctcaggcttcctggattcgtactcatcaatagtttctacagatgctgagctgaaatgcactttgtttgacaatgccactccatttgttcagagtgatgtgatccaagaggttggtactagtggatctactcgtgcttgtgggctacatgaattgccaaatgaaatatgggcagaaattgcctcaggggaaatgaaaccagtcataaaagaagtcaacgaaaataatggctttctcgaaagcacagcatttgatccagtcatgaatgattggtggggtgacactgccctactagcaggaaacacttcacatctgagtgctactaccatgaactctgtttcaggacaggcaagtagtgaacaattatcaattgaagatagagggctgttttcggaatctgtctttgaggagctgcttggctttgatggtaatgtcggcccagttatggatagcaccgaaccattagctggttttgtctccggttgtcatttgccgaggtacaaccttcaaggttcactttcagtgtgcaaggcacaagtaccgccattgatactcccttccggtagctgtacatccgaaaatgttgtgatgggatcatcaaaagaagcccccgtgtcactgcagaatttatctatggatgattgtggcagtttgaacaccgcaagttccaagatcagccaggtaaagaagcctgaaggagagaaggttgttaagaaaagagctaggccaggtgaaagtacacggccaagaccaaaggaccggcagcagatacaagagcgtgtaaaggagttacgtgagatagttccaaatagtgcaaagtgtagcattgatgctttgttggatcgaacaatcaagcatatgctctttctacaaagtgtgacaaagtatgcagaaaagattaagcaagccgatgaacctaatatgataagcaaggacaatggttctgtattgaatgataactcacatggagttgtcttgaaagacaatccaagtggtggaagcaatggaggtgcgacatgggcctatgaggttgcagggcagactatggtttgtccaataattgttgaggatcttgcaccgcctggtcagatgcttgttgagatgctatgtgaggaacgcggattttttctagagatagctgacaccatacggggatttggacttacaatcttgaagggattgatggaacttcgtgatggaaaaataatggctcgatttcttgttgaggcaaacaagaacgtgacgaggatggatatatttctatcacttgttcagttactgcagcagaacagccgcaatcgatcttcggatcagctagttaaggtcatgaacaatggcattccatcttttgtggatcaccaacaatctcctgcatcaattccggtttggccttgctgagagatagtaattgccacaaacaattcttgtaggccatatttttcaacgagcgttaatgggtacggtttggagttctgattagtacttggtggtgcccgccaactgttgatagaaacgacaggtgttaaggatgtagcaaacgcacattgcggtgtcccgtgtccgaagaaaattcagttagaagatgcacagattctcatgtaacaggtttaggaacattggtgttgtcgtttgtaatttggacactggtgtagtggtgtgaggtagcctatgttgttgtgaagttggtgtgcagtcagtagcaaaattgcctgtgttgctacggtaaataacatttgaaaattaagtgtctgtgttctctttttgatctgctcta

SEQ ID NO: 51045 - DNA, 2717 bp, Zea Mays
gtcagttttaattttttggctgtgctttagagctcttttgtggccttgtgggtggagaactggagacagagaagggaggagggagacaacaggataatatgtggccagtttcgttttgttttgaactggaactgctacagcgtttgtgttgcttactgtaggagaatgccactgtgaagatgaagcgagaaaagtggtcgacaagatggtcaatcaggtccatgtcgtcggagaaggccttataggaaggactctaataagtggggagcaccaatggatttctgatgacatccccttcagtttctctcagataagcgatgaagataacctaggtttatgtcagggttatacttggtggcaacatcagttcctaagtggaataaagactattgctgtagtacctatgccggcgtttggtgtggcacagttcggttccatgcaaaaggtttctgaaagcttgcagtttctggatcaagttaaaggtgcaacatttctgatggaaagtctttcatggtctccttcaacaaaagatgctcagaaagacgctttcatgtacaatccacaatttcaactcgattcttcaaccactagagagggtcttccacgcactaaggctgaaccagaaaactcaaggttggagaatgcaatatccatagattctctgaagaactttgcaattacttcaaatggtctgaatcctcacgtagtggccatgccagtgaactccaaatcgataagtactgttaaattaattcaaagtgacagcaatttgcggtacaataatatttcagagaatgctcaacaattcaaatccgccaaacaacctgattctagttgggcaagtgcagctacatgtttttcaaatttgaccaatcttcaaagaatagagcgcgggctgtcatgcacacctaacaaactacgacattgccttcaaagtgaaaaatcctcaggcttcctggattcgtactcatcaatagtttctacagatgctgagctgaaatgcactttgtttgacaatgccactccatttgttcagagtgatgtgatccaagaggttggtactagtggatctactcgtgcttgtgggctacatgaattgccaaatgaaatatgggcagaaattgcctcaggggaaatgaaaccagtcataaaagaagtcaacgaaaataatggctttctcgaaagcacagcatttgatccagtcatgaatgattggtggggtgacactgccctactagcaggaaacacttcacatctgagtgctactaccatgaactctgtttcaggacaggcaagtagtgaacaattatcaattgaagatagagggctgttttcggaatctgtctttgaggagctgcttggctttgatggtaatgtcggcccagttatggatagcaccgaaccattagctggttttgtctccggttgtcatttgccgaggtacaaccttcaaggttcactttcagtgtgcaaggcacaagtaccgccattgatactcccttccggtagctgtacatccgaaaatgttgtgatgggatcatcaaaagaagcccccgtgtcactgcagaatttatctatggatgattgtggcagtttgaacaccgcaagttccaagatcagccaggtaaagaagcctgaaggagagaaggttgttaagaaaagagctaggccaggtgaaagtacacggccaagaccaaaggaccggcagcagatacaagagcgtgtaaaggagttacgtgagatagttccaaatagtgcaaagtgtagcattgatgctttgttggatcgaacaatcaagcatatgctctttctacaaagtgtgacaaagtatgcagaaaagattaagcaagccgatgaacctaatatgataagcaaggacaatggttctgtattgaatgataactcacatggagttgtcttgaaagacaatccaagtggtggaagcaatggaggtgcgacatgggcctatgaggttgcagggcagactatggtttgtccaataattgttgaggatcttgcaccgcctggtcagatgcttgttgagatgctatgtgaggaacgcggattttttctagagatagctgacaccatacggggatttggacttacaatcttgaagggattgatggaacttcgtgatggaaaaataatggctcgatttcttgttgaggcaaacaagaacgtgacgaggatggatatatttctatcacttgttcagttactgcagcagaacagccgcaatcgatcttcggatcagctagttaaggtcatgaacaatggcattccatcttttgtggatcaccaacaatctcctgcatcaattccggtttggccttgctgagagatagtaattgccacaaacaattcttgtaggccatatttttcaacgagcgttaatgggtacggtttggagttctgattagtacttggtggtgcccgccaactgttgatagaaacgacaggtgttaaggatgtagcaaacgcacattgcggtgtcccgtgtccgaagaaaattcagttagaagatgcacagattctcatgtaacaggtttaggaacattggtgttgtcgtttgtaatttggacactggtgtagtggtgtgaggtagcctatgttgttgtgaagttggtgtgcagtcagtagcaaaattgcctgtgttgctacggtaaataacatttgaaaattaagtgtctgtgttctctttttgatctgctcta

SEQ ID NO: 51046 - DNA, 2504 bp, Zea Mays
cacacctacctccttgctgcagctgttcgcgctgaatgcaggttgcttactgtaggagaatgccactgtgaagatgaagcgagaaaagtggtcgacaagatggtcaatcaggtccatgtcgtcggagaaggccttataggaaggactctaataagtggggagcaccaatggatttctgatgacatccccttcagtttctctcagataagcgatgaagataacctaggtttatgtcagggttatacttggtggcaacatcagttcctaagtggaataaagactattgctgtagtacctatgccggcgtttggtgtggcacagttcggttccatgcaaaaggtttctgaaagcttgcagtttctggatcaagttaaaggtgcaacatttctgatggaaagtctttcatggtctccttcaacaaaagatgctcagaaagacgctttcatgtacaatccacaatttcaactcgattcttcaaccactagagagggtcttccacgcactaaggctgaaccagaaaactcaaggttggagaatgcaatatccatagattctctgaagaactttgcaattacttcaaatggtctgaatcctcacgtagtggccatgccagtgaactccaaatcgataagtactgttaaattaattcaaagtgacagcaatttgcggtacaataatatttcagagaatgctcaacaattcaaatccgccaaacaacctgattctagttgggcaagtgcagctacatgtttttcaaatttgaccaatcttcaaagaatagagcgcgggctgtcatgcacacctaacaaactacgacattgccttcaaagtgaaaaatcctcaggcttcctggattcgtactcatcaatagtttctacagatgctgagctgaaatgcactttgtttgacaatgccactccatttgttcagagtgatgtgatccaagaggttggtactagtggatctactcgtgcttgtgggctacatgaattgccaaatgaaatatgggcagaaattgcctcaggggaaatgaaaccagtcataaaagaagtcaacgaaaataatggctttctcgaaagcacagcatttgatccagtcatgaatgattggtggggtgacactgccctactagcaggaaacacttcacatctgagtgctactaccatgaactctgtttcaggacaggcaagtagtgaacaattatcaattgaagatagagggctgttttcggaatctgtctttgaggagctgcttggctttgatggtaatgtcggcccagttatggatagcaccgaaccattagctggttttgtctccggttgtcatttgccgaggtacaaccttcaaggttcactttcagtgtgcaaggcacaagtaccgccattgatactcccttccggtagctgtacatccgaaaatgttgtgatgggatcatcaaaagaagcccccgtgtcactgcagaatttatctatggatgattgtggcagtttgaacaccgcaagttccaagatcagccaggtaaagaagcctgaaggagagaaggttgttaagaaaagagctaggccaggtgaaagtacacggccaagaccaaaggaccggcagcagatacaagagcgtgtaaaggagttacgtgagatagttccaaatagtgcaaagtgtagcattgatgctttgttggatcgaacaatcaagcatatgctctttctacaaagtgtgacaaagtatgcagaaaagattaagcaagccgatgaacctaatatgataagcaaggacaatggttctgtattgaatgataactcacatggagttgtcttgaaagacaatccaagtggtggaagcaatggaggtgcgacatgggcctatgaggttgcagggcagactatggtttgtccaataattgttgaggatcttgcaccgcctggtcagatgcttgttgagatgctatgtgaggaacgcggattttttctagagatagctgacaccatacggggatttggacttacaatcttgaagggattgatggaacttcgtgatggaaaaataatggctcgatttcttgttgaggcaaacaagaacgtgacgaggatggatatatttctatcacttgttcagttactgcagcagaacagccgcaatcgatcttcggatcagctagttaaggccatatttttcaacgagcgttaatgggtacggtttggagttctgattagtacttggtggtgcccgccaactgttgatagaaacgacaggtgttaaggatgtagcaaacgcacattgcggtgtcccgtgtccgaagaaaattcagttagaagatgcacagattctcatgtaacaggtttaggaacattggtgttgtcgtttgtaatttggacactggtgtagtggtgtgaggtagcctatgttgttgtgaagttggtgtgcagtcagtagcaaaattgcctgtgttgctacggtaaataacatttgaaaattaagtgtctgtgttctctttttgatctgctcta

SEQ ID NO: 51047 - DNA, 2655 bp, Zea Mays
atctttttcatgtttgattcgactgatgttttgcgagtcttcttggttgatatatcttggtgcctgcaagtttatatgcttttaagcatataatttgaacagtacaagctcagccttataggaaggactctaataagtggggagcaccaatggatttctgatgacatccccttcagtttctctcagataagcgatgaagataacctaggtttatgtcagggttatacttggtggcaacatcagttcctaagtggaataaagactattgctgtagtacctatgccggcgtttggtgtggcacagttcggttccatgcaaaagtttctggatcaagttaaaggtgcaacatttctgatggaaagtctttcatggtctccttcaacaaaagatgctcagaaagacgctttcatgtacaatccacaatttcaactcgattcttcaaccactagagagggtcttccacgcactaaggctgaaccagaaaactcaaggttggagaatgcaatatccatagattctctgaagaactttgcaattacttcaaatggtctgaatcctcacgtagtggccatgccagtgaactccaaatcgataagtactgttaaattaattcaaagtgacagcaatttgcggtacaataatatttcagagaatgctcaacaattcaaatccgccaaacaacctgattctagttgggcaagtgcagctacatgtttttcaaatttgaccaatcttcaaagaatagagcgcgggctgtcatgcacacctaacaaactacgacattgccttcaaagtgaaaaatcctcaggcttcctggattcgtactcatcaatagtttctacagatgctgagctgaaatgcactttgtttgacaatgccactccatttgttcagagtgatgtgatccaagaggttggtactagtggatctactcgtgcttgtgggctacatgaattgccaaatgaaatatgggcagaaattgcctcaggggaaatgaaaccagtcataaaagaagtcaacgaaaataatggctttctcgaaagcacagcatttgatccagtcatgaatgattggtggggtgacactgccctactagcaggaaacacttcacatctgagtgctactaccatgaactctgtttcaggacaggcaagtagtgaacaattatcaattgaagatagagggctgttttcggaatctgtctttgaggagctgcttggctttgatggtaatgtcggcccagttatggatagcaccgaaccattagctggttttgtctccggttgtcatttgccgaggtacaaccttcaaggttcactttcagtgtgcaaggcacaagtaccgccattgatactcccttccggtagctgtacatccgaaaatgttgtgatgggatcatcaaaagaagcccccgtgtcactgcagaatttatctatggatgattgtggcagtttgaacaccgcaagttccaagatcagccaggtaaagaagcctgaaggagagaaggttgttaagaaaagagctaggccaggtgaaagtacacggccaagaccaaaggaccggcagcagatacaagagcgtgtaaaggagttacgtgagatagttccaaatagtgcaaagtgtagcattgatgctttgttggatcgaacaatcaagcatatgctctttctacaaagtgtgacaaagtatgcagaaaagattaagcaagccgatgaacctaatatgataagcaaggacaatggttctgtattgaatgataactcacatggagttgtcttgaaagacaatccaagtggtggaagcaatggaggtgcgacatgggcctatgaggttgcagggcagactatggtttgtccaataattgttgaggatcttgcaccgcctggtcagatgcttgttgagatgctatgtgaggaacgcggattttttctagagatagctgacaccatacggggatttggacttacaatcttgaagggattgatggaacttcgtgatggaaaaataatggctcgatttcttgttgaggtaaagaaactcttgttttgggacgccttttcttttatggtgcgcttctcaaatgaaagtcgtgtgttgtgattttacaggcaaacaagaacgtgacgaggatggatatatttctatcacttgttcagttactgcagcagaacagccgcaatcgatcttcggatcagctagttaaggtcatgaacaatggcattccatcttttgtggatcaccaacaatctcctgcatcaattccggtttggccttgctgagagatagtaattgccacaaacaattcttgtaggccatatttttcaacgagcgttaatgggtacggtttggagttctgattagtacttggtggtgcccgccaactgttgatagaaacgacaggtgttaaggatgtagcaaacgcacattgcggtgtcccgtgtccgaagaaaattcagttagaagatgcacagattctcatgtaacaggtttaggaacattggtgttgtcgtttgtaatttggacactggtgtagtggtgtgaggtagcctatgttgttgtgaagttggtgtgcagtcagtagcaaaattgcctgtgttgctacggtaaataacatttgaaaattaagtgtctgtgttctctttttgatctgctcta

SEQ ID NO: 51048 - DNA, 2591 bp, Zea Mays
ctttttcatgtttgattcgactgatgttttgcgagtcttcttggttgatatatcttggtgcctgcaagtttatatgcttttaagcatataatttgaacagtacaagctcagccttataggaaggactctaataagtggggagcaccaatggatttctgatgacatccccttcagtttctctcagataagcgatgaagataacctaggtttatgtcagggttatacttggtggcaacatcagttcctaagtggaataaagactattgctgtagtacctatgccggcgtttggtgtggcacagttcggttccatgcaaaaggtttctgaaagcttgcagtttctggatcaagttaaaggtgcaacatttctgatggaaagtctttcatggtctccttcaacaaaagatgctcagaaagacgctttcatgtacaatccacaatttcaactcgattcttcaaccactagagagggtcttccacgcactaaggctgaaccagaaaactcaaggttggagaatgcaatatccatagattctctgaagaactttgcaattacttcaaatggtctgaatcctcacgtagtggccatgccagtgaactccaaatcgataagtactgttaaattaattcaaagtgacagcaatttgcggtacaataatatttcagagaatgctcaacaattcaaatccgccaaacaacctgattctagttgggcaagtgcagctacatgtttttcaaatttgaccaatcttcaaagaatagagcgcgggctgtcatgcacacctaacaaactacgacattgccttcaaagtgaaaaatcctcaggcttcctggattcgtactcatcaatagtttctacagatgctgagctgaaatgcactttgtttgacaatgccactccatttgttcagagtgatgtgatccaagaggttggtactagtggatctactcgtgcttgtgggctacatgaattgccaaatgaaatatgggcagaaattgcctcaggggaaatgaaaccagtcataaaagaagtcaacgaaaataatggctttctcgaaagcacagcatttgatccagtcatgaatgattggtggggtgacactgccctactagcaggaaacacttcacatctgagtgctactaccatgaactctgtttcaggacaggcaagtagtgaacaattatcaattgaagatagagggctgttttcggaatctgtctttgaggagctgcttggctttgatggtaatgtcggcccagttatggatagcaccgaaccattagctggttttgtctccggttgtcatttgccgaggtacaaccttcaaggttcactttcagtgtgcaaggcacaagtaccgccattgatactcccttccggtagctgtacatccgaaaatgttgtgatgggatcatcaaaagaagcccccgtgtcactgcagaatttatctatggatgattgtggcagtttgaacaccgcaagttccaagatcagccaggtaaagaagcctgaaggagagaaggttgttaagaaaagagctaggccaggtgaaagtacacggccaagaccaaaggaccggcagcagatacaagagcgtgtaaaggagttacgtgagatagttccaaatagtgcaaagtgtagcattgatgctttgttggatcgaacaatcaagcatatgctctttctacaaagtgtgacaaagtatgcagaaaagattaagcaagccgatgaacctaatatgataagcaaggacaatggttctgtattgaatgataactcacatggagttgtcttgaaagacaatccaagtggtggaagcaatggaggtgcgacatgggcctatgaggttgcagggcagactatggtttgtccaataattgttgaggatcttgcaccgcctggtcagatgcttgttgagatgctatgtgaggaacgcggattttttctagagatagctgacaccatacggggatttggacttacaatcttgaagggattgatggaacttcgtgatggaaaaataatggctcgatttcttgttgaggcaaacaagaacgtgacgaggatggatatatttctatcacttgttcagttactgcagcagaacagccgcaatcgatcttcggatcagctagttaaggtcatgaacaatggcattccatcttttgtggatcaccaacaatctcctgcatcaattccggtttggccttgctgagagatagtaattgccacaaacaattcttgtaggccatatttttcaacgagcgttaatgggtacggtttggagttctgattagtacttggtggtgcccgccaactgttgatagaaacgacaggtgttaaggatgtagcaaacgcacattgcggtgtcccgtgtccgaagaaaattcagttagaagatgcacagattctcatgtaacaggtttaggaacattggtgttgtcgtttgtaatttggacactggtgtagtggtgtgaggtagcctatgttgttgtgaagttggtgtgcagtcagtagcaaaattgcctgtgttgctacggtaaataacatttgaaaattaagtgtctgtgttctctttttgatctgctcta

SEQ ID NO: 51049 - DNA, 425 bp, Zea Mays
gtccttatctgatagctttgcacaccacagactaccaacaacctatgctcttcctcaatacccttgccgtcagcgtgcttgtggtcgccaaactaccgaatatgcacaaggtcaggatttttggaataaatgctgagagctaaacagcgtcatccttcaccagacattttacctatatgctttttcagaacggtctgtatgttccccttctagtgctttagttgggctcattcatcagagtaccatagtttaaaagttgttagcagatgggccttggtcgttgtatagagagatgctcagaggctggactggacatgtcgctgctgtacatctgatgtgcacagattctgtacacccttaatgttgctatatggtttgttgcgagcatctgtcagttgctatatatgtatgtatagtatcattct

SEQ ID NO: 51050 - DNA, 666 bp, Zea Mays
cccctgatgccactgcgccgcatccatgcatgcaaggatcccaattccgctcctcgccagcggttctcccgtgtggtggttgttgcctccgaggggcgaggaagaagacgtacgagctgaggacgactacgacgacgaggacgaggacgaggcgcaggaggaaggaggaggaggagcgtactggagctggatgggacgggcgagggaggaggaatgtcctgtgtagtggaattgctccccggcccccttctctagtcttctccttcatatgtcatgagacgagatagtgcgattctttttctcgcaatatttttatgcgtctagctaggctcgctcgctggaggctgctgctgctgctggtgctggagcgaagcgaagcgaggaggaagagcaaccgaaatcggtgccccggcagttttcggaaacgcgtcaaaaaatttcgtccatgtaacgcttttccaagcgtgctagctttgtccgtgtacgtagcgatttttttttgggccgggtccggagggagctacagaaaaaaccagtcggtgacagcagccagccgcgcgcgcagcccttggcatgatggggcctcgcacgtgcgtagggaaccgtgccacgtgcgagcaactaaccgggggtgtggttttagtgctttaattaaacacatcctgg

SEQ ID NO: 51051 - DNA, 601 bp, Zea Mays
ccccctccagccatcagtagccacgggctatcctgcgcccaccacctgccctacccctcccctcccctcccctccctcctgccttcgtcctgcccgagctgcccggcgcctctgtcctcctccgggctccacaggccttgccaggcatggggttggccttgttgaaaccaccagatttgtgcctcctagaccccagttcctcggcaacaaggtggtaatatatgctggaagcctattgcataacttcaaccattgattccgttgaagctaatgtcatggaatagaattctcaccactttgttgtagcaatacataaatttgatgaatggattcaactagtgtcatagaatgatagaatggacccgaaatctatattttttgtattgtcacattttgtctcgatgatcatggtgtttgtcttagttctacaaatgacttgggatcttgatattttccttttttcacctactactatgttgcaattttgtttaccagtgccaccatgcaagtgcagtatagcaacagtgtgctagtagtatatctcattgtaatacggtagcaatgtcaacccacggtgcagtccacaagcaggacaaattag

SEQ ID NO: 51052 - DNA, 692 bp, Zea Mays
taaactagaattccaccccttcccggccccgtcacctctgtgcggcttggaatttaattctggcgccagttgtaggggattgggactgccaacttgcccggccatctgctgctggcctgctgctgatatgctacaacaacgcctacttcgccaaggtcgggggcatcagcctggtggagatgaactacctggaggtggacttcctgttcggcgtcggcttcgacctcaacgtggcgccggagacgttcggcgactactgcgccgtgctgcggtcggagctactgtgcgcggaggctgccccccgcgccactcaggctgcagcactgctgcctgtccgaggatgacgccggggcccggatgcagcgcccagcagcagctcgctgcatgaatgaaagaaacctaagcccatcgatcgacgactcatccggtggcttgggcgcaggagttgtaagccggtgcaaatttttccaaattattagatgttttgtcttttctagattataaagctttcgatatatacacacatctatatatacagtgtgtctagaggtgtagtggtggtgtaggtcgtcgtcggttgtaccagctgctacagtagattgtgtatacagtgctggtgtctttggtgactttctgaatcgtgtgcgtgttcgttccggtagcgaaggtaacttgaacaagcaatgaggtgc

SEQ ID NO: 51053 - DNA, 757 bp, Zea Mays
gcccggccatctgctgctggcctgctgctgatgtttgcccccttgctcacttgtcacttcacttcttcctcatgcctgcagggtcccaggagcatccacacctctagtctcttcttgttgctttctgctttagtctttgcttattgggcaacttgccattctttaaaaaggctccgttcggtggcctgtttgatgctacaacaacgcctacttcgccaaggtcgggggcatcagcctggtggagatgaactacctggaggtggacttcctgttcggcgtcggcttcgacctcaacgtggcgccggagacgttcggcgactactgcgccgtgctgcggtcggagctactgtgcgcggaggctgccccccgcgccactcaggctgcagcactgctgcctgtccgaggatgacgccggggcccggatgcagcgcccagcagcagctcgctgcatgaatgaaagaaacctaagcccatcgatcgacgactcatccggtggcttgggcgcaggagttgtaagccggtgcaaatttttccaaattattagatgttttgtcttttctagattataaagctttcgatatatacacacatctatatatacagtgtgtctagaggtgtagtggtggtgtaggtcgtcgtcggttgtaccagctgctacagtagattgtgtatacagtgctggtgtctttggtgactttctgaatcgtgtgcgtgttcgttccggtagcgaaggtaacttgaacaagcaatgaggtgc

SEQ ID NO: 51054 - DNA, 2264 bp, Zea Mays
gttggccgcaattttacacaccccaaggtctcgcaaatcaggttgcggtcctcgtaccaaccctggccatgttcggttcggttgcctatcgcctcctcctgctcctcttccgccgccgccgctgccgctgctccctaggtgaacccgtcgtcgcctcgcctgggcccacaacgccctcctccgcctgtgagcaaggcacccctctcagtcttgtgcagggcgagttgctgccatggcggttgttttttgcgggcacgagctctgcccgcctccagtcttggatgtcgtggccaggtgcctacttccccctccctccctccactcgagactccatgtcgccgccacacgacactacgcatccgctcttcttcctcccctcgtctcggcggctagcgtccgctccctcgacgcctccgtccatgcccggctccagcactcgctggctccccgagggagttgaatgaagaaaggaagatcaaggattgaagcagtttacgcatggccctgagattgcattaactctttctcagaatgatattgagctcctggccttcctgttggccatacgagaatgaggtgtataggtagaagtccaagagaaacatccatagccggttggggatgtccggttctgagctgccacatagctgatgggatttcaagatggcatgccagctgctcgtgcataatcaggtcaagccaatgggggatttattaggagtaaatcgttgtattcttgatgtcagattgttgagtgttagaggtcaatggatagggatgtaagtctcatattttgggttattggtccttccagaacttgataaaagaaactaaagtggcatgccacctgattaatttagcatttaggtggagaactgaatcttctgaaatcaatgtatggtgtgctgacattctcaatactgaatagcactggatctgatgttttcaattttttcaccaatttaaagacacttctatgctctccatcaaggatttccctgttttgctgcattcattatatacttaaaagaagggaattttatagtaaaaagtcacaagttataacaatttaagaggctacaactttctggagctttacatccttgttatggttctataagtcaggtttttttaaatcttagagattgagaaagaaaagactaatgtgttttcactttattttctaattgcacactatcattaacatgatcaaaggtgattgattcttaaatggttaacaatataataccttccaaattgatgctactatttaatgcaaactgtattttccttaataaattccttatatttgactatagatttggaatgcatgtataccctatattatattgcaggatggagggagtaatgtgttagttgcatttttgccattaaccaaggttcatgtattttgttttggccagccggttcactattacctacaaactttattcattcactttacttttatttgttttcagtgggttttgcatgactggggtgatggtgattgtaaagatactaaagaactgtaagaaagctatacctcccatgattgcagaaggaaagatgataattctcgatatggttgttggaggccagttgccaaacattaagtacaaagatattcatgtcttgtttgatctcttcatcatgtatgtctcatgtctgtcaatggcgctgagcgagacgaacaaaagtggaaaaacatcattttcgaagctggatttagcgactacaaaaccatactcgttctaggatgggagagtattgaatgcttctctagatactattcttggtccatcaaatctgcttgacccaaatgcaagttttgctcaaatgtggcaaaaaatgattgtctcaccaattgtgagcacacctgttttcagcaaagttccagagaagaaaaagacggaatggaactcaaaatttggtggccgctcaagtggaattcatatatacttagttaggctcaacgttagcttaaagcttaaatagttgatgacctagtttttaactagtaattttagtttggatttagagtacacttatatatgagttatttgacaatgattatttatgatatacttaatgatacttatttatattatgttaattataatgttatcaaatatatatatatgtgtatgtatatttctcttttaaattattatagtgtggtatctccaatattataaattgaagaatgtattgacatgtaagtcattttatttaatctcaataagacggttctcaaaacgttc

SEQ ID NO: 51055 - DNA, 1305 bp, Zea Mays
gttggccgcaattttacacaccccaaggtctcgcaaatcaggttgcggtcctcgtaccaaccctggccatgttcggttcggttgcctatcgcctcctcctgctcctcttccgccgccgccgctgccgctgctccctaggtgaacccgtcgtcgcctcgcctgggcccacaacgccctcctccgcctgtgagcaaggcacccctctcagtcttgtgcagggcgagttgctgccatggcggttgttttttgcgggcacgagctctgcccgcctccagtcttggatgtcgtggccaggtgcctacttccccctccctccctccactcgagactccatgtcgccgccacacgacactacgcatccgctcttcttcctcccctcgtctcggcggctagcgtccgctccctcgacgcctccgtccatgcccggctccagcactcgctggctccccgagggagttgaatgaagaaaggaagatcaaggattgaagcagtttacgcatggccctgagattgcattaactctttctcagaatgatattgagctcctggccttcctgttggccatacgagaatgaggtgtataggtagaagtccaagagaaacatccatagccggttggggatgtccggttctgagctgccacatagctgatgggatttcaagatggcatgccagctgctcgtgcataatcagtgggttttgcatgactggggtgatggtgattgtaaagatactaaagaactgtaagaaagctatacctcccatgattgcagaaggaaagatgataattctcgatatggatgggagagtattgaatgcttctctagatactattcttggtccatcaaatctgcttgacccaaatgcaagttttgctcaaatgtggcaaaaaatgattgtctcaccaattgtgagcacacctgttttcagcaaagttccagagaagaaaaagacggaatggaactcaaaatttggtggccgctcaagtggaattcatatatacttagttaggctcaacgttagcttaaagcttaaatagttgatgacctagtttttaactagtaattttagtttggatttagagtacacttatatatgagttatttgacaatgattatttatgatatacttaatgatacttatttatattatgttaattataatgttatcaaatatatatatatgtgtatgtatatttctcttttaaattattatagtgtggtatctccaatattataaattgaagaatgtattgacatgtaagtcattttatttaatctcaataagacggttctcaaaacgttc

SEQ ID NO: 51056 - DNA, 1440 bp, Zea Mays
gttggccgcaattttacacaccccaaggtctcgcaaatcaggttgcggtcctcgtaccaaccctggccatgttcggttcggttgcctatcgcctcctcctgctcctcttccgccgccgccgctgccgctgctccctaggtgaacccgtcgtcgcctcgcctgggcccacaacgccctcctccgcctgtgagcaaggcacccctctcagtcttgtgcagggcgagttgctgccatggcggttgttttttgcgggcacgagctctgcccgcctccagtcttggatgtcgtggccaggtgcctacttccccctccctccctccactcgagactccatgtcgccgccacacgacactacgcatccgctcttcttcctcccctcgtctcggcggctagcgtccgctccctcgacgcctccgtccatgcccggctccagcactcgctggctccccgagggagttgaatgaagaaaggaagaatgatattgagctcctggccttcctgttggccatacgagaatgaggtgtataggtagaagtccaagagaaacatccatagccggttggggatgtccggttctgagctgccacatagctgatgggatttcaagatggcatgccagctgctcgtgcataatcagtgggttttgcatgactggggtgatggtgattgtaaagatactaaagaactgtaagaaagctatacctcccatgattgcagaaggaaagatgataattctcgatatggttgttggaggccagttgccaaacattaagtacaaagatattcatgtcttgtttgatctcttcatcatgtatgtctcatgtctgtcaatggcgctgagcgagacgaacaaaagtggaaaaacatcattttcgaagctggatttagcgactacaaaaccatactcgttctaggtgttcgattcatcattgaggatgggagagtattgaatgcttctctagatactattcttggtccatcaaatctgcttgacccaaatgcaagttttgctcaaatgtggcaaaaaatgattgtctcaccaattgtgagcacacctgttttcagcaaagttccagagaagaaaaagacggaatggaactcaaaatttggtggccgctcaagtggaattcatatatacttagttaggctcaacgttagcttaaagcttaaatagttgatgacctagtttttaactagtaattttagtttggatttagagtacacttatatatgagttatttgacaatgattatttatgatatacttaatgatacttatttatattatgttaattataatgttatcaaatatatatatatgtgtatgtatatttctcttttaaattattatagtgtggtatctccaatattataaattgaagaatgtattgacatgtaagtcattttatttaatctcaataagacggttctcaaaacgttc

SEQ ID NO: 51057 - DNA, 1529 bp, Zea Mays
gttggccgcaattttacacaccccaaggtctcgcaaatcaggttgcggtcctcgtaccaaccctggccatgttcggttcggttgcctatcgcctcctcctgctcctcttccgccgccgccgctgccgctgctccctaggtgaacccgtcgtcgcctcgcctgggcccacaacgccctcctccgcctgtgagcaaggcacccctctcagtcttgtgcagggcgagttgctgccatggcggttgttttttgcgggcacgagctctgcccgcctccagtcttggatgtcgtggccaggtgcctacttccccctccctccctccactcgagactccatgtcgccgccacacgacactacgcatccgctcttcttcctcccctcgtctcggcggctagcgtccgctccctcgacgcctccgtccatgcccggctccagcactcgctggctccccgagggagttgaatgaagaaaggaagatcaaggattgaagcagtttacgcatggccctgagattgcattaactctttctcagaatgatattgagctcctggccttcctgttggccatacgagaatgaggtgtataggtagaagtccaagagaaacatccatagccggttggggatgtccggttctgagctgccacatagctgatgggatttcaagatggcatgccagctgctcgtgcataatcaggtcaagccaatgggggatttattaggagtaaattgggttttgcatgactggggtgatggtgattgtaaagatactaaagaactgtaagaaagctatacctcccatgattgcagaaggaaagatgataattctcgatatggttgttggaggccagttgccaaacattaagtacaaagatattcatgtcttgtttgatctcttcatcatgtatgtctcatgtctgtcaatggcgctgagcgagacgaacaaaagtggaaaaacatcattttcgaagctggatttagcgactacaaaaccatactcgttctaggtgttcgattcatcattgaggatgggagagtattgaatgcttctctagatactattcttggtccatcaaatctgcttgacccaaatgcaagttttgctcaaatgtggcaaaaaatgattgtctcaccaattgtgagcacacctgttttcagcaaagttccagagaagaaaaagacggaatggaactcaaaatttggtggccgctcaagtggaattcatatatacttagttaggctcaacgttagcttaaagcttaaatagttgatgacctagtttttaactagtaattttagtttggatttagagtacacttatatatgagttatttgacaatgattatttatgatatacttaatgatacttatttatattatgttaattataatgttatcaaatatatatatatgtgtatgtatatttctcttttaaattattatagtgtggtatctccaatattataaattgaagaatgtattgacatgtaagtcattttatttaatctcaataagacggttctcaaaacgttc

SEQ ID NO: 51058 - DNA, 2284 bp, Zea Mays
gttggccgcaattttacacaccccaaggtctcgcaaatcaggttgcggtcctcgtaccaaccctggccatgttcggttcggttgcctatcgcctcctcctgctcctcttccgccgccgccgctgccgctgctccctaggtgaacccgtcgtcgcctcgcctgggcccacaacgccctcctccgcctgtgagcaaggcacccctctcagtcttgtgcagggcgagttgctgccatggcggttgttttttgcgggcacgagctctgcccgcctccagtcttggatgtcgtggccaggtgcctacttccccctccctccctccactcgagactccatgtcgccgccacacgacactacgcatccgctcttcttcctcccctcgtctcggcggctagcgtccgctccctcgacgcctccgtccatgcccggctccagcactcgctggctccccgagggagttgaatgaagaaaggaagatcaaggattgaagcagtttacgcatggccctgagattgcattaactctttctcagaatgatattgagctcctggccttcctgttggccatacgagaatgaggtgtataggtagaagtccaagagaaacatccatagccggttggggatgtccggttctgagctgccacatagctgatgggatttcaagatggcatgccagctgctcgtgcataatcaggtcaagccaatgggggatttattaggagtaaatcgttgtattcttgatgtcagattgttgagtgttagaggtcaatggatagggatgtaagtctcatattttgggttattggtccttccagaacttgataaaagaaactaaagtggcatgccacctgattaatttagcatttaggtggagaactgaatcttctgaaatcaatgtatggtgtgctgacattctcaatactgaatagcactggatctgatgttttcaattttttcaccaatttaaagacacttctatgctctccatcaaggatttccctgttttgctgcattcattatatacttaaaagaagggaattttatagtaaaaagtcacaagttataacaatttaagaggctacaactttctggagctttacatccttgttatggttctataagtcaggtttttttaaatcttagagattgagaaagaaaagactaatgtgttttcactttattttctaattgcacactatcattaacatgatcaaaggtgattgattcttaaatggttaacaatataataccttccaaattgatgctactatttaatgcaaactgtattttccttaataaattccttatatttgactatagatttggaatgcatgtataccctatattatattgcaggatggagggagtaatgtgttagttgcatttttgccattaaccaaggttcatgtattttgttttggccagccggttcactattacctacaaactttattcattcactttacttttatttgttttcagtgggttttgcatgactggggtgatggtgattgtaaagatactaaagaactgtaagaaagctatacctcccatgattgcagaaggaaagatgataattctcgatatggttgttggaggccagttgccaaacattaagtacaaagatattcatgtcttgtttgatctcttcatcatgtatgtctcatgtctgtcaatggcgctgagcgagacgaacaaaagtggaaaaacatcattttcgaagctggatttagcgactacaaaaccatactcgttctaggtgttcgattcatcattgaggatgggagagtattgaatgcttctctagatactattcttggtccatcaaatctgcttgacccaaatgcaagttttgctcaaatgtggcaaaaaatgattgtctcaccaattgtgagcacacctgttttcagcaaagttccagagaagaaaaagacggaatggaactcaaaatttggtggccgctcaagtggaattcatatatacttagttaggctcaacgttagcttaaagcttaaatagttgatgacctagtttttaactagtaattttagtttggatttagagtacacttatatatgagttatttgacaatgattatttatgatatacttaatgatacttatttatattatgttaattataatgttatcaaatatatatatatgtgtatgtatatttctcttttaaattattatagtgtggtatctccaatattataaattgaagaatgtattgacatgtaagtcattttatttaatctcaataagacggttctcaaaacgttc

SEQ ID NO: 51059 - DNA, 2132 bp, Zea Mays
gcgtgctggggagacagcctaaacgcaaccagtagccggagtccgaagtcgggccctcccttctgcccgcgaccgcgttagctaaacccgacccagcaaccaggccaccgctcctttcctctccgatccggatctccccacccgctccggcgagccatcgccgcgtcgcctccacgcgaccgactacttctcatatcaatctatctatccggcttacccgccgccgcacgcaccaaggttgcgttcaccatattacctgtttgcttatcttctcccgagcccagcaaaccctagccgccgccacccatggacatagaggccgacggacgattcggcaacaaacgagtgcacaatcgcctaggcccgggctccggcggcgctccaccatctaccaacggaaaggtctgcaactactggcgtgccggtcggtgcaaccgctttccgtgccccttcctccacagcgagctccccgaggctgcgccgcccaagcgccccactggacccggggggaacgtatggcgcaaccccaacaccggaggacgaggaggtggccatcacaatagatgggggaagggcccaggagggggcagcgggattgcgagccacaagccgcctgagaggccctgcaagtactttctcgccggtaccgaatgtagctatggcgagaggtgccgctatccgcacagctactgcataagcgatagtatcgcgatgcttaccttgctcaagggacacgagcagggtgtcacgggcattgcactgcccgctgggtcagacaagctttattccgggagtaaggatggaactgttcgcatgtgggattgccaaactgggcagtgtgctggtgtcatcaccatgggtcgtgaggttgggtgtatgatcattgaaggtccgtggttatttgttggaatacctgatgcagtgaaggtttggaatatgcaaacagcagcggaaatgagccttactggaccaactgggcaagtctatgcactcgccgttgccagtgagttactctttgctgcaacacaagctgggaggattttagcatggagatttagtgccgcaactaactgttttgagccagctgcttctctagatggccataagcttgctgttgtttcattgatagtaggaggcatgaggctttattctgcttcaatggataaaactatcagagtgtgaatttcaggtatgggatttggcaactttgcagtgcatacagactctttctgatcataccgatgttgttatgtccgtgctttgctgggatcaatttctattatcttgctctttggatcaaacaataaaagtttgggccgctacagagagtggaaacttagaagtaacatatacacacaaagaggatcagggtgcacttgccctcagtggtatgcctgacgcacagtcaaaacctgtgctactgtgttcattaaatgacaacactgtccgcttatatgatctgccatcgttcagtgacagaggcagattattctccaaaaaagaaattagggcaatacagatgggtcctggtggtttattttttaccggggatggaactggtgagctcaaggtttggcagtgggtagatttagcccaaacctaatgaacatagtgtgctagattagttttctctcatgtattttatgagggagttcgtacaaatacgcataatgagttcaggttgtggtcggtggccagttctttttttgtaatatgccccacatttgtcacaaatgacacgagattcggtggatctgttcggcagtaaaatcagaagcagagtatgtgttatggactgtagttttgtcctggaatggattttaagacaggagaataattggttgttgtaatatgtaaggcactggaacgagcaattctgacgactgcttggaggtggtggcagtttcaaaaggatatatgctaatatacaagggtttgttcagccgcatttgcaaatgagcaggtcttttcacggccgtaccatttttcacaactgttgaatgatcatgttttttttgtaacctcgatcagtcatttggctcggtttttggaagctgcacacagaacctgtgccgatatttatctatatttgttcctggatagcttccaggctcaggctctgatgatatttt

SEQ ID NO: 51060 - DNA, 2163 bp, Zea Mays
gcgtgctggggagacagcctaaacgcaaccagtagccggagtccgaagtcgggccctcccttctgcccgcgaccgcgttagctaaacccgacccagcaaccaggccaccgctcctttcctctccgatccggatctccccacccgctccggcgagccatcgccgcgtcgcctccacgcgaccgactacttctcatatcaatctatctatccggcttacccgccgccgcacgcaccaaggttgcgttcaccatattacctgtttgcttatcttctcccgagcccagcaaaccctagccgccgccacccatggacatagaggccgacggacgattcggcaacaaacgagtgcacaatcgcctaggcccgggctccggcggcgctccaccatctaccaacggaaaggtctgcaactactggcgtgccggtcggtgcaaccgctttccgtgccccttcctccacagcgagctccccgaggctgcgccgcccaagcgccccactggacccggggggaacgtatggcgcaaccccaacaccggaggacgaggaggtggccatcacaatagatgggggaagggcccaggagggggcagcgggattgcgagccacaagccgcctgagaggccctgcaagtactttctcgccggtaccgaatgtagctatggcgagaggtgccgctatccgcacagctactgcataagcgatagtatcgcgatgcttaccttgctcaagggacacgagcagggtgtcacgggcattgcactgcccgctgggtcagacaagctttattccgggagtaaggatggaactgttcgcatgtgggattgccaaactgggcagtgtgctggtgtcatcaccatgggtcgtgaggttgggtgtatgatcattgaaggtccgtggttatttgttggaatacctgatgcagtgaaggctcaaggcacgtctctcctgcctatcatctgattggacattaggtttggaatatgcaaacagcagcggaaatgagccttactggaccaactgggcaagtctatgcactcgccgttgccagtgagttactctttgctgcaacacaagctgggaggattttagcatggagatttagtgccgcaactaactgttttgagccagctgcttctctagatggccataagcttgctgttgtttcattgatagtaggaggcatgaggctttattctgcttcaatggataaaactatcagagtatgggatttggcaactttgcagtgcatacagactctttctgatcataccgatgttgttatgtccgtgctttgctgggatcaatttctattatcttgctctttggatcaaacaataaaagtttgggccgctacagagagtggaaacttagaagtaacatatacacacaaagaggatcagggtgcacttgccctcagtggtatgcctgacgcacagtcaaaacctgtgctactgtgttcattaaatgacaacactgtccgcttatatgatctgccatcgttcagtgacagaggcagattattctccaaaaaagaaattagggcaatacagatgggtcctggtggtttattttttaccggggatggaactggtgagctcaaggtttggcagtgggtagatttagcccaaacctaatgaacatagtgtgctagattagttttctctcatgtattttatgagggagttcgtacaaatacgcataatgagttcaggttgtggtcggtggccagttctttttttgtaatatgccccacatttgtcacaaatgacacgagattcggtggatctgttcggcagtaaaatcagaagcagagtatgtgttatggactgtagttttgtcctggaatggattttaagacaggagaataattggttgttgtaatatgtaaggcactggaacgagcaattctgacgactgcttggaggtggtggcagtttcaaaaggatatatgctaatatacaagggtttgttcagccgcatttgcaaatgagcaggtcttttcacggccgtaccatttttcacaactgttgaatgatcatgttttttttgtaacctcgatcagtcatttggctcggtttttggaagctgcacacagaacctgtgccgatatttatctatatttgttcctggatagcttccaggctcaggctctgatgatatttt

SEQ ID NO: 51061 - DNA, 1195 bp, Zea Mays
ctcctgcctatcatctgattggacattaggtttggaatatgcaaacagcagcggaaatgagccttactggaccaactgggcaagtctatgcactcgccgttgccagctgggaggattttagcatggagatttagtgccgcaactaactgttttgagccagctgcttctctagatggccataagcttgctgttgtttcattgatagtaggaggcatgaggctttattctgcttcaatggataaaactatcagagtatgggatttggcaactttgcagtgcatacagactctttctgatcataccgatgttgttatgtccgtgctttgctgggatcaatttctattatcttgctctttggatcaaacaataaaagtttgggccgctacagagagtggaaacttagaagtaacatatacacacaaagaggatcagggtgcacttgccctcagtggtatgcctgacgcacagtcaaaacctgtgctactgtgttcattaaatgacaacactgtccgcttatatgatctgccatcgttcagtgacagaggcagattattctccaaaaaagaaattagggcaatacagatgggtcctggtggtttattttttaccggggatggaactggtgagctcaaggtttggcagtgggtagatttagcccaaacctaatgaacatagtgtgctagattagttttctctcatgtattttatgagggagttcgtacaaatacgcataatgagttcaggttgtggtcggtggccagttctttttttgtaatatgccccacatttgtcacaaatgacacgagattcggtggatctgttcggcagtaaaatcagaagcagagtatgtgttatggactgtagttttgtcctggaatggattttaagacaggagaataattggttgttgtaatatgtaaggcactggaacgagcaattctgacgactgcttggaggtggtggcagtttcaaaaggatatatgctaatatacaagggtttgttcagccgcatttgcaaatgagcaggtcttttcacggccgtaccatttttcacaactgttgaatgatcatgttttttttgtaacctcgatcagtcatttggctcggtttttggaagctgcacacagaacctgtgccgatatttatctatatttgttcctggatagcttccaggctcaggctctgatgatatttt

SEQ ID NO: 51062 - DNA, 1231 bp, Zea Mays
ctgcctatcatctgattggacattaggtttggaatatgcaaacagcagcggaaatgagccttactggaccaactgggcaagtctatgcactcgccgttgccagtgagttactctttgctgcaacacaagctgggaggattttagcatggagatttagtgccgcaactaactgttttgagccagctgcttctctagatggccataagcttgctgttgtttcattgatagtaggaggcatgaggctttattctgcttcaatggataaaactatcagagtgtgaatttcaggtatgggatttggcaactttgcagtgcatacagactctttctgatcataccgatgttgttatgtccgtgctttgctgggatcaatttctattatcttgctctttggatcaaacaataaaagtttgggccgctacagagagtggaaacttagaagtaacatatacacacaaagaggatcagggtgcacttgccctcagtggtatgcctgacgcacagtcaaaacctgtgctactgtgttcattaaatgacaacactgtccgcttatatgatctgccatcgttcagtgacagaggcagattattctccaaaaaagaaattagggcaatacagatgggtcctggtggtttattttttaccggggatggaactggtgagctcaaggtttggcagtgggtagatttagcccaaacctaatgaacatagtgtgctagattagttttctctcatgtattttatgagggagttcgtacaaatacgcataatgagttcaggttgtggtcggtggccagttctttttttgtaatatgccccacatttgtcacaaatgacacgagattcggtggatctgttcggcagtaaaatcagaagcagagtatgtgttatggactgtagttttgtcctggaatggattttaagacaggagaataattggttgttgtaatatgtaaggcactggaacgagcaattctgacgactgcttggaggtggtggcagtttcaaaaggatatatgctaatatacaagggtttgttcagccgcatttgcaaatgagcaggtcttttcacggccgtaccatttttcacaactgttgaatgatcatgttttttttgtaacctcgatcagtcatttggctcggtttttggaagctgcacacagaacctgtgccgatatttatctatatttgttcctggatagcttccaggctcaggctctgatgatatttt

SEQ ID NO: 51063 - DNA, 791 bp, Zea Mays
gacctgcctctcagtcgccatggcaaagggtgcacttgccctcagtggtatgcctgacgcacagtcaaaacctgtgctactgtgttcattaaatgacaacactgtccgcttatatgatctgccatcgttcagtgacagaggcagattattctccaaaaaagaaattagggcaatacagatgggtcctggtggtttattttttaccggggatggaactggtgagctcaaggtttggcagtgggtagatttagcccaaacctaatgaacatagtgtgctagattagttttctctcatgtattttatgagggagttcgtacaaatacgcataatgagttcaggttgtggtcggtggccagttctttttttgtaatatgccccacatttgtcacaaatgacacgagattcggtggatctgttcggcagtaaaatcagaagcagagtatgtgttatggactgtagttttgtcctggaatggattttaagacaggagaataattggttgttgtaatatgtaaggcactggaacgagcaattctgacgactgcttggaggtggtggcagtttcaaaaggatatatgctaatatacaagggtttgttcagccgcatttgcaaatgagcaggtcttttcacggccgtaccatttttcacaactgttgaatgatcatgttttttttgtaacctcgatcagtcatttggctcggtttttggaagctgcacacagaacctgtgccgatatttatctatatttgttcctggatagcttccaggctcaggctctgatgatatttt

SEQ ID NO: 51064 - DNA, 3174 bp, Zea Mays
ggagatgggggaaaggaaaaaagaaacaggagtcaggagcagaggccaggggtggcgaggcatttttggccacaggggcgcagccaaaaggcgtcgtcccatcgaatccgccacgtccgcatcggcgacccggcaggaacacggccgcgggcagagtgcctgtctccgccacaaccccggcgaggcccccctccccctccgtccacacctcctcccctccgtcctctctctctctctctctctctctccctgccgcgtcgccgctataaatacctcttgccgccgcctccttccctcccatctccaacgccaagcacatactgacacacacacacacacacaagcccattgcattcgccaaacattcgcccacgcgccattgtagcgcacgagctcccgaagccctcatcgccgtgccgttcgtctcgccggatcgatcgctccgcccctgctcctggctttggtgccgtatgcccgtccgtctccatagggcttgcattctctctgctttgatttgacggtacccagctgaagcacacaaattgcctccgtttgccggtcctgtgcgtgcgcgatcgagttttgttgatggtcatctagcaggatcgcaggagttgacgagccgcacgccctagctctttcaggtgctgaaaccaagatggttaatttcggtaagaaattgatggcagaccagttggaggagtggcgagagtactatattaattataagatgatgaagaaaaaggtaaaacagtatgtacagcagacccaaactggtggaaaaaatcgtgaccaggttcttaaggagttctcaaggatgcttgatgatcagattgaaaagattgtgctatttcttctgcaacaacaaggtcatcttgctaggaggatcgagaatttaggagaacagcgtgtcgtgcttatggaacggtctgatgtatcccaaatttgtcaaatacgccaggcttacagggaagttggatatgatcttgtgaagctacttaggtttcttgattcgaacgctactggtatccggaagatacttaagaagttcgataagcgctttggctataagtttacagattattacgtctctactcgagcaaaccatccttattctcagctccagcagatcttcaagcaagtgggagtcgtggctgttgttggtgctttgtctcgcaacctttcttatctacaagatcatcaaggaagcctagcaaatatctatgattacccatcactcatcttgaaggatcccgtcatagaacaaataaatcactcagtacagaaactcacacactccacaagctttctgcaatttctagggcagcatgcacttatcgttccgggggatatgcagagcggctcagatctcggtgatgacaaggattaccatttcctgtcactgctgctgaacctagtaaacacgtttctgtacatggttaacacatacatcatcgttccaactgccgatgactattcagtaagcctcggagctgcagcgactgtttgcggtgtgattatcggatcaatggcagttgcacaaatcttctcctcggtatatttcagtgcctggtcgaacagatcgtacttcagacccctcgtatttagctgcatcatgttgtttctggggaacctattgtatgctttggcatacgatctgaattccctaactgttcttattgctggccggctactgtgcggtttgggttcggccagagccgtgaaccgccgctacatcagcgactgtgtacccctgaaaaccaggctgcaggcgtcggctgggtttgtcagcgctagcgctcttggaatggcatgtggtcccgctcttgccggtctgctgcagacaaagtttaagatttatgggcttacattcaatcagaacaccttgcctgggtgggtcatgtgccttgcttggattgcatatttgttctggctgtggatttcattcaaagagccgggccacattgccacagagaattcagtcagcacgcaatcatctgattctggccgtcgagtaagcggtaacttggagggtggcctcggagagcctttgctcatagacgcaaaggcagggcaggatgaggacgacgaggacaatgacgaccccgaagaatctcatacacctgccacatcgcttgctgcagcatacagattgctgacaccatctgtgaaggttcagctactgatctacttcatgctcaagttcgccatggaaatcctactctcggagtcgagtgtcgtgaccacgttctatttcaagtggacaactagtaccgtggcgatctttctggcagttcttggtctgacggttctcccagttaatgtcatcgttgggagctacgtcaccaacctgttccaggacaggcaaatcctggtggcctccgagatcatggtgttgatcggcatcgtcatgagcttctgcttcacccctcactactccgtcccccagtatgtcacgtcagctctcatcacgttcgtgttcgccgaggtgctcgaaggggtgaacttgtccctcctctcccgcgtgatgtcgtcgaggctctcccgcgggacctacaacggcgggctgctctcgacggaggccggcacgctggcccgcgttgccgctgacatgaccatcacggccgctggctatctggggcagggccgcctcctgaacgccaccctcctgccgtccttggtgatctgtctagcatctatcgtcgcgacgttctgcacttacaactcactctactgattaccggtcgatgaactcctctccctcttatacaagttgccgaattgcgtcttgcagtgacgctgaaaattttcgggctgctgctgctaatgtaaactgctgcggcctgcgggtggacgagcggtccatgtgtatcgacgcctgtagtgttgcgaacttgctacggctgtaacatgacacgtgcgcgttaaataaaatgccctactgaagtaccctgtcatcgctcctcatgtgtcggcccagcccaacaattgcattaccaggaaggcaggaagagctctcgtcctcggactgcaagaatcctgtcctcacccccacatcgccttcctgctattctccccttcggttgctgacatggcaagttcaaaattgccgttagggtttcaagttcagaaattcatttgccagattccttgaataggatatactagcactga

SEQ ID NO: 51065 - DNA, 3118 bp, Zea Mays
ggagatgggggaaaggaaaaaagaaacaggagtcaggagcagaggccaggggtggcgaggcatttttggccacaggggcgcagccaaaaggcgtcgtcccatcgaatccgccacgtccgcatcggcgacccggcaggaacacggccgcgggcagagtgcctgtctccgccacaaccccggcgaggcccccctccccctccgtccacacctcctcccctccgtcctctctctctctctctctctctctccctgccgcgtcgccgctataaatacctcttgccgccgcctccttccctcccatctccaacgccaagcacatactgacacacacacacacacacaagcccattgcattcgccaaacattcgcccacgcgccattgtagcgcacgagctcccgaagccctcatcgccgtgccgttcgtctcgccggatcgatcgctccgcccctgctcctggctttggtgccgtatgcccgtccgtctccatagggcttgcattctctctgctttgatttgacgcaggatcgcaggagttgacgagccgcacgccctagctcgtacgtgaaaaaaacgtggccacgtttcaggtgctgaaaccaagatggttaatttcggtaagaaattgatggcagaccagttggaggagtggcgagagtactatattaattataagatgatgaagaaaaaggtaaaacagtatgtacagcagacccaaactggtggaaaaaatcgtgaccaggttcttaaggagttctcaaggatgcttgatgatcagattgaaaagattgtgctatttcttctgcaacaacaaggtcatcttgctaggaggatcgagaatttaggagaacagcgtgtcgtgcttatggaacggtctgatgtatcccaaatttgtcaaatacgccaggcttacagggaagttggatatgatcttgtgaagctacttaggtttcttgattcgaacgctactggtatccggaagatacttaagaagttcgataagcgctttggctataagtttacagattattacgtctctactcgagcaaaccatccttattctcagctccagcagatcttcaagcaagtgggagtcgtggctgttgttggtgctttgtctcgcaacctttcttatctacaagatcatcaaggaagcctagcaaatatctatgattacccatcactcatcttgaaggatcccgtcatagaacaaataaatcactcagtacagaaactcacacactccacaagctttctgcaatttctagggcagcatgcacttatcgttccgggggatatgcagagcggctcagatctcggtgatgacaaggattaccatttcctgtcactgctgctgaacctagtaaacacgtttctgtacatggttaacacatacatcatcgttccaactgccgatgactattcagtaagcctcggagctgcagcgactgtttgcggtgtgattatcggatcaatggcagttgcacaaatcttctcctcggtatatttcagtgcctggtcgaacagatcgtacttcagacccctcgtatttagctgcatcatgttgtttctggggaacctattgtatgctttggcatacgatctgaattccctaactgttcttattgctggccggctactgtgcggtttgggttcggccagagccgtgaaccgccgctacatcagcgactgtgtacccctgaaaaccaggctgcaggcgtcggctgggtttgtcagcgctagcgctcttggaatggcatgtggtcccgctcttgccggtctgctgcagacaaagtttaagatttatgggcttacattcaatcagaacaccttgcctgggtgggtcatgtgccttgcttggattgcatatttgttctggctgtggatttcattcaaagagccgggccacattgccacagagaattcagtcagcacgcaatcatctgattctggccgtcgagtaagcggtaacttggagggtggcctcggagagcctttgctcatagacgcaaaggcagggcaggatgaggacgacgaggacaatgacgaccccgaagaatctcatacacctgccacatcgcttgctgcagcatacagattgctgacaccatctgtgaaggttcagctactgatctacttcatgctcaagttcgccatggaaatcctactctcggagtcgagtgtcgtgaccacgttctatttcaagtggacaactagtaccgtggcgatctttctggcagttcttggtctgacggttctcccagttaatgtcatcgttgggagctacgtcaccaacctgttccaggacaggcaaatcctggtggcctccgagatcatggtgttgatcggcatcgtcatgagcttctgcttcacccctcactactccgtcccccagtatgtcacgtcagctctcatcacgttcgtgttcgccgaggtgctcgaaggggtgaacttgtccctcctctcccgcgtgatgtcgtcgaggctctcccgcgggacctacaacggcgggctgctctcgacggaggccggcacgctggcccgcgttgccgctgacatgaccatcacggccgctggctatctggggcagggccgcctcctgaacgccaccctcctgccgtccttggtgatctgtctagcatctatcgtcgcgacgttctgcacttacaactcactctactgattaccggtcgatgaactcctctccctcttatacaagttgccgaattgcgtcttgcagtgacgctgaaaattttcgggctgctgctgctaatgtaaactgctgcggcctgcgggtggacgagcggtccatgtgtatcgacgcctgtagtgttgcgaacttgctacggctgtaacatgacacgtgcgcgttaaataaaatgccctactgaagtaccctgtcatcgctcctcatgtgtcggcccagcccaacaattgcattaccaggaaggcaggaagagctctcgtcctcggactgcaagaatcctgtcctcacccccacatcgccttcctgctattctccccttcggttgctgacatggcaagttcaaaattgccgttagggtttcaagttcagaaattcatttgccagattccttgaataggatatactagcactga

SEQ ID NO: 51066 - DNA, 4707 bp, Zea Mays
ggagatgggggaaaggaaaaaagaaacaggagtcaggagcagaggccaggggtggcgaggcatttttggccacaggggcgcagccaaaaggcgtcgtcccatcgaatccgccacgtccgcatcggcgacccggcaggaacacggccgcgggcagagtgcctgtctccgccacaaccccggcgaggcccccctccccctccgtccacacctcctcccctccgtcctctctctctctctctctctctctccctgccgcgtcgccgctataaatacctcttgccgccgcctccttccctcccatctccaacgccaagcacatactgacacacacacacacacacaagcccattgcattcgccaaacattcgcccacgcgccattgtagcgcacgagctcccgaagccctcatcgccgtgccgttcgtctcgccggatcgatcgctccgcccctgctcctggctttggtgccgtatgcccgtccgtctccatagggcttgcattctctctgctttgatttgacggatcgcaggagttgacgagccgcacgccctagctcgtacgtgaaaaaaacgtggccacggtgctgaaaccaagatggttaatttcggtaagaaattgatggcagaccagttggaggagtggcgagagtactatattaattataagatgatgaagaaaaaggtaaaacagtatgtacagcagacccaaactggtggaaaaaatcgtgaccaggttcttaaggagttctcaaggatgcttgatgatcagattgaaaagattgtgctatttcttctgcaacaacaaggtcatcttgctaggaggatcgagaatttaggagaacagcgtgtcgtgcttatggaacggtctgatgtatcccaaatttgtcaaatacgccaggcttacagggaagttggatatgatcttgtgaagctacttaggtttcttgattcgaacgctactggtatccggaagatacttaagaagttcgataagcgctttggctataagtttacagattattacgtctctactcgagcaaaccatccttattctcagctccagcagatcttcaagcaagtgggagtcgtggctgttgttggtgctttgtctcgcaacctttcttatctacaagatcatcaaggaagcctagcaaatatctatgattacccatcactcatcttgaaggatcccgtcatagaacaaataaatcactcagtacagaaactcacacactccacaagctttctgcaatttctagggcagcatgcacttatcgttccgggggatatgcagagcggctcagatctcggtgatgacaaggattaccatttcctgtcactgctgctgaacctagtaaacacgtttctgtacatggttaacacatacatcatcgttccaactgccgatgactattcagtaagcctcggagctgcagcgactgtttgcggtgtgattatcggatcaatggcagttgcacaaatcttctcctcggtatatttcagtgcctggtcgaacagatcgtacttcagacccctcgtatttagctgcatcatgttgtttctggggaacctattgtatgctttggcatacgatctgaattccctaactgttcttattgctggccggctactgtgcggtttgggttcggccagagccgtgaaccgccgctacatcagcgactgtgtacccctgaaaaccaggctgcaggcgtcggctgggtttgtcagcgctagcgctcttggaatggcatgtggtcccgctcttgccggtctgctgcagacaaagtttaagatttatgggcttacattcaatcagaacaccttgcctgggtgggtcatgtgccttgcttggattgcatatttgttctggctgtggatttcattcaaagagccgggccacattgccacagagaattcagtcagcacgcaatcatctgattctggccgtcgagtaagcggtaacttggagggtggcctcggagagcctttgctcatagacgcaaaggcagggcaggatgaggacgacgaggacaatgacgaccccgaagaatctcatacacctgccacatcgcttgctgcagcatacagattgctgacaccatctgtgaaggttcagctactgatctacttcatgctcaagttcgccatggaaatcctactctcggagtcgagtgtcgtgaccacgttctatttcaagtggacaactagtaccgtggcgatctttctggcagttcttggtctgacggttctcccagttaatgtcatcgttgggagctacgtcaccaacctgttccaggacaggcaaatcctggtggcctccgagatcatggtgttgatcggcatcgtcatgagcttctgcttcacccctcactactccgtcccccagtatgtcacgtcagctctcatcacgttcgtgttcgccgaggtgctcgaaggggtgaacttgtccctcctctcccgcgtgatgtcgtcgaggctctcccgcgggacctacaacggcgggctgctctcgacggaggccggcacgctggcccgcgttgccgctgacatgaccatcacggccgctggctatctggggcagggccgcctcctgaacgccaccctcctgccgtccttggtgatctgtctagcatctatcgtcgcgacgttctgcacttacaactcactctactgattaccggtcgatgaactcctctccctcttatacaagttgccgaattgcgtcttgcagtgacgctgaaaattttcgggctgctgctgctaatgtaaactgctgcggcctgcgggtggacgagcggtccatgtgtatcgacgcctgtagtgttgcgaacttgctacggctgtaacatgacacgtgcgcgttaaataaaatgccctactgaagtaccctgtcatcgctcctcatgtgtcggcccagcccaacaattgcattaccaggaaggcaggaagagctctcgtcctcggactgcaagaatcctgtcctcacccccacatcgccttcctgctattctccccttcggttgctgacatggcaagttcaaaattgccgttagggtttcaagttcagaaattcatttgccagattccttgaataggatatactagcactgaacaccatacatgtttgagtgttgatgcgaggcaccgcgcgaacacaaggttgttgcgtaattgtgcaaccaagtaaaaaaaaagccgctggcagttcttcccgacgggttgttgaggcctttctttcctcacactcatggcatgctcggtgaagctgtgcaaaatcaaatgtttattttgcctatggacaactacgactcgccaggaggagacttccgaggagagagtgacacaaaggctgcggaccattgagaccaaaagagccggtgtgtcagctcaaaccgcaacaaacaaacaaactaccaactcaccccaagaacagtttcttcagcaacctctgattgcttgctagtagtatataagcacacgaacctctgagagttgacaccatcatcacactcgaaacccaacagcttccttcctggcgatccaattaacggcttctcttctgagctcagcacgaacaatggccaccatcctcaccgtcgccgtcgccggtggaggtgtcgctgatccaggtggtcgggatcacccggttcggcagctacatcgagggcgccagcggggccaactggaacagccacccctcgggcacgcagcctcctcctcctcctcctcggaacttcggcatgttctctccgcagacggggcagctcgcgacggtgccgcccaaggagcggacgccggaggccatcgcgcgcgccgtggaggccatgagccaggtccccgacgcggcgctccggggcgggttcatcctggagaaggtgctgggcccgcagtccgtgggccagctggcgctccgcaacctgaaccccgacgacaacccttcggtgcggttcaactacttcgcgcacccggacgacctccgccgctgcgtcgcgggcatcgccgccatcgagcgggtgatccgctccagggccttctcgcggttcacctaccaaaacttcgcgttcccggccgcgctcaacgtcacggccgagttccccgtgaacacgctgtaccggcgcggcggcgaccccagggcgctggagcggttctgcagggacacagtgatgaccatctggcactaccacggcgggtgccaggtcggccgggtcgtggaccgcgactacagggtgctcggcgtcgacgccctccgcgtcatcgacggctccacgttcaacgcctcgccgggcaccaacccgcaggccacggtcatgatgctcggcaggtacatgggcgtcaagctcttgaaggagaggatgcttctggaaggatgaagcagaaaaaggcctagtctcactcacatctctacatctctacagggtgcgtttaaccttgaagattcttttagtggcgatcgtacaagttaattggagatgctaattgtaatggatgaattccacaccgattaatttgcacaaaatgtggatggtataattcagcacatcgttcacttcgttgtctcagtcgaactctactgcaaagctccagctaaccaagactaacagcacagaaaaattgtaagcatcacgcaaagacttatggaagcagggttgtctaggaacccacaaataagtttaggttttgagattttataaaaaaaacatgtaaaaagc

SEQ ID NO: 51067 - DNA, 4713 bp, Zea Mays
ggagatgggggaaaggaaaaaagaaacaggagtcaggagcagaggccaggggtggcgaggcatttttggccacaggggcgcagccaaaaggcgtcgtcccatcgaatccgccacgtccgcatcggcgacccggcaggaacacggccgcgggcagagtgcctgtctccgccacaaccccggcgaggcccccctccccctccgtccacacctcctcccctccgtcctctctctctctctctctctctctccctgccgcgtcgccgctataaatacctcttgccgccgcctccttccctcccatctccaacgccaagcacatactgacacacacacacacacacaagcccattgcattcgccaaacattcgcccacgcgccattgtagcgcacgagctcccgaagccctcatcgccgtgccgttcgtctcgccggatcgatcgctccgcccctgctcctggctttggtgccgtatgcccgtccgtctccatagggcttgcattctctctgctttgatttgacggatcgcaggagttgacgagccgcacgccctagctcgtacgtgaaaaaaacgtggccacgtttcaggtgctgaaaccaagatggttaatttcggtaagaaattgatggcagaccagttggaggagtggcgagagtactatattaattataagatgatgaagaaaaaggtaaaacagtatgtacagcagacccaaactggtggaaaaaatcgtgaccaggttcttaaggagttctcaaggatgcttgatgatcagattgaaaagattgtgctatttcttctgcaacaacaaggtcatcttgctaggaggatcgagaatttaggagaacagcgtgtcgtgcttatggaacggtctgatgtatcccaaatttgtcaaatacgccaggcttacagggaagttggatatgatcttgtgaagctacttaggtttcttgattcgaacgctactggtatccggaagatacttaagaagttcgataagcgctttggctataagtttacagattattacgtctctactcgagcaaaccatccttattctcagctccagcagatcttcaagcaagtgggagtcgtggctgttgttggtgctttgtctcgcaacctttcttatctacaagatcatcaaggaagcctagcaaatatctatgattacccatcactcatcttgaaggatcccgtcatagaacaaataaatcactcagtacagaaactcacacactccacaagctttctgcaatttctagggcagcatgcacttatcgttccgggggatatgcagagcggctcagatctcggtgatgacaaggattaccatttcctgtcactgctgctgaacctagtaaacacgtttctgtacatggttaacacatacatcatcgttccaactgccgatgactattcagtaagcctcggagctgcagcgactgtttgcggtgtgattatcggatcaatggcagttgcacaaatcttctcctcggtatatttcagtgcctggtcgaacagatcgtacttcagacccctcgtatttagctgcatcatgttgtttctggggaacctattgtatgctttggcatacgatctgaattccctaactgttcttattgctggccggctactgtgcggtttgggttcggccagagccgtgaaccgccgctacatcagcgactgtgtacccctgaaaaccaggctgcaggcgtcggctgggtttgtcagcgctagcgctcttggaatggcatgtggtcccgctcttgccggtctgctgcagacaaagtttaagatttatgggcttacattcaatcagaacaccttgcctgggtgggtcatgtgccttgcttggattgcatatttgttctggctgtggatttcattcaaagagccgggccacattgccacagagaattcagtcagcacgcaatcatctgattctggccgtcgagtaagcggtaacttggagggtggcctcggagagcctttgctcatagacgcaaaggcagggcaggatgaggacgacgaggacaatgacgaccccgaagaatctcatacacctgccacatcgcttgctgcagcatacagattgctgacaccatctgtgaaggttcagctactgatctacttcatgctcaagttcgccatggaaatcctactctcggagtcgagtgtcgtgaccacgttctatttcaagtggacaactagtaccgtggcgatctttctggcagttcttggtctgacggttctcccagttaatgtcatcgttgggagctacgtcaccaacctgttccaggacaggcaaatcctggtggcctccgagatcatggtgttgatcggcatcgtcatgagcttctgcttcacccctcactactccgtcccccagtatgtcacgtcagctctcatcacgttcgtgttcgccgaggtgctcgaaggggtgaacttgtccctcctctcccgcgtgatgtcgtcgaggctctcccgcgggacctacaacggcgggctgctctcgacggaggccggcacgctggcccgcgttgccgctgacatgaccatcacggccgctggctatctggggcagggccgcctcctgaacgccaccctcctgccgtccttggtgatctgtctagcatctatcgtcgcgacgttctgcacttacaactcactctactgattaccggtcgatgaactcctctccctcttatacaagttgccgaattgcgtcttgcagtgacgctgaaaattttcgggctgctgctgctaatgtaaactgctgcggcctgcgggtggacgagcggtccatgtgtatcgacgcctgtagtgttgcgaacttgctacggctgtaacatgacacgtgcgcgttaaataaaatgccctactgaagtaccctgtcatcgctcctcatgtgtcggcccagcccaacaattgcattaccaggaaggcaggaagagctctcgtcctcggactgcaagaatcctgtcctcacccccacatcgccttcctgctattctccccttcggttgctgacatggcaagttcaaaattgccgttagggtttcaagttcagaaattcatttgccagattccttgaataggatatactagcactgaacaccatacatgtttgagtgttgatgcgaggcaccgcgcgaacacaaggttgttgcgtaattgtgcaaccaagtaaaaaaaaagccgctggcagttcttcccgacgggttgttgaggcctttctttcctcacactcatggcatgctcggtgaagctgtgcaaaatcaaatgtttattttgcctatggacaactacgactcgccaggaggagacttccgaggagagagtgacacaaaggctgcggaccattgagaccaaaagagccggtgtgtcagctcaaaccgcaacaaacaaacaaactaccaactcaccccaagaacagtttcttcagcaacctctgattgcttgctagtagtatataagcacacgaacctctgagagttgacaccatcatcacactcgaaacccaacagcttccttcctggcgatccaattaacggcttctcttctgagctcagcacgaacaatggccaccatcctcaccgtcgccgtcgccggtggaggtgtcgctgatccaggtggtcgggatcacccggttcggcagctacatcgagggcgccagcggggccaactggaacagccacccctcgggcacgcagcctcctcctcctcctcctcggaacttcggcatgttctctccgcagacggggcagctcgcgacggtgccgcccaaggagcggacgccggaggccatcgcgcgcgccgtggaggccatgagccaggtccccgacgcggcgctccggggcgggttcatcctggagaaggtgctgggcccgcagtccgtgggccagctggcgctccgcaacctgaaccccgacgacaacccttcggtgcggttcaactacttcgcgcacccggacgacctccgccgctgcgtcgcgggcatcgccgccatcgagcgggtgatccgctccagggccttctcgcggttcacctaccaaaacttcgcgttcccggccgcgctcaacgtcacggccgagttccccgtgaacacgctgtaccggcgcggcggcgaccccagggcgctggagcggttctgcagggacacagtgatgaccatctggcactaccacggcgggtgccaggtcggccgggtcgtggaccgcgactacagggtgctcggcgtcgacgccctccgcgtcatcgacggctccacgttcaacgcctcgccgggcaccaacccgcaggccacggtcatgatgctcggcaggtacatgggcgtcaagctcttgaaggagaggatgcttctggaaggatgaagcagaaaaaggcctagtctcactcacatctctacatctctacagggtgcgtttaaccttgaagattcttttagtggcgatcgtacaagttaattggagatgctaattgtaatggatgaattccacaccgattaatttgcacaaaatgtggatggtataattcagcacatcgttcacttcgttgtctcagtcgaactctactgcaaagctccagctaaccaagactaacagcacagaaaaattgtaagcatcacgcaaagacttatggaagcagggttgtctaggaacccacaaataagtttaggttttgagattttataaaaaaaacatgtaaaaagc

SEQ ID NO: 51068 - DNA, 5651 bp, Zea Mays
ggagatgggggaaaggaaaaaagaaacaggagtcaggagcagaggccaggggtggcgaggcatttttggccacaggggcgcagccaaaaggcgtcgtcccatcgaatccgccacgtccgcatcggcgacccggcaggaacacggccgcgggcagagtgcctgtctccgccacaaccccggcgaggcccccctccccctccgtccacacctcctcccctccgtcctctctctctctctctctctctctccctgccgcgtcgccgctataaatacctcttgccgccgcctccttccctcccatctccaacgccaagcacatactgacacacacacacacacacaagcccattgcattcgccaaacattcgcccacgcgccattgtagcgcacgagctcccgaagccctcatcgccgtgccgttcgtctcgccggatcgatcgctccgcccctgctcctggctttggtgccgtatgcccgtccgtctccatagggcttgcattctctctgctttgatttgacggatcgcaggagttgacgagccgcacgccctagctcgtacgtgaaaaaaacgtggccacgtttcaggtgctgaaaccaagatggttaatttcggtaagaaattgatggcagaccagttggaggagtggcgagagtactatattaattataagatgatgaagaaaaaggtaaaacagtatgtacagcagacccaaactggtggaaaaaatcgtgaccaggttcttaaggagttctcaaggatgcttgatgatcagattgaaaagattgtgctatttcttctgcaacaacaaggtcatcttgctaggaggatcgagaatttaggagaacagcgtgtcgtgcttatggaacggtctgatgtatcccaaatttgtcaaatacgccaggcttacagggaagttggatatgatcttgtgaagctacttaggtttcttgattcgaacgctactggtatccggaagatacttaagaagttcgataagcgctttggctataagtttacagattattacgtctctactcgagcaaaccatccttattctcagctccagcagatcttcaagcaagtgggagtcgtggctgttgttggtgctttgtctcgcaacctttcttatctacaagatcatcaaggaagcctagcaaatatctatgattacccatcactcatcttgaaggatcccgtcatagaacaaataaatcactcagtacagaaactcacacactccacaagctttctgcaatttctagggcagcatgcacttatcgttccgggggatatgcagagcggctcagatctcggtgatgacaaggattaccatttcctgtcactgctgctgaacctagtaaacacgtttctgtacatggttaacacatacatcatcgttccaactgccgatgactattcagtaagcctcggagctgcagcgactgtttgcggtgtgattatcggatcaatggcagttgcacaaatcttctcctcggtatatttcagtgcctggtcgaacagatcgtacttcagacccctcgtatttagctgcatcatgttgtttctggggaacctattgtatgctttggcatacgatctgaattccctaactgttcttattgctggccggctactgtgcggtttgggttcggccagagccgtgaaccgccgctacatcagcgactgtgtacccctgaaaaccaggctgcaggcgtcggctgggtttgtcagcgctagcgctcttggaatggcatgtggtcccgctcttgccggtctgctgcagacaaagtttaagatttatgggcttacattcaatcagaacaccttgcctgggtgggtcatgtgccttgcttggattgcatatttgttctggctgtggatttcattcaaagagccgggccacattgccacagagaattcagtcagcacgcaatcatctgattctggccgtcgagtaagcggtaacttggagggtggcctcggagagcctttgctcatagacgcaaaggcagggcaggatgaggacgacgaggacaatgacgaccccgaagaatctcatacacctgccacatcgcttgctgcagcatacagattgctgacaccatctgtgaaggttcagctactgatctacttcatgctcaagttcgccatggaaatcctactctcggagtcgagtgtcgtgaccacgttctatttcaagtggacaactagtaccgtggcgatctttctggcagttcttggtctgacggttctcccagttaatgtcatcgttgggagctacgtcaccaacctgttccaggacaggcaaatcctggtggcctccgagatcatggtgttgatcggcatcgtcatgagcttctgcttcacccctcactactccgtcccccagtatgtcacgtcagctctcatcacgttcgtgttcgccgaggtgctcgaaggggtgaacttgtccctcctctcccgcgtgatgtcgtcgaggctctcccgcgggacctacaacggcgggctgctctcgacggaggccggcacgctggcccgcgttgccgctgacatgaccatcacggccgctggctatctggggcagggccgcctcctgaacgccaccctcctgccgtccttggtgatctgtctagcatctatcgtcgcgacgttctgcacttacaactcactctactgattaccggtcgatgaactcctctccctcttatacaagttgccgaattgcgtcttgcagtgacgctgaaaattttcgggctgctgctgctaatgtaaactgctgcggcctgcgggtggacgagcggtccatgtgtatcgacgcctgtagtgttgcgaacttgctacggctgtaacatgacacgtgcgcgttaaataaaatgccctactgaagtaccctgtcatcgctcctcatgtgtcggcccagcccaacaattgcattaccaggaaggcaggaagagctctcgtcctcggactgcaagaatcctgtcctcacccccacatcgccttcctgctattctccccttcggttgctgacatggcaagttcaaaattgccgttagggtttcaagttcagaaattcatttgccagattccttgaataggatatactagcactgaacaccatacatgtttgagtgttgatgcgaggcaccgcgcgaacacaaggttgttgcgtaattgtgcaaccaagtaaaaaaaaagccgctggcagttcttcccgacgggttgttgaggcctttctttcctcacactcatggcatgctcggtgaagctgtgcaaaatcaaatgtttattttgcctatggacaactacgactcgccaggaggagacttccgaggagagagtgacacaaaggctgcggaccattgagaccaaaagagccggtgtgtcagctcaaaccgcaacaaacaaacaaactaccaactcaccccaagaacagtttcttcagcaacctctgattgcttgctagtagtatataagcacacgaacctctgagagttgacaccatcatcacactcgaaacccaacagcttccttcctggcgatccaattaacggcttctcttctgagctcagcacgaacaatggccaccatcctcaccgtcgcaagcttcttcgcacttgtgtgcatctctcaacaagcgcgggctgcgaactacacgttcatgaaggacgcggtgcacgcgccgcggacgggcttctacgactacatcatagtcggcggcggcacggcgggctgcccgctggcggccaccctgtcggcccgcgcgcgggtgctgctgctggagcgcgggggctctccgtacgaggacgcgcgcgtcctgaacatggcccacttctcggacgtgctggcggacacgtcggcgtcgtccccgtcgcagcggttcgtgtcggaggacggcgtgatcaactcccgcccgcgcgtgctgggcggcggcagctgcatcaacgccggcttcttcacgcgcgccggcgcgggctacgtcagggccgccggctgggaccccagggaggtgcgggcggcgtaccggtgggtggaggacgtggtcgcgttccgcccggcgctgggcccgtggcaggccgccgtgcggatgggcctgctggagaccggcgtgctgccggacaacggggccacgtacgaccacatcccggggacaaaggtcggcggctccatcttcgacgccgacggccgccggcacacggcggcggacttgctccggtacgccaacccggacggcatcgacctgtacctccgggcgagagtggccaagatcttgttccgtttcaaaggaaccaagccggtggcggacggcgttgtgtactacgactcgcgaggcaacactcacgaggcgtacctcagccccggcgccgccagcgaggtcatcctgtcggcgggggcgctgggcagcccgcagcagctgatgctcagcggcatcggcccggccgaccacctccgctcgctcggcatcgacgtgatcctggacctgccgggcgtggggcagggcatgtcagataaccccatgaacgccatctacgtgccgtcgccgtcgccggtggaggtgtcgctgatccaggtggtcgggatcacccggttcggcagctacatcgagggcgccagcggggccaactggaacagccacccctcgggcacgcagcctcctcctcctcctcctcggaacttcggcatgttctctccgcagacggggcagctcgcgacggtgccgcccaaggagcggacgccggaggccatcgcgcgcgccgtggaggccatgagccaggtccccgacgcggcgctccggggcgggttcatcctggagaaggtgctgggcccgcagtccgtgggccagctggcgctccgcaacctgaaccccgacgacaacccttcggtgcggttcaactacttcgcgcacccggacgacctccgccgctgcgtcgcgggcatcgccgccatcgagcgggtgatccgctccagggccttctcgcggttcacctaccaaaacttcgcgttcccggccgcgctcaacgtcacggccgagttccccgtgaacacgctgtaccggcgcggcggcgaccccagggcgctggagcggttctgcagggacacagtgatgaccatctggcactaccacggcgggtgccaggtcggccgggtcgtggaccgcgactacagggtgctcggcgtcgacgccctccgcgtcatcgacggctccacgttcaacgcctcgccgggcaccaacccgcaggccacggtcatgatgctcggcaggtacatgggcgtcaagctcttgaaggagaggatgcttctggaaggatgaagcagaaaaaggcctagtctcactcacatctctacatctctacagggtgcgtttaaccttgaagattcttttagtggcgatcgtacaagttaattggagatgctaattgtaatggatgaattccacaccgattaatttgcacaaaatgtggatggtataattcagcacatcgttcacttcgttgtctcagtcgaactctactgcaaagctccagctaaccaagactaacagcacagaaaaattgtaagcatcacgcaaagacttatggaagcagggttgtctaggaacccacaaataagtttaggttttgagattttataaaaaaaacatgtaaaaagc

SEQ ID NO: 51069 - DNA, 2589 bp, Zea Mays
gggcagttctctccacgggtagcatgttcaggaagatcgtaaaggatgtcgtcataaaggtgctgaaaccaagatggttaatttcggtaagaaattgatggcagaccagttggaggagtggcgagagtactatattaattataagatgatgaagaaaaaggtaaaacagtatgtacagcagacccaaactggtggaaaaaatcgtgaccaggttcttaaggagttctcaaggatgcttgatgatcagattgaaaagattgtgctatttcttctgcaacaacaaggtcatcttgctaggaggatcgagaatttaggagaacagcgtgtcgtgcttatggaacggtctgatgtatcccaaatttgtcaaatacgccaggcttacagggaagttggatatgatcttgtgaagctacttaggtttcttgattcgaacgctactggtatccggaagatacttaagaagttcgataagcgctttggctataagtttacagattattacgtctctactcgagcaaaccatccttattctcagctccagcagatcttcaagcaagtgggagtcgtggctgttgttggtgctttgtctcgcaacctttcttatctacaagatcatcaaggaagcctagcaaatatctatgattacccatcactcatcttgaaggatcccgtcatagaacaaataaatcactcagtacagaaactcacacactccacaagctttctgcaatttctagggcagcatgcacttatcgttccgggggatatgcagagcggctcagatctcggtgatgacaaggattaccatttcctgtcactgctgctgaacctagtaaacacgtttctgtacatggttaacacatacatcatcgttccaactgccgatgactattcagtaagcctcggagctgcagcgactgtttgcggtgtgattatcggatcaatggcagttgcacaaatcttctcctcggtatatttcagtgcctggtcgaacagatcgtacttcagacccctcgtatttagctgcatcatgttgtttctggggaacctattgtatgctttggcatacgatctgaattccctaactgttcttattgctggccggctactgtgcggtttgggttcggccagagccgtgaaccgccgctacatcagcgactgtgtacccctgaaaaccaggctgcaggcgtcggctgggtttgtcagcgctagcgctcttggaatggcatgtggtcccgctcttgccggtctgctgcagacaaagtttaagatttatgggcttacattcaatcagaacaccttgcctgggtgggtcatgtgccttgcttggattgcatatttgttctggctgtggatttcattcaaagagccgggccacattgccacagagaattcagtcagcacgcaatcatctgattctggccgtcgagtaagcggtaacttggagggtggcctcggagagcctttgctcatagacgcaaaggcagggcaggatgaggacgacgaggacaatgacgaccccgaagaatctcatacacctgccacatcgcttgctgcagcatacagattgctgacaccatctgtgaaggttcagctactgatctacttcatgctcaagttcgccatggaaatcctactctcggagtcgagtgtcgtgaccacgttctatttcaagtggacaactagtaccgtggcgatctttctggcagttcttggtctgacggttctcccagttaatgtcatcgttgggagctacgtcaccaacctgttccaggacaggcaaatcctggtggcctccgagatcatggtgttgatcggcatcgtcatgagcttctgcttcacccctcactactccgtcccccagtatgtcacgtcagctctcatcacgttcgtgttcgccgaggtgctcgaaggggtgaacttgtccctcctctcccgcgtgatgtcgtcgaggctctcccgcgggacctacaacggcgggctgctctcgacggaggccggcacgctggcccgcgttgccgctgacatgaccatcacggccgctggctatctggggcagggccgcctcctgaacgccaccctcctgccgtccttggtgatctgtctagcatctatcgtcgcgacgttctgcacttacaactcactctactgattaccggtcgatgaactcctctccctcttatacaagttgccgaattgcgtcttgcagtgacgctgaaaattttcgggctgctgctgctaatgtaaactgctgcggcctgcgggtggacgagcggtccatgtgtatcgacgcctgtagtgttgcgaacttgctacggctgtaacatgacacgtgcgcgttaaataaaatgccctactgaagtaccctgtcatcgctcctcatgtgtcggcccagcccaacaattgcattaccaggaaggcaggaagagctctcgtcctcggactgcaagaatcctgtcctcacccccacatcgccttcctgctattctccccttcggttgctgacatggcaagttcaaaattgccgttagggtttcaagttcagaaattcatttgccagattccttgaataggatatactagcactga

SEQ ID NO: 51070 - DNA, 2587 bp, Zea Mays
caattagtcagtggcatgtggggctttgggtatttttcgccttcatgcaggtttcaggtgctgaaaccaagatggttaatttcggtaagaaattgatggcagaccagttggaggagtggcgagagtactatattaattataagatgatgaagaaaaaggtaaaacagtatgtacagcagacccaaactggtggaaaaaatcgtgaccaggttcttaaggagttctcaaggatgcttgatgatcagattgaaaagattgtgctatttcttctgcaacaacaaggtcatcttgctaggaggatcgagaatttaggagaacagcgtgtcgtgcttatggaacggtctgatgtatcccaaatttgtcaaatacgccaggcttacagggaagttggatatgatcttgtgaagctacttaggtttcttgattcgaacgctactggtatccggaagatacttaagaagttcgataagcgctttggctataagtttacagattattacgtctctactcgagcaaaccatccttattctcagctccagcagatcttcaagcaagtgggagtcgtggctgttgttggtgctttgtctcgcaacctttcttatctacaagatcatcaaggaagcctagcaaatatctatgattacccatcactcatcttgaaggatcccgtcatagaacaaataaatcactcagtacagaaactcacacactccacaagctttctgcaatttctagggcagcatgcacttatcgttccgggggatatgcagagcggctcagatctcggtgatgacaaggattaccatttcctgtcactgctgctgaacctagtaaacacgtttctgtacatggttaacacatacatcatcgttccaactgccgatgactattcagtaagcctcggagctgcagcgactgtttgcggtgtgattatcggatcaatggcagttgcacaaatcttctcctcggtatatttcagtgcctggtcgaacagatcgtacttcagacccctcgtatttagctgcatcatgttgtttctggggaacctattgtatgctttggcatacgatctgaattccctaactgttcttattgctggccggctactgtgcggtttgggttcggccagagccgtgaaccgccgctacatcagcgactgtgtacccctgaaaaccaggctgcaggcgtcggctgggtttgtcagcgctagcgctcttggaatggcatgtggtcccgctcttgccggtctgctgcagacaaagtttaagatttatgggcttacattcaatcagaacaccttgcctgggtgggtcatgtgccttgcttggattgcatatttgttctggctgtggatttcattcaaagagccgggccacattgccacagagaattcagtcagcacgcaatcatctgattctggccgtcgagtaagcggtaacttggagggtggcctcggagagcctttgctcatagacgcaaaggcagggcaggatgaggacgacgaggacaatgacgaccccgaagaatctcatacacctgccacatcgcttgctgcagcatacagattgctgacaccatctgtgaaggttcagctactgatctacttcatgctcaagttcgccatggaaatcctactctcggagtcgagtgtcgtgaccacgttctatttcaagtggacaactagtaccgtggcgatctttctggcagttcttggtctgacggttctcccagttaatgtcatcgttgggagctacgtcaccaacctgttccaggacaggcaaatcctggtggcctccgagatcatggtgttgatcggcatcgtcatgagcttctgcttcacccctcactactccgtcccccagtatgtcacgtcagctctcatcacgttcgtgttcgccgaggtgctcgaaggggtgaacttgtccctcctctcccgcgtgatgtcgtcgaggctctcccgcgggacctacaacggcgggctgctctcgacggaggccggcacgctggcccgcgttgccgctgacatgaccatcacggccgctggctatctggggcagggccgcctcctgaacgccaccctcctgccgtccttggtgatctgtctagcatctatcgtcgcgacgttctgcacttacaactcactctactgattaccggtcgatgaactcctctccctcttatacaagttgccgaattgcgtcttgcagtgacgctgaaaattttcgggctgctgctgctaatgtaaactgctgcggcctgcgggtggacgagcggtccatgtgtatcgacgcctgtagtgttgcgaacttgctacggctgtaacatgacacgtgcgcgttaaataaaatgccctactgaagtaccctgtcatcgctcctcatgtgtcggcccagcccaacaattgcattaccaggaaggcaggaagagctctcgtcctcggactgcaagaatcctgtcctcacccccacatcgccttcctgctattctccccttcggttgctgacatggcaagttcaaaattgccgttagggtttcaagttcagaaattcatttgccagattccttgaataggatatactagcactga

SEQ ID NO: 51071 - DNA, 1535 bp, Zea Mays
cacctgtcggtggatggtcatggcgagtgcggaacacgatcggccagagtgaggagccgacgaaggatcccgcacggtggcggtggaccaggctgtgttgcggagtcaccgtcggtgttggggcctcgcgtgtgccacagctcgatcgctccagagtccagaccaccaggagactctctcagacagcataagctcacatcggcaataaaaaagcatccccgtctcccctgattctctccgcccagctcagctctgctccccgccgctcctctccgcgccccttcatcccggatctcggcatgggcaccgccaccaccaacggctcggcggagcaggcgtccgcgcccgtgccggcgctcaagttcctcatctacggccgcacgggctggatcggggggctgctgggcggcctctgcgccgcgcgcgggatccccttcgtctacggcgccggcaggctcgagaaccgcgcccagctcgaggccgacatcgacgccgccgcgcccacccacgtgttcaacgccgcgggcgtcacgggccgccccaacgtcgactggtgcgagacgcaccgcgccgagaccatccgcgccaacgtcgtgggcacgctcacgctcgccgacatctgccggggccgaggggtcctgctcatcaactacgccacgggctgcatcttcgagtacgacgccggccacccgctcggctccggggtcggcttcaaggaggaggacacgcccaacttcgtcggatcattctactccaaaaccaaggccatggtagaggaattgctcaagaactacgagaacgtatgcacccttcgtgtgaggatgcctatctcatcggatctctccaatcctcgcaacttcatcaccaaaatcacccggtacgataaggtcgtcaacatcccgaattcaatgacagtactggacgagctccttcccatctcgatcgaaatggcgaagagaaacctcacgggaatatggaatttcactaaccccggcgtggtgagccacaacgagatactagagatgtacagagactacatcgatccaggcttctcctggaaaaacttcaacctggaggagcaggcaaaggtcatagtcgcaccgaggagcaacaatgagcttgaccagaccaaactgaagagagagttcccggagcttttgtcgatcaaggagtcgctggtaaaatatgttttcgaaccaaactgtaaggcgtccaaggcttgacaagtggagattattgaacggagcggggcaagcaaggtgtaatttagctcaactttcgcattggctcctggcctcctggggcgttatcataccgtgcggttggaatgaactgaggagcttcatgcctgcctgcttctgttgtgccatagaatttgtagttcgcgatgtttcatttgtaaccttttattgaatatgactttttaatgggatccttagcaatacaggacccctgtttcataaatgatgtagttctagaatactgttcagtcaactcgtttgagtaaatttataaaaaaagatacaatgtttatc

SEQ ID NO: 51072 - DNA, 1516 bp, Zea Mays
gaacacgatcggccagagtgaggagccgacgaaggatcccgcacggtggcggtggaccaggctgtgttgcggagtcaccgtcggtgttggggcctcgcgtgtgccacagctcgatcgctccagagtccagaccaccaggagactctctcagacagcataagctcacatcggcaataaaaaagcatccccgtctcccctgattctctccgcccagctcagctctgctccccgccgctcctctccgcgccccttcatcccggatctcggcatgggcaccgccaccaccaacggctcggcggagcaggcgtccgcgcccgtgccggcgctcaagttcctcatctacggccgcacgggctggatcggggggctgctgggcggcctctgcgccgcgcgcgggatccccttcgtctacggcgccggcaggctcgagaaccgcgcccagctcgaggccgacatcgacgccgccgcgcccacccacgtgttcaacgccgcgggcgtcacgggccgccccaacgtcgactggtgcgagacgcaccgcgccgagaccatccgcgccaacgtcgtgggcacgctcacgctcgccgacatctgccggggccgaggggtcctgctcatcaactacgccacgggctgcatcttcgagtacgacgccggccacccgctcggctccggggtcggcttcaaggaggaggacacgcccaacttcgtcggatcattctactccaaaaccaaggccatggtagaggaattgctcaagaactacgagaacgtatgcacccttcgtgtgaggatgcctatctcatcggatctctccaatcctcgcaacttcatcaccaaaatcacccggtacgataaggtcgtcaacatcccgaattcaatgacagtactggacgagctccttcccatctcgatcgaaatggcgaagagaaacctcacgggaatatggaatttcactaaccccggcgtggtgagccacaacgagatactagagatgtacagagactacatcgatccaggcttctcctggaaaaacttcaacctggaggagcaggcaaaggtcatagtcgcaccgaggagcaacaatgagcttgaccagaccaaactgaagagagagttcccggagcttttgtcgatcaaggagtcgctggtaaaatatgttttcgaaccaaactgtaaggcgtccaaggcttgacaagtggaggtgcgcacagctattattgaacggagcggggcaagcaaggtgtaatttagctcaactttcgcattggctcctggcctcctggggcgttatcataccgtgcggttggaatgaactgaggagcttcatgcctgcctgcttctgttgtgccatagaatttgtagttcgcgatgtttcatttgtaaccttttattgaatatgactttttaatgggatccttagcaatacaggacccctgtttcataaatgatgtagttctagaatactgttcagtcaactcgtttgagtaaatttataaaaaaagatacaatgtttatc

SEQ ID NO: 51073 - DNA, 604 bp, Zea Mays
cctcgcccggccgccgtcgccgcgtcctccttcggcccgcagcgcttcccctcgctgatgggcctggggagcctgtgcttcgactaccgcagcagcatggagccggagcccgggcggtgccggcgcacggacggcaagaagtggcggtgctcccgcgacgtggtgccgggccacaagtactgcgagcggcacgtccaccgcggccgcggccgttcaagaaagcctgtggaagccgccgccccggcgcccagcgcggcggccgccaccagcctcggcggcggccccgtccaccacacgggcggcgcgcccccgccgcacgggctcggcctctcccccaccagcgtcctcctcgcccacagcgccgcgcgtgccacatgagtagagcgctgcgggccgacatcttgggctgggcctcggaatcacgaggagaaacggaatccgcagggattacaatgtcgtgtgcgtgctgtgatttttttcactcccaaaagtcgcagcttcttaaaaaacccggtttgggacgtccgatggcatgtgtcgctggcagctggttcgctgcgtttgcttctctgttacgtgtgcattgtattgttttgcctgcctc

SEQ ID NO: 51074 - DNA, 1199 bp, Zea Mays
aatggttcctacaaagttttactcatgcgtttggttccaaatgcatagaatagaagcaaatgaaagtccagtgcaactgtaaacacctaccaaccagtaaagaactgtccaactgcaaaacgcaatattgtgccaaatacagtatgcagtacgcacctggtccataacaattgtgaatgccgtggcatatatcttgatctgccacctgcgtaaatactgaacatctcgtgctacatgctagtgagccagcgtagacacaaaccctggtttgctacaaaataaagtgaaagacttagggatttatgatatgtgttctcaactgtaatacacatcaggctatctcagtagctacagaaatctaccaacgcgcaagacctagacagctagactgcacactagcatacgccaaagttcagcatcaaagggaactatggggaaaacatcaaaaacaagtgcaggtgtcatgagtagagatcctgtcttattgatgttcgtcagcaagccagcccacactactcatcggatgatccgaatgcttggcaaatggcaatccatctgctacatgcctatatatccatcaccataaatctgcagaaaaaaaaaaacaagtgtacaaatcgaaacatacaaactgcagtaatcccatcacccacaaaaggcaatgcttcacacatatccagtaacatgaaaggaaatcaatacaccgcgaacctgctgcccaaaataaacatattacgtacctatttactgcaagtgttaaatgatacataccattccttgaagtaaaagatgacagagagaatttacagtgtgcttgatatcttaggtagcgtttgatttgggggttggacatggaagtactgtaagagcctgttcagatcaccggaccaaagttagtccgtcactgaataataggctaagcatggactaattatttttttaatgagtactaatcctctactagtttttgttagaccatgatcagtttatgtttaggccttctatttggcatccaaaacatggactaaagtaactttagtccatccaaaaggctcatctatttcctgacaagctagtagcatcatgccattctagagtactagtaagtctagatcacatgagcagaagacattacactaaacaatctacacatagcactttgaacaatagcaaagctattgaaagaacctccaaagttg

SEQ ID NO: 51075 - DNA, 1843 bp, Zea Mays
aactggttgcctttgcctgttgtataaactagcagtaaccactatggcactatccattaaccagacacagcgtccagccaggcttttgcctacaaaacaacgcaccacgccgccgccgctcgccgcccacttctctcccaccttccctccactcttttgcctgtcgcggggttagaatcccatggcgctgtcgtccgagatccgcttcggccaccagatccccctatcccactgcgacactgactcctacgaggaggaggaagaggaggaaggagaggaagaggaagacgaggaggaggagttcgagggggaggaggaggaggaggagatggatgaggtgacggtttcgtctccgctgatgcttccggcaacggaggccaggggaggggtgtccgtggtcgagatggtgacgggggcgctccggaggtcgctcatgctgtgcagcagcagcgccggcgccggcgtgcgcgagccggagcaggaggaggacggggcgactcccccgggtggtatgcagatagggggaccaacggatgtgcggcacgtctcgcacgtcaccttcgaccgcttcgttggcttcctcggcctccccgctgacctcgagcccgacgtgcctcgccccgtgccgagcgccagtgctcgtatgatagaagaggaaacagtgtgccaactatactcttgactatgcaaaagaagttatattcacttgggggtcttcaggctgaagggatattcaggataaatgcagacaatagccaggaactatatgtgagggatcaactaaacagggggattgttccagatggtgttgatttgcactgccttgccggactgatgaaggcatggttccgggaacttccaagtggagtactggactcgttgactccagaacaagtgatgcactgcaacactgaagaagagtgtagccatcttgcaagcaccctacctcctgtcgaagcagcattgcttgaatgggccatcagtctcatggcagatgtcgtggaaaacgaaagctacaacaagatgaacgctcgcaacatcgctatggttttcgcaccgaatatgaccaagatggcggaccccttgactgctttgatacatgccgttcaagtgatgaatttcctcaagacattgatcttgagaactgtaaaagaaagggaggaggctgctaaagtagccagggcgttcccatcgagctctggttccccgagcgacaaagatgagcctcaaactgtagaacagttggacatgctcttcgtctgttcaagtcagcaaaatgtagagtatcctatggttgatgaggctaagtttgaccagttcctttttagagtggaagaagctcttcaccatgagacgcaaggcagcacagatggacccaagaatcatgacagcggtagaggtgaccagagaagtaacagtgagatcactccattggacaccggtttgaccggccaaaatgagttcagtaacaacagcgaggaaggtctctttgacaagtttaaatttaggaaaggggtagggaggctctgcaggcaccctgtgtttcagctgagtaggtccatgaagaagtcagatgaagcggagcaagcatgtgtatagggcatgcctgtgcagtggataatattgacacacctgtatttctctgcagcttgtttactgtgtaggtcttcggctattctcctagattgtgtgcctagaaggcattggccccattattagtactgatttgggtgtatatgtgactatgtcagctgttcacttattgctgtcctaattgttaagaagctatcatgcactagtgatttttcttagtttgtcagatagaatctcgtgtgtgattttc

SEQ ID NO: 51076 - DNA, 1303 bp, Zea Mays
gggatattgtgttgctccgtcctttttagttttctatattcatttcctggcagggaaagtgtgagcgtatttggagtttcaccaacttccatgcagtgctcgtatgatagaagaggaaacagtgtgccaactatactcttgactatgcaaaagaagttatattcacttgggggtcttcaggctgaagggatattcaggataaatgcagacaatagccaggaactatatgtgagggatcaactaaacagggggattgttccagatggtgttgatttgcactgccttgccggactgatgaaggcatggttccgggaacttccaagtggagtactggactcgttgactccagaacaagtgatgcactgcaacactgaagaagagtgtagccatcttgcaagcaccctacctcctgtcgaagcagcattgcttgaatgggccatcagtctcatggcagatgtcgtggaaaacgaaagctacaacaagatgaacgctcgcaacatcgctatggttttcgcaccgaatatgaccaagatggcggaccccttgactgctttgatacatgccgttcaagtgatgaatttcctcaagacattgatcttgagaactgtaaaagaaagggaggaggctgctaaagtagccagggcgttcccatcgagctctggttccccgagcgacaaagatgagcctcaaactgtagaacagttggacatgctcttcgtctgttcaagtcagcaaaatgtagagtatcctatggttgatgaggctaagtttgaccagttcctttttagagtggaagaagctcttcaccatgagacgcaaggcagcacagatggacccaagaatcatgacagcggtagaggtgaccagagaagtaacagtgagatcactccattggacaccggtttgaccggccaaaatgagttcagtaacaacagcgaggaaggtctctttgacaagtttaaatttaggaaaggggtagggaggctctgcaggcaccctgtgtttcagctgagtaggtccatgaagaagtcagatgaagcggagcaagcatgtgtatagggcatgcctgtgcagtggataatattgacacacctgtatttctctgcagcttgtttactgtgtaggtcttcggctattctcctagattgtgtgcctagaaggcattggccccattattagtactgatttgggtgtatatgtgactatgtcagctgttcacttattgctgtcctaattgttaagaagctatcatgcactagtgatttttcttagtttgtcagatagaatctcgtgtgtgattttc

SEQ ID NO: 51077 - DNA, 4475 bp, Zea Mays
taactgcgtgactgcaccattgaggacgccaattcataacttccttccttccttccttccgagcaccggattcgagcaaaagcatccgcgcgtgcgcccactccctccgcctgccctctgatcctcctcgcctccgcccttggctccaatggcgctgtcctacctggaggccgtgctttgctttatgattctcatgttcatatttgagacgtatcttgacatccgtcagcatagggccctcaagctgccaactttgcccaaacccctgctgggagtaatcagtgatgaaaagtttgaacgctctagagcttatagccttgataaaagctacttccattttgtccatgagtttgtgactattttaatggataccacaatactgtactacagatccgttccctggttttggaagaaatctggagagttagttaccaatgttgggctgaatgctgagaatgagataatacacacccttgcattcttagctggtgccatggtttggtcaaagattacagacttgtcgttctctatttattcaacttttgttatagaggctcgacatggttttaacaagcaaactatatggctcttcatcagggatatgatcaaaggagttttactattcatgatactggggccaccaatcgtggctgctatcatctacatagtacagattggaggaccctacctggatatatatctctttggttttatgtttgcattagctcttctgatgatgacaatataccccattgtgatagctcctctgttcaacaagttcacccctcttcctgaaggagtcctcagggagaaaatagagaagctggcagcttccctcaaatttcctttgaaaaaacttttcgtggtagatgggtctaccagatcaagccacagtaatgcttacatgtatggattttttaagaataaacgcatagtactctatgacacattgattcagcagtgtaccaatgaggatgagatagtttctgttattgcacatgaacttgggcactggaaactcaatcatattgtctattcctttgtagctgtccagctgcttatgtttcttcaatttggaggatatactctactgcttatgtttcttcaatttggaggatatactctagtaaggaactccaaagatctatttcaaagttttggcttcgaggatcagccaataataactggactgatcattttccagcacaccagaatacccatccaacaccttctgagcttttgcctgaaccttgtcagcagagcatttgaatttcaggctgatgcctttgccaagaaccttggatatgcccctcagctccgagcggcccttgttaaactacatgaggagaacttgtctgcaatgaacaccgatccttggtattcggcatatcactactcccacccacctctcgtcgaaaggctgcaagctcttgaagattcagacgccaaaaaaaatgactaacgccaactgtcagagctgttgttcctgatggggcgaagccttgatccttgtacgaggtttccatgagggtacgattcattggttgagtgttgtaaaagctctgtaagcatccagcacgaagatgcttacatgcacgttgagaaatattataggttattgaggactctctctgttttttagttgtcgctggataattcaattttgtattatccagcgacaactaaaaataaacagagggagtataagcgaaccagctatgcaaaactgatgcatcttcctgtgttgaagtcacttgccactcaaagctacactacatgcacgtttcggggcttcgggcagacagtgagacgcatctgaatggaactctttcatctggatcctgtaggcagcagcacctaatccagacatgccgtgagttgctgccttgctggctccagcctccaaaaaacgagctcccctgtcccgcatgcccgtcaggtagcgatgctctcactctgcaccccttcgtcgcctccgcccccaccgtctccccacggcaccgtcataactcccacctcctccgtcgccctcctccgcggtgccgcggaacggcgcgacacggcactcacatcggcgctccacgccgccctcctcaagtccggcgcgctccgttcccggcaggcacccctcgccgcagcgaactccctcctgcatgcctacctccaatgcggcctgctctcccgcgcgctccgtttgctcgacgaaatgccccgccgcgacgcggcgacctacgcccccctcatctccgcgcactgtcgcctcggcgctcccctggacgcccttcgcgccttcctcgacatgttggcctggggttgctccgacgaggagggtgtggacgacgtcgtccgccccaacgagttcacggcggccgctgtcgtgcaggcctgcgggctggccagggacgagcggctggcgaggatggtgcacggctacctcgtggcaggcggcttctgcgacgacccgtttgtgctcggttcattggtcaacatgtacgccaaggttggggatgtggcgagcgcgcggaggctgctcctgggattaccctgcagggatgttgtttcttggacggccatcgtatcagggtgcgtgctcaatgctatgctcgaagaggccctcggggttttcctcatgatgctggaggacggcgtcctccccaacaacgtcacgatgctgagcgtcattcaggcgtgcgctttgatgggcgcctcggaattgtttggtccagtgcacgctcttgttgtgctgttggagctcgagcatgatgcctcagtggtgaactctctcatcatgatgtatgcgaaaaatggatttgttgaagaggctatccggcttttcaagggtttctacctaaaaactgggagcgtatgctctaacgaggatgttcttgcggcagttctttatggttgcaccatttcagggtccgtgaagaacggggaggggctccatgcgcacaccattaaaatgggtgctttcccaagcatcagcgttgagaactcccttatgggcatgtatgctagatttgagcaaatcgatgctgcactcttggtgttcgaaggtatggaggttaaggatattgtttcatggaacaccatcatctcatgccttgccaagactgatcgtgtgaatgaagccatggatattttcagtgttcttcatgctgctgctggtggtgggcttgcgcctgactttgtcacggtcttgagcatgctgcaggcttgctccaatgcaggattacttcatcaagggcagatgctccatggatacgtcatgaaatctggtttcgtgtacgatgtttcaatatgcaatgctctcataagcatgtatgctaagttaggaagaattgattttgctgagatgatctttgagcggatggatatcaaggaccttgtttcctggaattcaatgatcaatgcttatggtatgcatggcgatggtcattcagctctacgggttttccaccagttgaaggatgctggaacacctgcgccaaacgctatcacatttgtgagtgtgatatcagcttgcagtcactctggtttggtttcagaaggtcacaagtgctttgaaagcatgggaagagaccacggcattgaacctagcatggatcactatgcctgcgtagttgatctgcttggaaggtctgggaggtttgcagaggctgagcaattcatcagggacatgcctgtccgtcctgattcaaccatctggggacctcttttagctgcttgccagcttcatgggaatgttgatcttgcagaaaaagctgccaaagaattgtcggccttggaaccggagagtgacatatggagagtatccttgtcaaatacctatgcctcggttgggagatggagagacgctgcaaagattaggtctgaaatgaggagagttggattgagaaaagagactgggtggagttttgtagacgttggaggggttgagggttttaagtttgtgtcagcagatacaaggcatcatgatgctgaaaaaatatattcagtatggcacagtatgaacaggcacatggcagatctagctgctgatgtgcataaacttaatccaattagtgcaatttagtcgatgcacgagatgtttatagatctagctgttgatgtgtctaggtccaactagtgatgaaatggaccttttgtagttatgagcttataacttaaaattacagttgatccgttgttttgaatgctgaatatagttaacaagaagagtgaataaacagaacacacatggaactggagtaagctgcacatattgcattgacgcttgcttcaatcttgctttggaattctttgcttcctttcatgttgaaggttgaaggttgaaattatgctgtgtgcttagcaagttgatttttggcctcaatttggatcccgattaacacactgagtgttaattgacctttgtacggctgatgagataatccggtgtggaaatgtagagaagtcttaatgatgttactgac

SEQ ID NO: 51078 - DNA, 2715 bp, Zea Mays
cacaagtcaagggtcaagcgcagctgggcaaggatcccgacgacgaaggatggacgcaggcgggcaaaccgccgcccacgcttgacgattccgccgctcaggacagcagccgaacacagtcaccaccacggcaccaccaaccccaccccggtcagtgtgcgcgtgctgctgccccccacccacatcgaaacccaagccaagatgcggccgccggcgctcaggctgagcgcgctgctgctgttcctctgcctgtacgccgccccagcgcggtcccagaacgcgaccacggtcacggccgcgcccgcgtccgttgaggggttcaactgctccgtcaaccgcacgtacccatgccaggcgtacgcgctctaccgcgccggcttcgcgggcgtgccgctcaacctcgcagccatcggcgacctcttcgccgccagccgcttcatggtcgcgcacgccaacaacctctccaccgctgcagccccggccaccgggcagccgctgctcgtgccgctccagtgcggctgcccctccgggtcccccaactcgtacgcgccgatgcagtaccagatcgcgtcgggcgacacctactggatcatctccaccaccaagctgcagaacctcacgcagtaccaggccgtggagcgcgtcaaccccacgctggtgcccaccaacctcgacgtcggcaccatggtcacattccccatcttctgccagtgcccggccgccgccgacaacgccaccgcgctcgtcacctacgtcatgcagcccggagacacctactcgaccatcgccgccgccttctccgtcgacgcccagtcgctcgtctccctcaacgggcccgagccgaggacgcagcagttcgccgagatactcgtgccgctccgccgccaggtgccgggttggctgcccccaatcgtgctccgaaacaacgcctccgcgacgccagcggccccgccgccctcggcttctcccaacgcgaccgtcgtgagaaacgaccggaacggggtcgtcaccgggcttgccgtcgggctgggcgtcgtcggcgcgctctggctgctgcagatgctgctgctggcctgcttgtgcagacggctcagggcgaatggacgacgaggtgacgcagtgctaagcggcgacggcgtcgagggcggcgtgttcgctaagggttcgtccgccgctgctgccggcggcggggagaggttcctggtcagcgacatgtctgagtggctggacaagtacagggtgttcacggtggaggagctggagcgcggcaccggggggttcgacgacgcacacctcgtcaacggcagcgtgtacaaggccaacatcgacggcctggtgttcgccgtgaagaagatgaagtgggacgcctgcgaagagctcaagatcctgcaaaaggttaaccacagcaacctggtgaagctggaagggttctgcatcgactcggcgacgggcgactgctacctggtgtacgaatacgtggagaacggatcgcttgacctgtggctgctggaccgcgaccacgcgcggcgcctgaactggcgcgcgcgcctccacatcgcgctggacctcgcccacggcctgcagtacatccacgagcacacctggccgcgcgtggtgcacaaggacatgaagagcagcaacgtcctcctggacgcccgcatgcgcgccaagatcgccaacttcggcctcgccaagacgggccacaacgccatcaccacgcacatcgtcggcacccaggggtacatcgcccccgagtacctcgccgacggcctcgtcaccaccaagatcgacgtgttcgcctacggggtcgtcctgctggagctggtgtccgggcgcgaggccgcggacgagagcggggagccgctgtgggcggacgccgaggacagggtgttccggggccgcgacgagaggctggaggcccgcgtcgcggcgtggatggacccggcgctcgcggagcagacgtgcccgctgggaagcgtggcgaccgtggtgagcgtggcgagggcgtgcctgcacaaggacccgtccaagcgacccagcatggtggacgtagcctacacgctgtccaaggcggacgagcacttcgccgactactccggtgagagcgtgtcggttgacggcagcggcgagatcgctgctcggtgaaccaccatccttcgtttcgtcgtgtactcggtcctactcagtagtaatatggtttttagccatcagttcgcgttgtaaaggtctagcgagcggaggatgagtcagcagcagtgagtatatatagtggtattgaataataacaccggcattccgcgaggctgtgacctgtgagtgtgaggtgcatgaaatgaaatacctacaacgaggtgcctgaaagaaaaggaggttggagtttgaatggaaagtatgaatagggaggatttgggaaggggaacggttggatagcctcatagactggcgcgtgacttgacacggcctgcctgtgaggctgtgacggcgggcgtacgtcgtcctggtatctgttcctaggtcagccccagcacggacggtcacgcacaaaatccatcggatgtaatctgaccccaaacgctcctgatctttcttgctcaccagcctgatcgctgacgggtgccatccagatgaccactcaagcctttcattgagctttgagccgtcatccctttcttatgtacttcgactagtcagctagtgtagcatggggatgaaaat

SEQ ID NO: 51079 - DNA, 1383 bp, Zea Mays
gacgttgaactattcgccaattttcaacgatgtctgctgtcctgatcctgacagagcggacacgttaaccacagcaacctggtgaagctggaagggttctgcatcgactcggcgacgggcgactgctacctggtgtacgaatacgtggagaacggatcgcttgacctgtggctgctggaccgcgaccacgcgcggcgcctgaactggcgcgcgcgcctccacatcgcgctggacctcgcccacggcctgcagtacatccacgagcacacctggccgcgcgtggtgcacaaggacatgaagagcagcaacgtcctcctggacgcccgcatgcgcgccaagatcgccaacttcggcctcgccaagacgggccacaacgccatcaccacgcacatcgtcggcacccaggggtacatcgcccccgagtacctcgccgacggcctcgtcaccaccaagatcgacgtgttcgcctacggggtcgtcctgctggagctggtgtccgggcgcgaggccgcggacgagagcggggagccgctgtgggcggacgccgaggacagggtgttccggggccgcgacgagaggctggaggcccgcgtcgcggcgtggatggacccggcgctcgcggagcagacgtgcccgctgggaagcgtggcgaccgtggtgagcgtggcgagggcgtgcctgcacaaggacccgtccaagcgacccagcatggtggacgtagcctacacgctgtccaaggcggacgagcacttcgccgactactccggtgagagcgtgtcggttgacggcagcggcgagatcgctgctcggtgaaccaccatccttcgtttcgtcgtgtactcggtcctactcagtagtaatatggtttttagccatcagttcgcgttgtaaaggtctagcgagcggaggatgagtcagcagcagtgagtatatatagtggtattgaataataacaccggcattccgcgaggctgtgacctgtgagtgtgaggtgcatgaaatgaaatacctacaacgaggtgcctgaaagaaaaggaggttggagtttgaatggaaagtatgaatagggaggatttgggaaggggaacggttggatagcctcatagactggcgcgtgacttgacacggcctgcctgtgaggctgtgacggcgggcgtacgtcgtcctggtatctgttcctaggtcagccccagcacggacggtcacgcacaaaatccatcggatgtaatctgaccccaaacgctcctgatctttcttgctcaccagcctgatcgctgacgggtgccatccagatgaccactcaagcctttcattgagctttgagccgtcatccctttcttatgtacttcgactagtcagctagtgtagcatggggatgaaaat

SEQ ID NO: 51080 - DNA, 1468 bp, Zea Mays
caggggcagccaggcacacacacacacagtgaccctgccccttttcccggccgtctcgctctccaccgatattccgctcctcctgtccagtcctcctcccccgagccggctcattatatcgtccgtcgcgcagcacaacgcaagtttgctagcggccggatcagcagccacaaaacgaggagagcaaccacgctgcacacagagacgcccgtgtgtgagatatagagcaagctcgatcgaaggaaggagggaagctagagatcgtacgtcgccatggggaggggacgagttgagctcaagcggatcgagaacaagatcaaccgccaggtcaccttctccaagcgccgcaacggcctgctcaagaaggcctacgagctctccgtgctctgcgacgccgaggtcgcgctcatcatcttctccagccgcggcaagctctacgagttcggcagcgccggcataacaaaaactttagaaaggtaccaacattgctgctacaatgctcaagattccaatggcgcactctctgaaactcagagctggtaccaggaaatgtcaaaactgagggcaaaattcgaggccttgcagcgcactcagaggcacttgcttggggaggaacttggcccactgagtgtgaaggagttgcagcagctagagaaacagctcgaatgtgctttgtcacagacacaacttatgatggagcaagtggaagagctccgcagaaaggagcgacacctgggagaaatgaacaggcaactcaaacacaagcttgaagctgaaggttgtagcaactacagaaccctgcagcatgcagcctggccagctcccggcagcaccatggtggagcatgacggcgccacctatcatgtgcatccaacaactgctcaatcggttgcaatggactgtgaacccactctgcaaatcgggtaccctcctcatcaccagtttctgccttccgaggcagccaataatatcccaaggagcccccctggaggcgagaacaacttcatgctgggatgggttctttgagttgctctgttaatcatccatccatcagatggatgtccaaactaataaaaggcactcagtgctaccatatgcatatccatgcttaagtgcttgatttgccacgacgtgggatatcttttaaatttatcgttctggtgtgtaataactaattaagaacggcaccttcattctatggttgtggtgtggcacttctatctatggtttttgtatttggaccacgaatgttgtaatttgtaaaaaaatttaaagatttatctatgctgccggtgctgcggtgcatagcccggtgcatagaatccaaaattatctgcaccggtgcttattatgtgctgatgcatagctgtgtaccattgttttgggtcatttttctgctctatattatttgtccctttctactggcccatgcctcttaaagcatagctacagactatcgccagttttt

SEQ ID NO: 51081 - DNA, 2816 bp, Zea Mays
atcaacaccacctgtgagcttaagaaatttcaccatatgaaatggcaggaatttcctagattcatccttttgcgctttcgtgtgtaatctttgtttatttaagtttgtagaggcaatcagcatcatcctatttgttttttaataaaaacttggcaacatgtggaaaaaagactggcaatttcctagatacatcgtgttgtcccctcagggctgtgaatcttccaaggcaactaaatagtttttaaattcgctcatgtgacccccaaagaagaactagtcaattgttcgggctcaacacattgcacgtgacccaaggcgaaaaattaatactggtggcacagaaacaaggaagaaacttccaatataattggctaattgcatgtatactgcttgttatgtcatcgtttcaggctgaaagcaccgcctcaacaaaaaaatacattttcctcaaaaaaaaatacattcactccattattaaacacagctgaagaagaatcaaccatggccaaaaggttttgtctttgccatcctgttgaactagaatttattttgacccaaatcatcacgcaggatgcattacccaaagtcaaggatggacaatccggtactatcatgacacaggacttcagatatggtggaacaaatggggtgcgtgcagtgggtgggttcatagaggtaataagggttcaggattcagaggtctgcaaagaatctaatctaagagtaagtggtgtcaacaaaagtaccagaactattttatatttttatttattaaatcatgaaaacgtcctatacatgtctgagtatcttttcctgacaagggaggagtatcaattttcgagaatttggaagtatccgcatatcatatatgttagccaaatgatgagggttcctagatttagcttagtatctcatcgcagcacttctcttgtacttctgcttgtaaagataatcctattgccgtttctctagaatgaaagtgaccaaatgttgccgttctctggaatagaaatggccaaatgttgtcgtttctctggaatggaagtggccaaatgggccaaggttcggttcaggaaaaataaggatgacaatttaaaagaaattaaattcctaacaaaccaattgttctcttgggtatcgtttcggcagaagtggaagacactgctcattatgccaccactacaatggatgaatgattttgtgttatggactccatgagactggcgaccggtcctaaacttgtttgatctgtagcaattgttggtggttagtgtggttgatgagtggacatctatgtaaatttgttcagtctttgctttatgctaatgggggcttcatgagtaggatgctaccgataagctatagttagctagtaatccaagcatgtataaaaagaatgttgtaaaactccttattggctttgaatacgaacaaagaaatatcatattccaaaaaaaacaatggcataaaaaacacagcatggagtaaaaataatgctgcaaaactctttatcggctttcaatataagcaaggataaaaaaatggaggcacacagaggtagaagcagtgttattaaaacaacgtttaaacgacaaaactttaattagagattgaattcatgttttagcgttttggcgttctaaactgtaaaacgcagtgtttcatgcgttttagaccattagctacttttgggttcagtctgttatctacttttggggtccaatccggctcatgggtgaagttttggtaagccactaacctctttgttttgatatttaacttaatgttattgtctcaaattatgatatattggtatttttcctgtgttgtttaaaactacgtttaaacattgtttaaacgtttaaaagtcaaaacttcacccatgaacgtttcaacgttttatcgttttaataaccttggtagaagaaaacaatgtatttaagcaaagtatgtattagaaaacaaacaacatgcaaaacatcaacatattagagggagggcaagtacaaaactcggctggaagggggaaagaccgcccccacggtattatattaagaagaagctcaattagagccccggccgagaaaggtcacgaaaattggctccccgttcagcatgagggtccacctcctataggccagactatggagactagggggttgaaacaataagcttatgtctgactgtaggtgactgtttgggccttttttagcatgcgctagtagttgcacttagttaatgtcgttaaatgtctgcgagaaaaaagagagggaactggaaaattgactagaattgcaccagaaaggagctgttacttgttcaattaaatgtcagcctagctctggctaccatcaatagtcactacagcagcatataagcattacttcaccatttttaccctaaacaaggtcacccgtgaattaggttttcaatccaatgaaatcacccccaattaatatcttgagtacttagcttaaatgagaggccagctgctcaatagaaacatagagcttgacatttttttcctcgcattgataacagggcacctccctccctccctccctctccctctctgagtgcaagtgcaaccataatagctaaactgctattgcgcccaatcgctccatacaatctaacaataaaaaagagctaaactgctattgcgcccaatcgctccatacaatctaacaataaaaaagtagtaatgattacaagaaaaaaacaatgatccccagatcactcccctcaagcaaacataggtatcatatgagaaatcaagaatctcagtccatcagtcagagcaaccacaatctaac

SEQ ID NO: 51082 - DNA, 2524 bp, Zea Mays
ggcaggaatttcctagattcatccttttgcgctttcgtgtgtaatctttgtttatttaagtttgtagaggcaatcagcatcatcctatttgttttttaataaaaacttggcaacatgtggaaaaaagactggcaatttcctagatacatcgtgttgtcccctcagggctgtgaatcttccaaggcaactaaatagtttttaaattcgctcatgtgacccccaaagaagaactagtcaattgttcgggctcaacacattgcacgtgacccaaggcgaaaaattaatactggtggcacagaaacaaggaagaaacttccaatataattggctaattgcatgtatactgcttgttatgtcatcgtttcaggctgaaagcaccgcctcaacaaaaaaatacattttcctcaaaaaaaaatacattcactccattattaaacacagctgaagaagaatcaaccatggccaaaaggttttgtctttgccatcctgttgaactagaatttattttgacccaaatcatcacgcaggatgcattacccaaagtcaaggatggacaatccggtactatcatgacacaggacttcagatatggtggaacaaatggggtgcgtgcagtgggtgggttcatagaggtaataagggttcaggattcagaggtctgcaaagaatctaatctaagaaatgaaagtgaccaaatgttgccgttctctggaatagaaatggccaaatgttgtcgtttctctggaatggaagtggccaaatgggccaaggttcggttcaggaaaaataaggatgacaatttaaaagaaattaaattcctaacaaaccaattgttctcttgggtatcgtttcggcagaagtggaagacactgctcattatgccaccactacaatggatgaatgattttgtgttatggactccatgagactggcgaccggtcctaaacttgtttgatctgtagcaattgttggtggttagtgtggttgatgagtggacatctatgtaaatttgttcagtctttgctttatgctaatgggggcttcatgagtaggatgctaccgataagctatagttagctagtaatccaagcatgtataaaaagaatgttgtaaaactccttattggctttgaatacgaacaaagaaatatcatattccaaaaaaaacaatggcataaaaaacacagcatggagtaaaaataatgctgcaaaactctttatcggctttcaatataagcaaggataaaaaaatggaggcacacagaggtagaagcagtgttattaaaacaacgtttaaacgacaaaactttaattagagattgaattcatgttttagcgttttggcgttctaaactgtaaaacgcagtgtttcatgcgttttagaccattagctacttttgggttcagtctgttatctacttttggggtccaatccggctcatgggtgaagttttggtaagccactaacctctttgttttgatatttaacttaatgttattgtctcaaattatgatatattggtatttttcctgtgttgtttaaaactacgtttaaacattgtttaaacgtttaaaagtcaaaacttcacccatgaacgtttcaacgttttatcgttttaataaccttggtagaagaaaacaatgtatttaagcaaagtatgtattagaaaacaaacaacatgcaaaacatcaacatattagagggagggcaagtacaaaactcggctggaagggggaaagaccgcccccacggtattatattaagaagaagctcaattagagccccggccgagaaaggtcacgaaaattggctccccgttcagcatgagggtccacctcctataggccagactatggagactagggggttgaaacaataagcttatgtctgactgtaggtgactgtttgggccttttttagcatgcgctagtagttgcacttagttaatgtcgttaaatgtctgcgagaaaaaagagagggaactggaaaattgactagaattgcaccagaaaggagctgttacttgttcaattaaatgtcagcctagctctggctaccatcaatagtcactacagcagcatataagcattacttcaccatttttaccctaaacaaggtcacccgtgaattaggttttcaatccaatgaaatcacccccaattaatatcttgagtacttagcttaaatgagaggccagctgctcaatagaaacatagagcttgacatttttttcctcgcattgataacagggcacctccctccctccctccctctccctctctgagtgcaagtgcaaccataatagctaaactgctattgcgcccaatcgctccatacaatctaacaataaaaaagagctaaactgctattgcgcccaatcgctccatacaatctaacaataaaaaagtagtaatgattacaagaaaaaaacaatgatccccagatcactcccctcaagcaaacataggtatcatatgagaaatcaagaatctcagtccatcagtcagagcaaccacaatctaac

SEQ ID NO: 51083 - DNA, 940 bp, Zea Mays
gcccgtaggccgtacccaatcaattttcctaccaccgccgcaccaccggaccgttcattcccgcttttcccagccccgcgctcccgctcccgctcccgcgcccgcgcccgcgcccgcgctgctcctcctccctcgtcttgtgaggccgacagccggagaggcacagcgcaccaaatgattctggtggccatcgtggcggagctgctggaggagtacacggcgctggtggcgcgcgtgctggagcagctgctccacggcgcgcccttcccgcgccgcatgcgattcctcatgctccggagcctccccttcgccacgccgccgctcccgccgccgccgccagcgcacgcgctccacgtcggcgcgccctccccgcccctctgagtcagagtactgttcctcgacgtgtttcagcgtttgtggcgtcacggtcaggagtagctagcagcctagcaggcgtctggaaatttcggacagacacgtggcagcccatgctagcttccaggcgttggaccatgatctaacgctggccgcagaatcgctgtcgctggcgagaagggactgcgggtgggactgccgtctcattcttttggtgacgtgtgcgaggggatccaaatccaagggacgagacgacatgcaagtgttgcttcaatcttggcccttaattctccgaatactcttcgtcatcttcactaccaccgagttcccggttcaaatccaagggactgccgtctcattcttttggtgacgtgtgcgaggggatccaaatccaagggacgagacgacatacaagtgttgcttcaaccttgacctcgttcgttcgttcactttagtatacaatagtaatcacactataaacacggttattgtgatctcgtaagacttataagtgtctcatggttaactacaattatgtgtgtaagtgtcaaataatacatgcaag

SEQ ID NO: 51084 - DNA, 1838 bp, Zea Mays
acgggtggtggtgtgtacgtgtgatatataggagtataaacatagcgcgagcggcccatacccaacaacaagccaaccgccaacacagccggacaccaacctgtggtcgcgacgccacccggccgtataaatccacgccgccccgtcgccgccggatcctgccagtgccagcacaccacgggtttcccctgtcggagagaggacgccttttggtgctgtccctgtacttctcctttcgaaaggatctctctgcgcgccggggcggcgatggcggcggcgccggcgcccctgccggcgcccgtcgcagactggtgggagcgcgtcaacggctcgccggcgtggcaggacgggatcttctggaccctcgccgtcctctacggtgccattgctaccgcctcattcatccaagttgccaggatacagtgcagagtccctgaatatggatggacaacccaaaaggtcttccagttcctgaatttcgtggtcaatggggccaggtgctctatctttgctttccgtcgccaagtgcaacaagtgaaccctccgatctttcagcatgttattcttgatcttcctggccttgcattcttcactacctatgcactgttagcgcttttctgggccgagatactttaccaagcacgtggaataatgactgatcgacttagatcaggtttctacatcattaattgtgttgtttatgcattgcagggttttctgtggttgtggctgtggtggaatccaaatcattctatgctagtcacttctaagttattcattgcaggtctttcttttttcactgccttgggttttctgatctatggaggaaggcaagatcatgaatactactcaatgcttctttaataaagtcattaacaacaatgcatggatttttttattttatctttttgttagccaattggattgactaggttgtctgcaaaacatgtaccgcagaagtataaatctaaaaagtgttacgttagtacttagtgatatgcatcaagttcagggtttgatctagctaccgcactacatacaaatatgcagtatgcacttacatttcttgtttgttcaggcttttcatcatgctgaaatattttcctattgagtcaaaagggaggcaacaaaagctgagagaagtcggcagagttgccaccatatgtttctgttgtttctcggcacgatgcataatgatgtgcttcaatgcatttgacgaggaagctgacctcgatgttcttgaccatccagttctgaatttgttctattacctgcttgtggagattctcccttcatctcttgtcctgtacattctaaggaggattcctgcaaagctacggctatcccagtatcaccccgtcagcagcagctagagacgatgcattaccatctgctgagccaaaaatggtgactgctgtcaagccatgaaaaatcaactgcaatgccctctatataatatttgtattggtagcctctctgcaaaatatatatagggataagacttgcctcggttatttcttttctagaccctactcacatggaagccatccaatatttttcctagctcacctattgctaaccctgttagttcaatctgctaattttatgatttttagtgtttgagcataatgaaggaaagcaccattgtaaaaactgaactacatgaaaagttgaacatagattttttttccctggagatgagtttaacagtgagttgccctttggaatcattgaacttgttttggtattcttcctcatgtgacttgtaatgctttagattatctccgtttcagtaatcagaatgtgcgaggaagctgccaacgtctttactccataac

SEQ ID NO: 51085 - DNA, 1478 bp, Zea Mays
aacaagccaaccgccaacacagccggacaccaacctgtggtcgcgacgccacccggccgtataaatccacgccgccccgtcgccgccggatcctgccagtgccagcacaccacgggtttcccctgtcggagagaggacgccttttggtgctgtccctgtacttctcctttcgaaaggatctctctgcgcgccggggcggcgatggcggcggcgccggcgcccctgccggcgcccgtcgcagactggtgggagcgcgtcaacggctcgccggcgtggcaggacgggatcttctggaccctcgccgtcctctacggtgccattgctaccgcctcattcatccaagttgccaggatacagtgcagagtccctgaatatggatggacaacccaaaaggtcttccagttcctgaatttcgtggtcaatggggccaggtgctctatctttgctttccgtcgccaagtgcaacaagtgaaccctccgatctttcagcatgttattcttgatcttcctggccttgcattcttcactacctatgcactgttagcgcttttctgggccgagatactttaccaagcacgtggaataatgactgatcgacttagatcaggtttctacatcattaattgtgttgtttatgcattgcagggttttctgtggttgtggctgtggtggaatccaaatcattctatgctagtcacttctaagttattcattgcaggcttttcatcatgctgaaatattttcctattgagtcaaaagggaggcaacaaaagctgagagaagtcggcagagttgccaccatatgtttctgttgtttctcggcacgatgcataatgatgtgcttcaatgcatttgacgaggaagctgacctcgatgttcttgaccatccagttctgaatttgttctattacctgcttgtggagattctcccttcatctcttgtcctgtacattctaaggaggattcctgcaaagctacggctatcccagtatcaccccgtcagcagcagctagagacgatgcattaccatctgctgagccaaaaatggtgactgctgtcaagccatgaaaaatcaactgcaatgccctctatataatatttgtattggtagcctctctgcaaaatatatatagggataagacttgcctcggttatttcttttctagaccctactcacatggaagccatccaatatttttcctagctcacctattgctaaccctgttagttcaatctgctaattttatgatttttagtgtttgagcataatgaaggaaagcaccattgtaaaaactgaactacatgaaaagttgaacatagattttttttccctggagatgagtttaacagtgagttgccctttggaatcattgaacttgttttggtattcttcctcatgtgacttgtaatgctttagattatctccgtttcagtaatcagaatgtgcgaggaagctgccaacgtctttactccataac

SEQ ID NO: 51086 - DNA, 2273 bp, Zea Mays
aacaagccaaccgccaacacagccggacaccaacctgtggtcgcgacgccacccggccgtataaatccacgccgccccgtcgccgccggatcctgccagtgccagcacaccacgggtttcccctgtcggagagaggacgccttttggtgctgtccctgtacttctcctttcgaaaggatctctctgcgcgccggggcggcgatggcggcggcgccggcgcccctgccggcgcccgtcgcagactggtgggagcgcgtcaacggctcgccggcgtggcaggacgggatcttctggaccctcgccgtcctctacggtgccattgctaccgcctcattcatccaagttgccaggatacagtgcagagtccctgaatatggatggacaacccaaaaggtcttccagttcctgaatttcgtggtcaatggggccaggtgctctatctttgctttccgtcgccaagtgcaacaagtgaaccctccgatctttcagcatgttattcttgatcttcctggccttgcattcttcactacctatgcactgttagcgcttttctgggccgagatactttaccaagcacgtggaataatgactgatcgacttagatcaggtttctacatcattaattgtgttgtttatgcattgcaggtaaagcatgatctttctatttactaagtctagtgctaattcagtttgtataaatttttcatgcattgtgtgtctctttgctgaacggcattaacatttttaatttctttgtatatggtgctattccacattattagaggcctttcttttaagaaaagacattattagaagccaattggaattgtagaagaattcattactttggcatagcgagaaaaaatatttctgatatttaaaactctaatgtcaaaatatagattcttactaactcaaatataaagtagttagcagcagataaagatagtgcacagagtaaaaggaagtatctttatttgttaaattttggttgattcttttatggatgattgattcgttttgtattaaagaattgctcatttttttccttgaacaaaaatcttcttatttcagttgttcatatgtttacattgagtatcctgttattatattcaagacattctgatggaattattctgtcttcagggttttctgtggttgtggctgtggtggaatccaaatcattctatgctagtcacttctaagttattcattgcaggtctttcttttttcactgccttgggttttctgatctatggaggaaggcaagatcatgaatactactcaatgcttctttaataaagtcattaacaacaatgcatggatttttttattttatctttttgttagccaattggattgactaggttgtctgcaaaacatgtaccgcagaagtataaatctaaaaagtgttacgttagtacttagtgatatgcatcaagttcagggtttgatctagctaccgcactacatacaaatatgcagtatgcacttacatttcttgtttgttcaggcttttcatcatgctgaaatattttcctattgagtcaaaagggaggcaacaaaagctgagagaagtcggcagagttgccaccatatgtttctgttgtttctcggcacgatgcataatgatgtgcttcaatgcatttgacgaggaagctgacctcgatgttcttgaccatccagttctgaatttgttctattacctgcttgtggagattctcccttcatctcttgtcctgtacattctaaggaggattcctgcaaagctacggctatcccagtatcaccccgtcagcagcagctagagacgatgcattaccatctgctgagccaaaaatggtgactgctgtcaagccatgaaaaatcaactgcaatgccctctatataatatttgtattggtagcctctctgcaaaatatatatagggataagacttgcctcggttatttcttttctagaccctactcacatggaagccatccaatatttttcctagctcacctattgctaaccctgttagttcaatctgctaattttatgatttttagtgtttgagcataatgaaggaaagcaccattgtaaaaactgaactacatgaaaagttgaacatagattttttttccctggagatgagtttaacagtgagttgccctttggaatcattgaacttgttttggtattcttcctcatgtgacttgtaatgctttagattatctccgtttcagtaatcagaatgtgcgaggaagctgccaacgtctttactccataac

SEQ ID NO: 51087 - DNA, 2116 bp, Zea Mays
aacaagccaaccgccaacacagccggacaccaacctgtggtcgcgacgccacccggccgtataaatccacgccgccccgtcgccgccggatcctgccagtgccagcacaccacgggtttcccctgtcggagagaggacgccttttggtgctgtccctgtacttctcctttcgaaaggatctctctgcgcgccggggcggcgatggcggcggcgccggcgcccctgccggcgcccgtcgcagactggtgggagcgcgtcaacggctcgccggcgtggcaggacgggatcttctggaccctcgccgtcctctacggtgccattgctaccgcctcattcatccaagttgccaggatacagtgcagagtccctgaatatggatggacaacccaaaaggtcttccagttcctgaatttcgtggtcaatggggccaggtgctctatctttgctttccgtcgccaagtgcaacaagtgaaccctccggtttggacgccttaactttgtcctgtaatgtaaatgataatttcaatttgatcgtcctagcttggattgctcacgttcatttgtattccagatctttcagcatgttattcttgatcttcctggccttgcattcttcactacctatgcactgttagcgcttttctgggccgagatactttaccaagcacgtggaataatgactgatcgacttagatcaggtttctacatcattaattgtgttgtttatgcattgcaggtaaagcatgatctttctatttactaagtctagtgctaattcagtttgtataaatttttcatgcattgtgtgtctctttgctgaacggcattaacatttttaatttctttgtatatggtgctattccacattattagaggcctttcttttaagaaaagacattattagaagccaattggaattgtagaagaattcattactttggcatagcgagaaaaaatatttctgatatttaaaactctaatgtcaaaatatagattcttactaactcaaatataaagtagttagcagcagataaagatagtgcacagagtaaaaggaagtatctttatttgttaaattttggttgattcttttatggatgattgattcgttttgtattaaagaattgctcatttttttccttgaacaaaaatcttcttatttcagttgttcatatgtttacattgagtatcctgttattatattcaagacattctgatggaattattctgtcttcagggttttctgtggttgtggctgtggtggaatccaaatcattctatgctagtcacttctaagttattcattgcaggtctttcttttttcactgccttgggttttctgatctatggaggaaggcttttcatcatgctgaaatattttcctattgagtcaaaagggaggcaacaaaagctgagagaagtcggcagagttgccaccatatgtttctgttgtttctcggcacgatgcataatgatgtgcttcaatgcatttgacgaggaagctgacctcgatgttcttgaccatccagttctgaatttgttctattacctgcttgtggagattctcccttcatctcttgtcctgtacattctaaggaggattcctgcaaagctacggctatcccagtatcaccccgtcagcagcagctagagacgatgcattaccatctgctgagccaaaaatggtgactgctgtcaagccatgaaaaatcaactgcaatgccctctatataatatttgtattggtagcctctctgcaaaatatatatagggataagacttgcctcggttatttcttttctagaccctactcacatggaagccatccaatatttttcctagctcacctattgctaaccctgttagttcaatctgctaattttatgatttttagtgtttgagcataatgaaggaaagcaccattgtaaaaactgaactacatgaaaagttgaacatagattttttttccctggagatgagtttaacagtgagttgccctttggaatcattgaacttgttttggtattcttcctcatgtgacttgtaatgctttagattatctccgtttcagtaatcagaatgtgcgaggaagctgccaacgtctttactccataac

SEQ ID NO: 51088 - DNA, 779 bp, Zea Mays
ctgaaattcaagatgagctgtaaatttcgacacaagactactgcagtaatagaggttggaatttcatgcttaggcatcgcatcgttgtgctttcggagtactcacttagcgacctctattctatggattaaagatgggtctcctaccatctggaaacagggctctaaagttatcaatccatgccttcttgcttttccatttcctagttttctttcttccctggcaattcagaaagggaggttctgttggaagccaaatacttactgaaatcagtattttaatagtgactgctggtgtttccttctgtttggaaataaactatcattttgtccaggttgcacatacaaggaggtgcagtttcgctccacctcagagcactgccgctgcagagacaaatcccactgaatttattctggaaactttggaacaaagtgatccacaatcattgatacaatatcttgcttaccaagatttgtgtgtggtatctgagtgtaacttggaaccgtggcgcagagctgctttctttgaggaatctggtgaaacttatagaagaattgtgacagcttgtttgaagccacttgaggagtttacttcaaaaattgctgaagcccttgaaggtttttctagtgatcagccagaattgatgctacaacagtccagactctttagtgcatttgatgattcccaggtaaagttacatcatgtatataatgacctctgttgcattttcggccatgagctttctactgttatttgtacgcagtaccttattaggaaca

SEQ ID NO: 51089 - DNA, 1890 bp, Zea Mays
atggcggcccgtcagccgacgcgtgaaggtcagcgcccaccgatgccgcaagcacgtggtggtgggcttgctgctccgcgtgggggtagaggatctctcccaaggtccagccgtggacgggccatcttggggggtcgtgatcgcggtcatgcccgtgggagtggccgcgggtggttcaatcctggacgtgggcgtggctttgggcaggttcaggctgctgctcctcaacaacgctatgtcccggttgaccttcaggaagctagccaaggaactcaggcagaggcgccggaaccaatcaaggccaaaaagcctcgtacaccattctgttttcgctgtaagtgtcttgggcacctgcaagagaattgctcagctattcttgactgctgcatctgcaacaaaaaaaataatcatgtgccggcaaagtgtcctattctcaagatgccaaggcctactgcatctatgttggggtgtgcaaaaaatgaattgaccttttttcggatcccggagtttgacttgatggtcgaggctcctgcaccggcaccaactgctttgatatcagtatcaggtggtaaattagatgcgttggccattcaattggagcttgccaaattgtctagagtggagtggaactgggaagctctaccccatggggatgattcttttctggtagtatttccctcagaggatgaactgctccggatggctgatattgagtataaactcaagagtggaattgctattagtatcagtcaatgggaaaggactggggatgctagtccagcctattatttggatgagatttgggtgcatgttacaggtgttcctcatgactggcgtcacttcttggccttctgggcagttgggtctatgattggcactacgattgaggttgatatgttgacatacaggaagaaggggattattcgcctcctggttggtattttagacagagaacagttgcctctaacaacagatattgtcttccacaaggttggatatgatattactttcacccctgagctgccagattttgaaccggctatgccttccctggtcctggatgcttctgagaaagaggacggagacaacaaggaggatggggctccgagggttagtgaatttgatccatcaagaaagaaacaaaagaatgtactgggttccttcggtccaaattcctctagtgataggcaggactcggcccccatgcatgttgattgcagtgaggttcataggccaatgtacacaacagggtcaggagtatgtgttgtagcacctacagagaagagtgtaatcaaatcgtctttaccacctggtttcaagacaggcaaaccaaatggttcaattagtctgatgaagcctctttctccttcgaaggaaaggacaactgatcacgctaagcaggtttcagtgcatgttgtgcctggttccgctttggttgcagggacaggtgccgcaatcccagcaggtgatcttgcctcggataattgggcaccggtggtccctcaggctgggccatctttaacctccatggtcaatgggactacgatgcctctgcagtttggatctctgaacatggccaaccaaaccttggctgcttgttcacggcctgctgtggagaggaatctggtggcgactcagcaaatgaagaccacccaaggtgttgtccaggatcagagcctgcgtggcgagtctgagcccgaaaattatgcacctgctccggttatttcttatgaaaaggcaatgcggcgcgctgcagcacggaatcttgacgctgatttgggctccaagacggtggcttcctcacaagagatgctacattcgcctttaacgcccgtgcagcaggaaactgaggctggaagaaatttcaagaattgtatcccctcgatgtaa

SEQ ID NO: 51090 - DNA, 1913 bp, Zea Mays
tatacacacacagacacaggacatactatatatatgtctgttcatcatgccctgctataagctcttcctctctcatcgacctttgagcaaccacgcactagcttgacggccgattgaagcagcatggaaccagctgctgcggcatgggtaccattcaactttcaactggcgaactggacagcattgtttcctggtgagatatatggtagctggatgcaaactcgtgcccctgataactcctccggcagcggccggcagctatttgagtactatgctgcagccacacagcattgtccaattgaggaagaagcacaagaccagtcgtttgaggtcgctttggatttgcacaatctggaaatagacaacaacgacgccatttgtgtgttcgagaaagtagctcgtaactttgaggccgatatccgtaggacgaaagagaagatccataggtaccctgaatgcattcgagatctcggtgattactatactgtgccgaggattgtggccatcggtccttaccaccacggcaaacaaccgttagggaaggcggaagaggtgaagtgggtggcggcgtatcactgtatcgtagaatcgggctgctcaccgcaggcaatgtacgatgcggtcgcctccgccgccgacaatgcccgcaccctctacgacaaggatgtgatggcaggtatcggctatgacgactttcgagttatgatgttctttgatgcttgcttcctggtgcagtacatagtctggtttacgggtttggagaatgagacagatccgtcgtcatggcacaatttccttcacctcaaccgcagcggcatcaaccatgacgtctggctgcttgagaaccagctcccctggagtgtggtggaggccgtcatgaggctccggcatgtgaacctgcggaagtacgttgaggattggagaggcactctgcaagaccgccgggatctcatagaaaagcctttcgtctgggaagacaattacgatccaccacatctccttggcctcctccggcactacgctgtaggacgaagtgaaaaaatcatcgaccgcgacctgtccaaggagttcgactcgctgtcattttcagctagtgccatggagctcgccgaaatcggcatcacctttagggccaacgaaacagcaaagctcgttgacatgggcctaaagaaagatgtcctctttgctgagctctcactagcgccgctgtctctaaaccatgcgcgcgcaagccgcctcgtcaatatggccgctttcgagatatgcactgtccctagttttattgatgctaaagttgaagactccgctgtttgctcctaccttctcctcctctgcatgttggtgcatagggaagaggacgtgcatgagctgcgacgacagggtatcctgcaaggaggagctgggctcaccgacaagcaggcactcaaattcttcgccagccttcagagcctgcccgacgggcaatgttgtaccctaaccatgctagaaatcgagaactacaggatccacaagaagatgcagacaaaggtgtacaagaagcgcaaaaccatcttcaaggttttatccatcactgttgcagctatcactatctttggtacactactcagtatctcagcacaactctcaaatgtctctaaaggctgaagtagagtttgaaaaataggtgcgctgggataggtactaggctggtgagctcactttgggctgccctttgataccttttgttctatcaatgctttgtgttactttccttatagtagctataacattccttcaatgatatacctgaatgttggtttacagtaaaatgtttgctccatgccttttagctttctgattcgcgaggtagtgtgttgtaactgtattgtctatttgtgcattggacaccatgaaagttgcaaacttaaactgat

SEQ ID NO: 51091 - DNA, 2035 bp, Zea Mays
ttcatcgattcggcgagttcaaccgtgtcctccgcgctccgtgcctgccagcctgccactgctcggttctagaatccactccctgacctgtgcggcgctccgtgcctggctgccagcctgccactgctcggttctagaatccactccctgacctgtgcggcgttcccgtgcccggccggagtatcgatcgcatggcctgcgccggcgccgcgcagaaggtctcagcggtgctctaccactacccgtgcccggacggcgcgttcgcagcgctcgccgctcacctctatttttccggcgccgcccacccggtccgattcttccccaataccgtctacgaccccatcagatgttcaattctctaattccaaaggagtgattcacttccactggaagaaataaaagatgtttaccttcttgactttgtgggacctcctggttttgttgaagatatagcccctaaagtcgaaagaataacaatcctggaccatcataagaccgcttttgaaagtttgtgtgtgaatgccacacttgggcaaaatgtgaccaaggtgatagacatgcagcgtagtggtgcgacaattgcatttgacttctttagaaacaagctcttaacagaagttagcacctcacggggtaatgaaagtggtaaagatgtagccaaggtcaaatatgtacctgacaacaaggctgaaacagtacacaagctttttaagtttattgaagacggggacttatggagatggaaaattccaaatagcaaggccttcagcagtggacttaaagatttggacattgaattcaatgtcaatgcaaataataaattgtttgatcagttgttggagttggatcctgagcatgtcatttcccatggacaagcgacattattagagaagcaaagattaatagatgattgtttggagaaatcctatgaaatttccctgggatgtggccagtttgggagttgtctggctgttgatgctgatgctatttcaaatttgagaagcgaacttggaaatcaactagctagcaagagccgtgattttaatctaaggggtattggggctgttgtatacaaagttcctgagttgaataatgaccagatactgaaagtaagtctaagaagtttagaacaagaagacacaacctgtatctctcaggaatatggtggtgggggacatcggaatgcaagctcgtttattttgagtgtgactgagtttgacaggtggaaagtcggatcttctcgaccaaaagttttgaagacatgaactgtcgtgtggatgaggtttcgcgtgcttggccaacgtcagtaacaaaacggcagcaggtgggcatctttgaagcaagtattggttgatgagctatgaattcttagggaagacggcccgaatgaacttcaagaaacgctccgagtagaactgggggtccacaaccgagatcgagtccgagtcatattgcatggaattcacgatcgattttctttgtcatattgtactattgcaatatgtcaatgatgcccaggtagaggaccaggaacggacccagccaaaagtttgagtgggggcttaaatagaagcataattattaatggacctttacagctacagtgaataatacaaacttcgcaagaaccagaaaattaagtgaggcccgtgcttcccactcagcctaacgtgggtccgcccatgtagaggacaacatcgcacacctcacggaggagaaggccaatgcagctgatgaggagttgaaaaccttgatgatatgctagttgtgatgcttctccaaccagtgagatagtagctgatgatatgctagttgaacagctttaaccagtgatgcacaattttactttatgcggggggaagggtgactcggaacgacatgttttacatagtagagatggagtgttcttatcacttggggccttggggtgagacagaaaaagaacaatggaacgctggctggttgtggagcagaaaatcttttattcttggtcttttttttcaaacttaaatagatgcaaatgtgtagatgaggg

SEQ ID NO: 51092 - DNA, 2011 bp, Zea Mays
ttcatcgattcggcgagttcaaccgtgtcctccgcgctccgtgcctgccagcctgccactgctcggttctagaatccactccctgacctgtgcggcgctccgtgcctggctgccagcctgccactgctcggttctagaatccactccctgacctgtgcggcgttcccgtgcccggccggagtatcgatcgcatggcctgcgccggcgccgcgcagaaggtctcagcggtgctctaccactacccgtgcccggacggcgcgttcgcagcgctcgccgctcacctctatttttccggcgccgcccacccggtccgattcttccccaataccgtctacgaccccatcaggagtgattcacttccactggaagaaataaaagatgtttaccttcttgactttgtgggacctcctggttttgttgaagatatagcccctaaagtcgaaagaataacaatcctggaccatcataagaccgcttttgaaagtttgtgtgtgaatgccacacttgggcaaaatgtgaccaaggtgatagacatgcagcgtagtggtgcgacaattgcatttgacttctttagaaacaagctcttaacagaagttagcacctcacggggtaatgaaagtggtaaagatgtagccaaggtcaaatatgtacctgacaacaaggctgaaacagtacacaagctttttaagtttattgaagacggggacttatggagatggaaaattccaaatagcaaggccttcagcagtggacttaaagatttggacattgaattcaatgtcaatgcaaataataaattgtttgatcagttgttggagttggatcctgagcatgtcatttcccatggacaagcgacattattagagaagcaaagattaatagatgattgtttggagaaatcctatgaaatttccctgggatgtggccagtttgggagttgtctggctgttgatgctgatgctatttcaaatttgagaagcgaacttggaaatcaactagctagcaagagccgtgattttaatctaaggggtattggggctgttgtatacaaagttcctgagttgaataatgaccagatactgaaagtaagtctaagaagtttagaacaagaagacacaacctgtatctctcaggaatatggtggtgggggacatcggaatgcaagctcgtttattttgagtgtgactgagtttgacaggtggaaagtcggatcttctcgaccaaaagttttgaagacatgaactgtcgtgtggatgaggtttcgcgtgcttggccaacgtcagtaacaaaacggcagcaggtgggcatctttgaagcaagtattggttgatgagctatgaattcttagggaagacggcccgaatgaacttcaagaaacgctccgagtagaactgggggtccacaaccgagatcgagtccgagtcatattgcatggaattcacgatcgattttctttgtcatattgtactattgcaatatgtcaatgatgcccaggtagaggaccaggaacggacccagccaaaagtttgagtgggggcttaaatagaagcataattattaatggacctttacagctacagtgaataatacaaacttcgcaagaaccagaaaattaagtgaggcccgtgcttcccactcagcctaacgtgggtccgcccatgtagaggacaacatcgcacacctcacggaggagaaggccaatgcagctgatgaggagttgaaaaccttgatgatatgctagttgtgatgcttctccaaccagtgagatagtagctgatgatatgctagttgaacagctttaaccagtgatgcacaattttactttatgcggggggaagggtgactcggaacgacatgttttacatagtagagatggagtgttcttatcacttggggccttggggtgagacagaaaaagaacaatggaacgctggctggttgtggagcagaaaatcttttattcttggtcttttttttcaaacttaaatagatgcaaatgtgtagatgaggg

SEQ ID NO: 51093 - DNA, 2086 bp, Zea Mays
ttcatcgattcggcgagttcaaccgtgtcctccgcgctccgtgcctgccagcctgccactgctcggttctagaatccactccctgacctgtgcggcgctccgtgcctggctgccagcctgccactgctcggttctagaatccactccctgacctgtgcggcgttcccgtgcccggccggagtatcgatcgcatggcctgcgccggcgccgcgcagaaggtctcagcggtgctctaccactacccgtgcccggacggcgcgttcgcagcgctcgccgctcacctctatttttccggcgccgcccacccggtccgattcttccccaataccgtctacgaccccatcagatgttcaattctctaattccaaaggtgcggtgatctaagttaatggtgctgtgttaaacatacgaacatcggacagagtgattcacttccactggaagaaataaaagatgtttaccttcttgactttgtgggacctcctggttttgttgaagatatagcccctaaagtcgaaagaataacaatcctggaccatcataagaccgcttttgaaagtttgtgtgtgaatgccacacttgggcaaaatgtgaccaaggtgatagacatgcagcgtagtggtgcgacaattgcatttgacttctttagaaacaagctcttaacagaagttagcacctcacggggtaatgaaagtggtaaagatgtagccaaggtcaaatatgtacctgacaacaaggctgaaacagtacacaagctttttaagtttattgaagacggggacttatggagatggaaaattccaaatagcaaggccttcagcagtggacttaaagatttggacattgaattcaatgtcaatgcaaataataaattgtttgatcagttgttggagttggatcctgagcatgtcatttcccatggacaagcgacattattagagaagcaaagattaatagatgattgtttggagaaatcctatgaaatttccctgggatgtggccagtttgggagttgtctggctgttgatgctgatgctatttcaaatttgagaagcgaacttggaaatcaactagctagcaagagccgtgattttaatctaaggggtattggggctgttgtatacaaagttcctgagttgaataatgaccagatactgaaagtaagtctaagaagtttagaacaagaagacacaacctgtatctctcaggaatatggtggtgggggacatcggaatgcaagctcgtttattttgagtgtgactgagtttgacaggtggaaagtcggatcttctcgaccaaaagttttgaagacatgaactgtcgtgtggatgaggtttcgcgtgcttggccaacgtcagtaacaaaacggcagcaggtgggcatctttgaagcaagtattggttgatgagctatgaattcttagggaagacggcccgaatgaacttcaagaaacgctccgagtagaactgggggtccacaaccgagatcgagtccgagtcatattgcatggaattcacgatcgattttctttgtcatattgtactattgcaatatgtcaatgatgcccaggtagaggaccaggaacggacccagccaaaagtttgagtgggggcttaaatagaagcataattattaatggacctttacagctacagtgaataatacaaacttcgcaagaaccagaaaattaagtgaggcccgtgcttcccactcagcctaacgtgggtccgcccatgtagaggacaacatcgcacacctcacggaggagaaggccaatgcagctgatgaggagttgaaaaccttgatgatatgctagttgtgatgcttctccaaccagtgagatagtagctgatgatatgctagttgaacagctttaaccagtgatgcacaattttactttatgcggggggaagggtgactcggaacgacatgttttacatagtagagatggagtgttcttatcacttggggccttggggtgagacagaaaaagaacaatggaacgctggctggttgtggagcagaaaatcttttattcttggtcttttttttcaaacttaaatagatgcaaatgtgtagatgaggg

SEQ ID NO: 51094 - DNA, 2003 bp, Zea Mays
ttcatcgattcggcgagttcaaccgtgtcctccgcgctccgtgcctgccagcctgccactgctcggttctagaatccactccctgacctgtgcggcgctccgtgcctggctgccagcctgccactgctcggttctagaatccactccctgacctgtgcggcgttcccgtgcccggccggagtatcgatcgcatggcctgcgccggcgccgcgcagaaggtctcagcggtgctctaccactacccgtgcccggacggcgcgttcgcagcgctcgccgctcacctctatttttccggcgccgcccacccggtccgattcttccccaataccgtctacgaccccatcaggagtgattcacttccactggaagaaataaaagatgtttaccttcttgactttgtgggacctcctggttttgttgaagatatagcccctaaagtcgaaagaataacaatcctggaccatcataagaccgcttttgaaagtttgtgtgtgaatgccacacttgggcaaaatgtgaccaaggtgatagacatgcagcgtagtggtgcgacaattgcatttgacttctttagaaacaagctcttaacagaagttagcacctcacggggtaatgaaagtggtaaagatgtagccaaggtcaaatatgtacctgacaacaaggctgaaacagtacacaagctttttaagtttattgaagacggggacttatggagatggaaaattccaaatagcaaggccttcagcagtggacttaaagatttggacattgaattcaatgtcaatgcaaataataaattgtttgatcagttgttggagttggatcctgagcatgtcatttcccatggacaagcgacattattagagaagcaaagattaatagatgattgtttggagaaatcctatgaaatttccctgggatgtggccagtttgggagttgtctggctgttgatgctgatgctatttcaaatttgagaagcgaacttggaaatcaactagctagcaagagccgtgattttaatctaaggggtattggggctgttgtatacaaagttcctgagttgaataatgaccagatactgaaagtaagtctaagaagtttagaacaagaagacacaacctgtatctctcaggaatatggtggtgggggacatcggaatgcaagctcgtttattttgagtgtgactgagtttgacaggtggaaagtcggatcttctcgaccaaaagacatgaactgtcgtgtggatgaggtttcgcgtgcttggccaacgtcagtaacaaaacggcagcaggtgggcatctttgaagcaagtattggttgatgagctatgaattcttagggaagacggcccgaatgaacttcaagaaacgctccgagtagaactgggggtccacaaccgagatcgagtccgagtcatattgcatggaattcacgatcgattttctttgtcatattgtactattgcaatatgtcaatgatgcccaggtagaggaccaggaacggacccagccaaaagtttgagtgggggcttaaatagaagcataattattaatggacctttacagctacagtgaataatacaaacttcgcaagaaccagaaaattaagtgaggcccgtgcttcccactcagcctaacgtgggtccgcccatgtagaggacaacatcgcacacctcacggaggagaaggccaatgcagctgatgaggagttgaaaaccttgatgatatgctagttgtgatgcttctccaaccagtgagatagtagctgatgatatgctagttgaacagctttaaccagtgatgcacaattttactttatgcggggggaagggtgactcggaacgacatgttttacatagtagagatggagtgttcttatcacttggggccttggggtgagacagaaaaagaacaatggaacgctggctggttgtggagcagaaaatcttttattcttggtcttttttttcaaacttaaatagatgcaaatgtgtagatgaggg

SEQ ID NO: 51095 - DNA, 1943 bp, Zea Mays
ctgatgaaagtgtgagcctcaagtgattgtaggcattataaagttctgcttcgactcttctagttgtattttattgtgggaaggattcaatctgtactaggtttagcataatcagagctagaatggactacctctgttggatttcattaaatcataaaacacacggcacctttttttatacttttgtgggattttcatcttagtgacacaaactctgtgcaattatgctgatgcttttgttctggtatattccttctgctatgatatttttttgtctgttttgtaggagtgattcacttccactggaagaaataaaagatgtttaccttcttgactttgtgggacctcctggttttgttgaagatatagcccctaaagtcgaaagaataacaatcctggaccatcataagaccgcttttgaaagtttgtgtgtgaatgccacacttgggcaaaatgtgaccaaggtgatagacatgcagcgtagtggtgcgacaattgcatttgacttctttagaaacaagctcttaacagaagttagcacctcacggggtaatgaaagtggtaaagatgtagccaaggtcaaatatgtacctgacaacaaggctgaaacagtacacaagctttttaagtttattgaagacggggacttatggagatggaaaattccaaatagcaaggccttcagcagtggacttaaagatttggacattgaattcaatgtcaatgcaaataataaattgtttgatcagttgttggagttggatcctgagcatgtcatttcccatggacaagcgacattattagagaagcaaagattaatagatgattgtttggagaaatcctatgaaatttccctgggatgtggccagtttgggagttgtctggctgttgatgctgatgctatttcaaatttgagaagcgaacttggaaatcaactagctagcaagagccgtgattttaatctaaggggtattggggctgttgtatacaaagttcctgagttgaataatgaccagatactgaaagtaagtctaagaagtttagaacaagaagacacaacctgtatctctcaggaatatggtggtgggggacatcggaatgcaagctcgtttattttgagtgtgactgagtttgacaggtggaaagtcggatcttctcgaccaaaagacatgaactgtcgtgtggatgaggtttcgcgtgcttggccaacgtcagtaacaaaacggcagcaggtgggcatctttgaagcaagtattggttgatgagctatgaattcttagggaagacggcccgaatgaacttcaagaaacgctccgagtagaactgggggtccacaaccgagatcgagtccgagtcatattgcatggaattcacgatcgattttctttgtcatattgtactattgcaatatgtcaatgatgcccaggtagaggaccaggaacggacccagccaaaagtttgagtgggggcttaaatagaagcataattattaatggacctttacagctacagtgaataatacaaacttcgcaagaaccagaaaattaagtgaggcccgtgcttcccactcagcctaacgtgggtccgcccatgtagaggacaacatcgcacacctcacggaggagaaggccaatgcagctgatgaggagttgaaaaccttgatgatatgctagttgtgatgcttctccaaccagtgagatagtagctgatgatatgctagttgaacagctttaaccagtgatgcacaattttactttatgcggggggaagggtgactcggaacgacatgttttacatagtagagatggagtgttcttatcacttggggccttggggtgagacagaaaaagaacaatggaacgctggctggttgtggagcagaaaatcttttattcttggtcttttttttcaaacttaaatagatgcaaatgtgtagatgaggg

SEQ ID NO: 51096 - DNA, 3794 bp, Zea Mays
caaaaacaaacagactctagtgtgacactagtaacaagacaaaaatatattcttagattattgtttctccttattccgctcaactacatgctacatccgaagcaagctcagttttggtttttgagtaaactgaaactgaacatcttcaacttttataaacttgcataccatatttggctctcttatgtatttgacattattgcatttgcaggatgagagagcactaatatggtactccaaaaaatagggggaaacatttaagcttgaattcagtgttcagtgtagttcttggacagaagactacaaaacttttgcgtctgcattggccagaaaaggaatctcactccttgtcaattatatacaagaatggtgaatcctcgcttgacttggtctgcaaagatagagatcaagctgaatgttggtatttaggccttacagccctaatatcagcaccatcgacccctttacttctggttaattcaacaaacagccgtcggataaacagctgcacgaatagccctcctagctatattcagcaaaggagtaggcttttcactgtgcgtgatggaagaaacttcccaaaggttcattcgctatatggcagtcctaggttgatacagaacaagtacttccataataatttggattgctctgaaccattcttttctccaagacagagagcatggtcagaactagattcctacatggaaaagattagtcccgaattgataaatcgagtacaaaataatttgagagacataaaatctgcggaaacaattaacgaccaaagaattatgcaaatgcctaaactgaaacaatctaaggggtcaaatgcagcaacagattctctgaaggacatttttgtatagggtgatgttctgggtcgtatgtcagataatggacatgtatcaggaaccaatatatcacttccaaggttattgaaatcgtcacagattcttgatgtgcagagcattgcctgtggagagaaacacgcggcaatagttactaagcagggtaaggtattctcttggggtgaggaaaatggagggagattgggacacaaaacaagtgacagtgtctctgaccctaaaatcattgactctcttgcctccacacctatgaagactattgcattgggggcaaagtacacctgtgcagtttcagtttcaggagaactttatgaatggggtgaagggattcacagcctagggttcaagaacaatcagtgtcaaagaagcccatggttcccacataaattgatcagaacttcagatggtatatctgtggcgaagattgcatgtggtcagtggcacacagctatagtatcctccacaggtaagctgttcacatatggacatgggacatttggtgttcttggacatggtgacacacgtagtgttgttcagccgaaagaagtggagtccttgagggggttaagagttaagtccgtcgcatgtggaccatggcacactgctgctattgtggaaacatcaggaacacccaagagcaatgctcctggtgggaagctattcacatggggtaacgcaagtggagagaagctgggccatactgacaaaaagtcgaagcttgtaccaactcgtgttgaatcactcattgattgtgattttactcaggtatcatgcggtgtcgtatttaccattggaagcaaggaccatggtcaattagggaatcctcgatctgatagcgcatgtatttgtatggttgaagggccacttaagactgagtttgtcaaagatatatccagcggaaattcccatgttgcagtcttgacaatgaatgggaaagtgtttacctggggcaaaggcacagaagggcaacttggtttgggggattaccttgacaggaccttcccaactctagtggaggccctggaagataaacaggtggacagtatagtttgttcttccaacttcacggctgtaatttgtgtgcatggggaaatctcaagcaaggatactgtatgcagcagttgcaggttggcattccggtttacaaggaagaagcacaactgctacaactgtggttccatgttctgcaattcttgcagcagcaacaaggttcaaagggccacccttgcaccagataagagcaaaagatgtcgtgtgtgtgatgcttgtttcaatgaactgaataaaacagctgagcatggcaaaatgagttgtgaatcaaagatccaaaaagaaccgcctttaacagaaacaagaacatatacaccaaagttatcacgaatgcttaaggaagcaaatttcatcatggaaaaaatgggttccatacgaagtcccaaccagagaaatcaggaatcagccactctgaatcaaatgcaaaaacaaaggtggggacaggtagaatgccccgatcaattcaaatgtgcaagagacaacatttcacattgtttgacatcaaagaagcagccagttgatattggtcgtatagggagaatgaatgatccagtctcacaaaagactgctgcccctttaacacgaactactgataagaggaggaaagaacaagatttgatagaaaagataatgttggaggaggtcaaacagcttcaagcacaggtaaccactctagcagaagaatgccggcataggagcctgaaagttcagttgtataaacgaaaacttgaggaaacctggttgatagcaagggacgaggccacaaagtgcaatgctgcaaaagagattataaagattttaacaaatcagaacttttctgacacagtggtgagaaatctttcctctgagccaaaggtcctatgttcgatgcagcatctctgcaaaaatgcagagagaaatgctttatcaaataaacttttagatgatttggaactagatgattccaggatcgtccctgacccacccgacaaaactcctgtcaccggcaaaattccaccgctaaacagcatcagggatcaacacaacatagaggaagtggatatgcaatctacaacgtcttctaacactgttgtggcggatgactcggctgtgcatcagaatggcagaagagcctccaatagcagcagaggttatgacgggggaacagatagcacagttgctcctactgactccagtggaatgatcgagcaaattgagcgtggggtgtacatttcagtcgttacatcccccgatggtaagaagggaatcaagagcatccggttcagccggaagcattttggggagaccgaggcacagaaatggtgggaagagaatgagagcagagtatttgcaaagtacaacagcatggaatacttggcagcacaatgtcgataaggaaaatgtacaggagaagccagttctttgtcacagtgtctgtagaacatgtacactgcaacaccatattgttcggtaaagtcgtaggatagatgagatagaaggaatgatagtatcctatctattaagcagataaaccgcagcatatccccgttctggattaaacttaggtccatggttttacttcgactcaataacaattcaattctacgcgaattggggtttgtgttcgacgggatcgggttggagcctgtgattcggattcccgacgcggcgacgcgagtacatttgttggctacaccgatcggtgaccataggtgaagagtaggatttcgtagcctgactaaccctagttcactcgagtgactgagtgagcagagacgtaccggaacgtcctcgccgtagccgtctgtcggtctgtgcacccccgctccctgcccctgtgaagcctgcttcccttggcgcgaccggtgacgcctcctcccgaggcgcgtggcgcgg

SEQ ID NO: 51097 - DNA, 3230 bp, Zea Mays
aaaggagtaggcttttcactgtacattcgctatatggcagtcctaggttgatacagaacaagtacttccataataatttggattgctctgaaccattcttttctccaagacagagagcatggtcagaactagattcctacatggaaaagattagtcccgaattgataaatcgagtacaaaataatttgagagacataaaatctgcggaaacaattaacgaccaaagaattatgcaaatgcctaaactgaaacaatctaaggggtcaaatgcagcaacagattctctgaaggacatttttgtatagggtgatgttctgggtcgtatgtcagataatggacatgtatcaggaaccaatatatcacttccaaggttattgaaatcgtcacagattcttgatgtgcagagcattgcctgtggagagaaacacgcggcaatagttactaagcagggtaaggtattctcttggggtgaggaaaatggagggagattgggacacaaaacaagtgacagtgtctctgaccctaaaatcattgactctcttgcctccacacctatgaagactattgcattgggggcaaagtacacctgtgcagtttcagtttcaggagaactttatgaatggggtgaagggattcacagcctagggttcaagaacaatcagtgtcaaagaagcccatggttcccacataaattgatcagaacttcagatggtatatctgtggcgaagattgcatgtggtcagtggcacacagctatagtatcctccacaggtaagctgttcacatatggacatgggacatttggtgttcttggacatggtgacacacgtagtgttgttcagccgaaagaagtggagtccttgagggggttaagagttaagtccgtcgcatgtggaccatggcacactgctgctattgtggaaacatcaggaacacccaagagcaatgctcctggtgggaagctattcacatggggtaacgcaagtggagagaagctgggccatactgacaaaaagtcgaagcttgtaccaactcgtgttgaatcactcattgattgtgattttactcaggtatcatgcggtgtcgtatttaccattggaagcaaggaccatggtcaattagggaatcctcgatctgatagcgcatgtatttgtatggttgaagggccacttaagactgagtttgtcaaagatatatccagcggaaattcccatgttgcagtcttgacaatgaatgggaaagtgtttacctggggcaaaggcacagaagggcaacttggtttgggggattaccttgacaggaccttcccaactctagtggaggccctggaagataaacaggtggacagtatagtttgttcttccaacttcacggctgtaatttgtgtgcatggggaaatctcaagcaaggatactgtatgcagcagttgcaggttggcattccggtttacaaggaagaagcacaactgctacaactgtggttccatgttctgcaattcttgcagcagcaacaaggttcaaagggccacccttgcaccagataagagcaaaagatgtcgtgtgtgtgatgcttgtttcaatgaactgaataaaacagctgagcatggcaaaatgagttgtgaatcaaagatccaaaaagaaccgcctttaacagaaacaagaacatatacaccaaagttatcacgaatgcttaaggaagcaaatttcatcatggaaaaaatgggttccatacgaagtcccaaccagagaaatcaggaatcagccactctgaatcaaatgcaaaaacaaaggtggggacaggtagaatgccccgatcaattcaaatgtgcaagagacaacatttcacattgtttgacatcaaagaagcagccagttgatattggtcgtatagggagaatgaatgatccagtctcacaaaagactgctgcccctttaacacgaactactgataagaggaggaaagaacaagatttgatagaaaagataatgttggaggaggtcaaacagcttcaagcacaggtaaccactctagcagaagaatgccggcataggagcctgaaagttcagttgtataaacgaaaacttgaggaaacctggttgatagcaagggacgaggccacaaagtgcaatgctgcaaaagagattataaagattttaacaaatcagaacttttctgacacagtggtgagaaatctttcctctgagccaaaggtcctatgttcgatgcagcatctctgcaaaaatgcagagagaaatgctttatcaaataaacttttagatgatttggaactagatgattccaggatcgtccctgacccacccgacaaaactcctgtcaccggcaaaattccaccgctaaacagcatcagggatcaacacaacatagaggaagtggatatgcaatctacaacgtcttctaacactgttgtggcggatgactcggctgtgcatcagaatggcagaagagcctccaatagcagcagaggttatgacgggggaacagatagcacagttgctcctactgactccagtggaatgatcgagcaaattgagcgtggggtgtacatttcagtcgttacatcccccgatggtaagaagggaatcaagagcatccggttcagccggaagcattttggggagaccgaggcacagaaatggtgggaagagaatgagagcagagtatttgcaaagtacaacagcatggaatacttggcagcacaatgtcgataaggaaaatgtacaggagaagccagttctttgtcacagtgtctgtagaacatgtacactgcaacaccatattgttcggtaaagtcgtaggatagatgagatagaaggaatgatagtatcctatctattaagcagataaaccgcagcatatccccgttctggattaaacttaggtccatggttttacttcgactcaataacaattcaattctacgcgaattggggtttgtgttcgacgggatcgggttggagcctgtgattcggattcccgacgcggcgacgcgagtacatttgttggctacaccgatcggtgaccataggtgaagagtaggatttcgtagcctgactaaccctagttcactcgagtgactgagtgagcagagacgtaccggaacgtcctcgccgtagccgtctgtcggtctgtgcacccccgctccctgcccctgtgaagcctgcttcccttggcgcgaccggtgacgcctcctcccgaggcgcgtggcgcgg

SEQ ID NO: 51098 - DNA, 2886 bp, Zea Mays
aaacaattaacgaccaaagaattatgcaaatgcctaaactgaaacaatctaaggggtcaaatgcagcaacagattctctgaaggacatttttgtatagggtgatgttctgggtcgtatgtcagataatggacatgtatcaggaaccaatatatcacttccaaggttattgaaatcgtcacagattcttgatgtgcagagcattgcctgtggagagaaacacgcggcaatagttactaagcagggtaaggtattctcttggggtgaggaaaatggagggagattgggacacaaaacaagtgacagtgtctctgaccctaaaatcattgactctcttgcctccacacctatgaagactattgcattgggggcaaagtacacctgtgcagtttcagtttcaggagaactttatgaatggggtgaagggattcacagcctagggttcaagaacaatcagtgtcaaagaagcccatggttcccacataaattgatcagaacttcagatggtatatctgtggcgaagattgcatgtggtcagtggcacacagctatagtatcctccacaggtaagctgttcacatatggacatgggacatttggtgttcttggacatggtgacacacgtagtgttgttcagccgaaagaagtggagtccttgagggggttaagagttaagtccgtcgcatgtggaccatggcacactgctgctattgtggaaacatcaggaacacccaagagcaatgctcctggtgggaagctattcacatggggtaacgcaagtggagagaagctgggccatactgacaaaaagtcgaagcttgtaccaactcgtgttgaatcactcattgattgtgattttactcaggtatcatgcggtgtcgtatttaccattggaagcaaggaccatggtcaattagggaatcctcgatctgatagcgcatgtatttgtatggttgaagggccacttaagactgagtttgtcaaagatatatccagcggaaattcccatgttgcagtcttgacaatgaatgggaaagtgtttacctggggcaaaggcacagaagggcaacttggtttgggggattaccttgacaggaccttcccaactctagtggaggccctggaagataaacaggtggacagtatagtttgttcttccaacttcacggctgtaatttgtgtgcatggggaaatctcaagcaaggatactgtatgcagcagttgcaggttggcattccggtttacaaggaagaagcacaactgctacaactgtggttccatgttctgcaattcttgcagcagcaacaaggttcaaagggccacccttgcaccagataagagcaaaagatgtcgtgtgtgtgatgcttgtttcaatgaactgaataaaacagctgagcatggcaaaatgagttgtgaatcaaagatccaaaaagaaccgcctttaacagaaacaagaacatatacaccaaagttatcacgaatgcttaaggaagcaaatttcatcatggaaaaaatgggttccatacgaagtcccaaccagagaaatcaggaatcagccactctgaatcaaatgcaaaaacaaaggtggggacaggtagaatgccccgatcaattcaaatgtgcaagagacaacatttcacattgtttgacatcaaagaagcagccagttgatattggtcgtatagggagaatgaatgatccagtctcacaaaagactgctgcccctttaacacgaactactgataagaggaggaaagaacaagatttgatagaaaagataatgttggaggaggtcaaacagcttcaagcacaggtaaccactctagcagaagaatgccggcataggagcctgaaagttcagttgtataaacgaaaacttgaggaaacctggttgatagcaagggacgaggccacaaagtgcaatgctgcaaaagagattataaagattttaacaaatcaggatcgtccctgacccacccgacaaaactcctgtcaccggcaaaattccaccgctaaacagcatcagggatcaacacaacatagaggaagtggatatgcaatctacaacgtcttctaacactgttgtggcggatgactcggctgtgcatcagaatggcagaagagcctccaatagcagcagaggttatgacgggggaacagatagcacagttgctcctactgactccagtggaatgatcgagcaaattgagcgtggggtgtacatttcagtcgttacatcccccgatggtaagaagggaatcaagagcatccggttcagccggaagcattttggggagaccgaggcacagaaatggtgggaagagaatgagagcagagtatttgcaaagtacaacagcatggaatacttggcagcacaatgtcgataaggaaaatgtacaggagaagccagttctttgtcacagtgtctgtagaacatgtacactgcaacaccatattgttcggtaaagtcgtaggatagatgagatagaaggaatgatagtatcctatctattaagcagataaaccgcagcatatccccgttctggattaaacttaggtccatggttttacttcgactcaataacaattcaattctacgcgaattggggtttgtgttcgacgggatcgggttggagcctgtgattcggattcccgacgcggcgacgcgagtacatttgttggctacaccgatcggtgaccataggtgaagagtaggatttcgtagcctgactaaccctagttcactcgagtgactgagtgagcagagacgtaccggaacgtcctcgccgtagccgtctgtcggtctgtgcacccccgctccctgcccctgtgaagcctgcttcccttggcgcgaccggtgacgcctcctcccgaggcgcgtggcgcgg

SEQ ID NO: 51099 - DNA, 3404 bp, Zea Mays
taaaacatcacccattctacccgctccaaaactctttctcttcctcaccacaccagcaaaaccaccacaacacccctcgcactacgcgcgccgccgccgccgctagcactggtgagacgagtacggaggagcagcacagggatggacggcggcctcgaggatgagcaggaggacccaagcttcctcaaaccaccacagcacccctcgcactacgggcaccgccactgctgtcgctttcagcgtcggtaagacgagtagggaggggcaatgcagggatggacggtggcctggacggcgagttggaagacgcgggcttcctcgacgagccccgcttcacgatcagcttctcccctccgctaatggaatgagtatttttaccggttaaagtttggttaatgaaggaatagaaaatggggttgtgcaatttcaagactcaggtgtccatggattggagaaatttccatttagatgacccatcaacatcctacattgcctggtgatcacacctgtgtcacctgtatgaatgttggtgggttcgacttgcaatgttgttacaacctgacttgactaatgctcttactcatgcttacaagtaatttgtttcattgggttttgcatgacgtctaatagaatatgttattctgtattcattgtattagtatgttgcaaggggtcataataaatcgggtagcggtaaaatattgtatgactacaagattggcgtcttgagtgcattatgttataatttaaagttcatatttccaaccaaagcaaaaatagtttatgaagcataatagtttttccaatactaaattcttgagtggcatatgtgaaagtactatagctaagacgcgatgaagtatggatcagtgtttatttaatcatttacgatgagatgttatttgtagtgttagttattcatcttcaggttgattctgtacctaactgatatatgtctgtgtgttttcagaaacccctcatatgcaaaagcttaatactgtcaaggctgctacagtggtcataggttagaataaatccatggtaaacttgaacccctacaaactaaagaaaatgccagaatagagaaagtttaagcctagagataagtgagtcaaatccataaaattggcaagtcaaatcatcagtatgaaatgtaccaaggcatattgggtgtagaactatcaaaggtacctaatatgttttgtgtaagtataaaagaaattctggtagaggataacaagaaacatcaagcattgaggccaaggatgaactaatatgatgggcatctattttaagaagctcgattttcagacatcaactatcagttctaggatacagaagactctgaaaggccgcaagaaggtatcaacgacatatctgataactaaatatatgcaccaactgtaggaaaatagtaaaggaaggccctaaatgcccaaaattggccacaatatttcaccgtcaggtctacctactctgttatagtactgtccacactcaacagccgatctttgactgctttagttgcccctcctgttagtttaacaattctgttgagtgttgactccttccatgaattggtcacctagaaaaggtagtaaacatgtgaatgagtgggttgaagaggatgataattacctcaattatatttctgctttcataacttagtttactactttgtattaggtcaactttcagcctctgttaacaacacaattgaccaagagcggggatgagtagaagaggatgatcctggtgtgtatattactgttcgagcattgcatggtagcatcagagaactacgtaacgacgaggctgagcgacaattccagtgtcccaatgtgtgacccgagttcaactcctctttcgtcgacctcgagatcccaggtactatgacacacagctaccttctcgcaacgtgatgtgggatgaattttgacctgtaggttgaataagtgaagtggatgagtcagaaagtggaggagacagtgtgcaggagcagcctgtttatgtggccgtagtggatctcgcatcctgtttgtgagcttggtattcctcctgaaaacatcactgcaaaccaattgttatttggcacattgggggagtacgccggatttgatcccacagagcccacttcacgcagtgggggtaaagcaaaagcagtgcagcaaataaaacaggtttagttaaactgtatatcttttgcttgcaactttttaattcttactagtgtgctaacctttgtttgtgttcacgaccatggctacaagacaattgttacgattagtgatggcgcaactgatctggaggctcggcaacctggcggagcagactgtgtgccgccagagctagcggagggaggcgggtcattcgatttgccatgcttaggattggagaatcactagagtaatagtatatacatggtggggagtgaaaccaacagaggaagaatccgttcttgatcaaaattagtcggctgcttggttcgtcgtctgcgtgttcgatcggaggttggcgacgccttggcgtggccgctttccgcaagaaagcaaggaaattgtgctgaccgccgctaatgcgctggatatttctgggagtggaaacgaaagtgtactctgaatttcaagttcctgtcaaaagtaagatcctctgacgaaggtgtgtactctgaatttcaagtgccaacaatctatgttttccagtcaaaaagtattacatggtgcccggctgttagcttctcctttcagttgttgcccttgccggcctggcatttgttcaacctttcctctctctctctctctttatttctgttacagccattttactgatgataacagtgctaattggtcaatttcacatatatttaaatatatatatatatatatggagctaatactggtgaagtagtaggtgtggttgtgatcatgcataaactaactgttgctgccacatggatcggagagggagatcgatccacagaagatggtatcatttgtcaagtgtatgttgggacttgatgctgttgtttgggacattattgggtcgtcattgttggagaaagttgtgtatctacttacagaattggatgttaatataacatgggaagatattcttcaagataaacacaacaaaggtatatttgacatggagcttgaggatttggctgaggatgaacataaccttggccgcacaagtgtggagacttgaattcatatatacttagttaggctcaatgttagcataaacagttgatgaacaagttttcccattagtattttagtttgaatttagagtacaattatgtatgagttatttgacaatgcttatttatgagatattgaatgatatttatctatattgtattaattatagtgttattaaatatatgtgtttgtatttttctc

SEQ ID NO: 51100 - DNA, 1823 bp, Zea Mays
ctccaaaactctttctcttcctcaccacaccagcaaaaccaccacaacacccctcgcactacgcgcgccgccgccgccgctagcactggtgagacgagtacggaggagcagcacagggatggacggcggcctcgaggatgagcaggaggacccaagcttcctcaaaccaccacagcacccctcgcactacgggcaccgccactgctgtcgctttcagcgtcggtaagacgagtagggaggggcaatgcagggatggacggtggcctggacggcgagttggaagacgcgggcttcctcgacgagccccgcttcacgatcagcttctcccctccgctaatggaatgagtatttttaccggttaaagtttggttaatgaaggaatagaaaatggggttgtgcaatttcaagactcaggtgtccatggattggagaaatttccatttagatgacccatcaacatcctacattgcctggtgatcacacctgtgtcacctgtatgaatgttggtcaactttcagcctctgttaacaacacaattgaccaagagcggggatgagtagaagaggatgatcctggtgtgtatattactgttcgagcattgcatggtagcatcagagaactacgtaacgacgaggctgagcgacaattccagtgtcccaatgtgtgacccgagttcaactcctctttcgtcgacctcgagatcccaggttgaataagtgaagtggatgagtcagaaagtggaggagacagtgtgcaggagcagcctgtttatgtggccgtagtggatctcgcatcctgtttgtgagcttggtattcctcctgaaaacatcactgcaaaccaattgttatttggcacattgggggagtacgccggatttgatcccacagagcccacttcacgcagtgggggtaaagcaaaagcagtgcagcaaataaaacagacaattgttacgattagtgatggcgcaactgatctggaggctcggcaacctggcggagcagactgtgtgccgccagagctagcggagggaggcgggtcattcgatttgccatgcttaggattggagaatcactagagtaatagtatatacatggtggggagtgaaaccaacagaggaagaatccgttcttgatcaaaattagtcggctgcttggttcgtcgtctgcgtgttcgatcggaggttggcgacgccttggcgtggccgctttccgcaagaaagcaaggaaattgtgctgaccgccgctaatgcgctggatatttctgggagtggaaacgaaagtgtactctgaatttcaagttcctgtcaaaagtaagatcctctgacgaaggtgtggttgtgatcatgcataaactaactgttgctgccacatggatcggagagggagatcgatccacagaagatggtatcatttgtcaagtgtatgttgggacttgatgctgttgtttgggacattattgggtcgtcattgttggagaaagttgtgtatctacttacagaattggatgttaatataacatgggaagatattcttcaagataaacacaacaaaggtatatttgacatggagcttgaggatttggctgaggatgaacataaccttggccgcacaagtgtggagacttgaattcatatatacttagttaggctcaatgttagcataaacagttgatgaacaagttttcccattagtattttagtttgaatttagagtacaattatgtatgagttatttgacaatgcttatttatgagatattgaatgatatttatctatattgtattaattatagtgttattaaatatatgtgtttgtatttttctc

SEQ ID NO: 51101 - DNA, 1945 bp, Zea Mays
ccaaaactctttctcttcctcaccacaccagcaaaaccaccacaacacccctcgcactacgcgcgccgccgccgccgctagcactggtgagacgagtacggaggagcagcacagggatggacggcggcctcgaggatgagcaggaggacccaagcttcctcaaaccaccacagcacccctcgcactacgggcaccgccactgctgtcgctttcagcgtcggtaagacgagtagggaggggcaatgcagggatggacggtggcctggacggcgagttggaagacgcgggcttcctcgacgaggtattacgcgcgacggacgaggtcatcgcctcccgcaaccctaaccccgctcccgctcccgctcccatccccatgtttgactccttcgtcattgtccccgtctgagagcctcctatcttcccaccgattcgatctcccacctccccgtcgcttcgtagccccgcttcacgatcagcttctcccctccgctaatggaatgagtatttttaccggttaaagtttggttaatgaaggaatagaaaatggggttgtgcaatttcaagactcaggtgtccatggattggagaaatttccatttagatgacccatcaacatcctacattgcctggtgatcacacctgtgtcacctgtatgaatgttggtcaactttcagcctctgttaacaacacaattgaccaagagcggggatgagtagaagaggatgatcctggtgtgtatattactgttcgagcattgcatggtagcatcagagaactacgtaacgacgaggctgagcgacaattccagtgtcccaatgtgtgacccgagttcaactcctctttcgtcgacctcgagatcccagtggatgagtcagaaagtggaggagacagtgtgcaggagcagcctgtttatgtggccgtagtggatctcgcatcctgtttgtgagcttggtattcctcctgaaaacatcactgcaaaccaattgttatttggcacattgggggagtacgccggatttgatcccacagagcccacttcacgcagtgggggtaaagcaaaagcagtgcagcaaataaaacagacaattgttacgattagtgatggcgcaactgatctggaggctcggcaacctggcggagcagactgtgtgccgccagagctagcggagggaggcgggtcattcgatttgccatgcttaggattggagaatcactagagtaatagtatatacatggtggggagtgaaaccaacagaggaagaatccgttcttgatcaaaattagtcggctgcttggttcgtcgtctgcgtgttcgatcggaggttggcgacgccttggcgtggccgctttccgcaagaaagcaaggaaattgtgctgaccgccgctaatgcgctggatatttctgggagtggaaacgaaagtgtactctgaatttcaagttcctgtcaaaagtgtggttgtgatcatgcataaactaactgttgctgccacatggatcggagagggagatcgatccacagaagatggtatcatttgtcaagtgtatgttgggacttgatgctgttgtttgggacattattgggtcgtcattgttggagaaagttgtgtatctacttacagaattggatgttaatataacatgggaagatattcttcaagataaacacaacaaaggtatatttgacatggagcttgaggatttggctgaggatgaacataaccttggccgcacaagtgtggagacttgaattcatatatacttagttaggctcaatgttagcataaacagttgatgaacaagttttcccattagtattttagtttgaatttagagtacaattatgtatgagttatttgacaatgcttatttatgagatattgaatgatatttatctatattgtattaattatagtgttattaaatatatgtgtttgtatttttctc

SEQ ID NO: 51102 - DNA, 1864 bp, Zea Mays
ccaaaactctttctcttcctcaccacaccagcaaaaccaccacaacacccctcgcactacgcgcgccgccgccgccgctagcactggtgagacgagtacggaggagcagcacagggatggacggcggcctcgaggatgagcaggaggacccaagcttcctcaaaccaccacagcacccctcgcactacgggcaccgccactgctgtcgctttcagcgtcggtaagacgagtagggaggggcaatgcagggatggacggtggcctggacggcgagttggaagacgcgggcttcctcgacgaggtattacgcgcgacggacgaggtcatcgcctcccgcaaccctaaccccgctcccgctcccgctcccatccccatgtttgactccttcgtcattgtccccgtctgagagcctcctatcttcccaccgattcgatctcccacctccccgtcgcttcgtagccccgcttcacgatcagcttctcccctccgctaatggaatgagtatttttaccggttaaagtttggttaatgaaggaatagaaaatggggttgtgcaatttcaagactcaggtgtccatggattggagaaatttccatttagatgacccatcaacatcctacattgcctggtgatcacacctgtgtcacctgtatgaatgttggtcaactttcagcctctgttaacaacacaattgaccaagagcggggatgagtagaagaggatgatcctggtgtgtatattactgttcgagcattgcatggtagcatcagagaactacgtaacgacgaggctgagcgacaattccagtgtcccaatgttgaataagtgaagtggatgagtcagaaagtggaggagacagtgtgcaggagcagcctgtttatgtggccgtagtggatctcgcatcctgtttgtgagcttggtattcctcctgaaaacatcactgcaaaccaattgttatttggcacattgggggagtacgccggatttgatcccacagagcccacttcacgcagtgggggtaaagcaaaagcagtgcagcaaataaaacagacaattgttacgattagtgatggcgcaactgatctggaggctcggcaacctggcggagcagactgtgtgccgccagagctagcggagggaggcgggtcattcgatttgccatgcttaggattggagaatcactagagtaatagtatatacatggtggggagtgaaaccaacagaggaagaatccgttcttgatcaaaattagtcggctgcttggttcgtcgtctgcgtgttcgatcggaggttggcgacgccttggcgtggccgctttccgcaagaaagcaaggaaattgtgctgaccgccgctaatgcgctggatatttctgggagtggaaacgaaagtgtactctgaatttcaagttcctgtcaaaagtaagatcctctgacgaagaagatggtatcatttgtcaagtgtatgttgggacttgatgctgttgtttgggacattattgggtcgtcattgttggagaaagttgtgtatctacttacagaattggatgttaatataacatgggaagatattcttcaagataaacacaacaaaggtatatttgacatggagcttgaggatttggctgaggatgaacataaccttggccgcacaagtgtggagacttgaattcatatatacttagttaggctcaatgttagcataaacagttgatgaacaagttttcccattagtattttagtttgaatttagagtacaattatgtatgagttatttgacaatgcttatttatgagatattgaatgatatttatctatattgtattaattatagtgttattaaatatatgtgtttgtatttttctc

SEQ ID NO: 51103 - DNA, 3087 bp, Zea Mays
aaactctttctcttcctcaccacaccagcaaaaccaccacaacacccctcgcactacgcgcgccgccgccgccgctagcactggtgagacgagtacggaggagcagcacagggatggacggcggcctcgaggatgagcaggaggacccaagcttcctcaaaccaccacagcacccctcgcactacgggcaccgccactgctgtcgctttcagcgtcggtaagacgagtagggaggggcaatgcagggatggacggtggcctggacggcgagttggaagacgcgggcttcctcgacgaggtattacgcgcgacggacgaggtcatcgcctcccgcaaccctaaccccgctcccgctcccgctcccatccccatgtttgactccttcgtcattgtccccgtctgagagcctcctatcttcccaccgattcgatctcccacctccccgtcgcttcgtagccccgcttcacgatcagcttctcccctccgctaatggaatgagtatttttaccggttaaagtttggttaatgaaggaatagaaaatggggttgtgcaatttcaagactcaggtgtccatggattggagaaatttccatttagatgacccatcaacatcctacattgcctggtgatcacacctgtgtcacctgtatgaatgttggtgggttcgacttgcaatgttgttacaacctgacttgactaatgctcttactcatgcttacaagtaatttgtttcattgggttttgcatgacgtctaatagaatatgttattctgtattcattgtattagtatgttgcaaggggtcataataaatcgggtagcggtaaaatattgtatgactacaagattggcgtcttgagtgcattatgttataatttaaagttcatatttccaaccaaagcaaaaatagtttatgaagcataatagtttttccaatactaaattcttgagtggcatatgtgaaagtactatagctaagacgcgatgaagtatggatcagtgtttatttaatcatttacgatgagatgttatttgtagtgttagttattcatcttcaggttgattctgtacctaactgatatatgtctgtgtgttttcagaaacccctcatatgcaaaagcttaatactgtcaaggctgctacagtggtcataggttagaataaatccatggtaaacttgaacccctacaaactaaagaaaatgccagaatagagaaagtttaagcctagagataagtgagtcaaatccataaaattggcaagtcaaatcatcagtatgaaatgtaccaaggcatattgggtgtagaactatcaaaggtacctaatatgttttgtgtaagtataaaagaaattctggtagaggataacaagaaacatcaagcattgaggccaaggatgaactaatatgatgggcatctattttaagaagctcgattttcagacatcaactatcagttctaggatacagaagactctgaaaggccgcaagaaggtatcaacgacatatctgataactaaatatatgcaccaactgtaggaaaatagtaaaggaaggccctaaatgcccaaaattggccacaatatttcaccgtcaggtctacctactctgttatagtactgtccacactcaacagccgatctttgactgctttagttgcccctcctgttagtttaacaattctgttgagtgttgactccttccatgaattggtcacctagaaaaggtagtaaacatgtgaatgagtgggttgaagaggatgataattacctcaattatatttctgctttcataacttagtttactactttgtattaggtcaactttcagcctctgttaacaacacaattgaccaagagcggggatgagtagaagaggatgatcctggtgtgtatattactgttcgagcattgcatggtagcatcagagaactacgtaacgacgaggctgagcgacaattccagtgtcccaatgttgaataagtgaagtggatgagtcagaaagtggaggagacagtgtgcaggagcagcctgtttatgtggccgtagtggatctcgcatcctgtttgtgagcttggtattcctcctgaaaacatcactgcaaaccaattgttatttggcacattgggggagtacgccggatttgatcccacagagcccacttcacgcagtgggggtaaagcaaaagcagtgcagcaaataaaacagacaattgttacgattagtgatggcgcaactgatctggaggctcggcaacctggcggagcagactgtgtgccgccagagctagcggagggaggcgggtcattcgatttgccatgcttaggattggagaatcactagagtaatagtatatacatggtggggagtgaaaccaacagaggaagaatccgttcttgatcaaaattagtcggctgcttggttcgtcgtctgcgtgttcgatcggaggttggcgacgccttggcgtggccgctttccgcaagaaagcaaggaaattgtgctgaccgccgctaatgcgctggatatttctgggagtggaaacgaaagtgtactctgaatttcaagttcctgtcaaaagtaagatcctctgacgaaggtgtggttgtgatcatgcataaactaactgttgctgccacatggatcggagagggagatcgatccacagaagatggtatcatttgtcaagtgtatgttgggacttgatgctgttgtttgggacattattgggtcgtcattgttggagaaagttgtgtatctacttacagaattggatgttaatataacatgggaagatattcttcaagataaacacaacaaaggtatatttgacatggagcttgaggatttggctgaggatgaacataaccttggccgcacaagtgtggagacttgaattcatatatacttagttaggctcaatgttagcataaacagttgatgaacaagttttcccattagtattttagtttgaatttagagtacaattatgtatgagttatttgacaatgcttatttatgagatattgaatgatatttatctatattgtattaattatagtgttattaaatatatgtgtttgtatttttctc

SEQ ID NO: 51104 - DNA, 3064 bp, Zea Mays
aaactctttctcttcctcaccacaccagcaaaaccaccacaacacccctcgcactacgcgcgccgccgccgccgctagcactggtgagacgagtacggaggagcagcacagggatggacggcggcctcgaggatgagcaggaggacccaagcttcctcaaaccaccacagcacccctcgcactacgggcaccgccactgctgtcgctttcagcgtcggtaagacgagtagggaggggcaatgcagggatggacggtggcctggacggcgagttggaagacgcgggcttcctcgacgaggtattacgcgcgacggacgaggtcatcgcctcccgcaaccctaaccccgctcccgctcccgctcccatccccatgtttgactccttcgtcattgtccccgtctgagagcctcctatcttcccaccgattcgatctcccacctccccgtcgcttcgtagccccgcttcacgatcagcttctcccctccgctaatggaatgagtatttttaccggttaaagtttggttaatgaaggaatagaaaatggggttgtgcaatttcaagactcaggtgtccatggattggagaaatttccatttagatgacccatcaacatcctacattgcctggtgatcacacctgtgtcacctgtatgaatgttggtgggttcgacttgcaatgttgttacaacctgacttgactaatgctcttactcatgcttacaagtaatttgtttcattgggttttgcatgacgtctaatagaatatgttattctgtattcattgtattagtatgttgcaaggggtcataataaatcgggtagcggtaaaatattgtatgactacaagattggcgtcttgagtgcattatgttataatttaaagttcatatttccaaccaaagcaaaaatagtttatgaagcataatagtttttccaatactaaattcttgagtggcatatgtgaaagtactatagctaagacgcgatgaagtatggatcagtgtttatttaatcatttacgatgagatgttatttgtagtgttagttattcatcttcaggttgattctgtacctaactgatatatgtctgtgtgttttcagaaacccctcatatgcaaaagcttaatactgtcaaggctgctacagtggtcataggttagaataaatccatggtaaacttgaacccctacaaactaaagaaaatgccagaatagagaaagtttaagcctagagataagtgagtcaaatccataaaattggcaagtcaaatcatcagtatgaaatgtaccaaggcatattgggtgtagaactatcaaaggtacctaatatgttttgtgtaagtataaaagaaattctggtagaggataacaagaaacatcaagcattgaggccaaggatgaactaatatgatgggcatctattttaagaagctcgattttcagacatcaactatcagttctaggatacagaagactctgaaaggccgcaagaaggtatcaacgacatatctgataactaaatatatgcaccaactgtaggaaaatagtaaaggaaggccctaaatgcccaaaattggccacaatatttcaccgtcaggtctacctactctgttatagtactgtccacactcaacagccgatctttgactgctttagttgcccctcctgttagtttaacaattctgttgagtgttgactccttccatgaattggtcacctagaaaaggtagtaaacatgtgaatgagtgggttgaagaggatgataattacctcaattatatttctgctttcataacttagtttactactttgtattaggtcaactttcagcctctgttaacaacacaattgaccaagagcggggatgagtagaagaggatgatcctggtgtgtatattactgttcgagcattgcatggtagcatcagagaactacgtaacgacgaggctgagcgacaattccagtgtcccaatgtgtgacccgagttcaactcctctttcgtcgacctcgagatcccaggttgaataagtgaagtggatgagtcagaaagtggaggagacagtgtgcaggagcagcctgtttatgtggccgtagtggatctcgcatcctgtttgtgagcttggtattcctcctgaaaacatcactgcaaaccaattgttatttggcacattgggggagtacgccggatttgatcccacagagcccacttcacgcagtgggggtaaagcaaaagcagtgcagcaaataaaacagacaattgttacgattagtgatggcgcaactgatctggaggctcggcaacctggcggagcagactgtgtgccgccagagctagcggagggaggcgggtcattcgatttgccatgcttaggattggagaatcactagagtaatagtatatacatggtggggagtgaaaccaacagaggaagaatccgttcttgatcaaaattagtcggctgcttggttcgtcgtctgcgtgttcgatcggaggttggcgacgccttggcgtggccgctttccgcaagaaagcaaggaaattgtgctgaccgccgctaatgcgctggatatttctgggagtggaaacgaaagtgtactctgaatttcaagttcctgtcaaaagtaagatcctctgacgaagaagatggtatcatttgtcaagtgtatgttgggacttgatgctgttgtttgggacattattgggtcgtcattgttggagaaagttgtgtatctacttacagaattggatgttaatataacatgggaagatattcttcaagataaacacaacaaaggtatatttgacatggagcttgaggatttggctgaggatgaacataaccttggccgcacaagtgtggagacttgaattcatatatacttagttaggctcaatgttagcataaacagttgatgaacaagttttcccattagtattttagtttgaatttagagtacaattatgtatgagttatttgacaatgcttatttatgagatattgaatgatatttatctatattgtattaattatagtgttattaaatatatgtgtttgtatttttctc

SEQ ID NO: 51105 - DNA, 2863 bp, Zea Mays
ctttctcttcctcaccacaccagcaaaaccaccacaacacccctcgcactacgcgcgccgccgccgccgctagcactggtgagacgagtacggaggagcagcacagggatggacggcggcctcgaggatgagcaggaggacccaagcttcctcaaaccaccacagcacccctcgcactacgggcaccgccactgctgtcgctttcagcgtcggtaagacgagtagggaggggcaatgcagggatggacggtggcctggacggcgagttggaagacgcgggcttcctcgacgaggtattacgcgcgacggacgaggtcatcgcctcccgcaaccctaaccccgctcccgctcccgctcccatccccatgtttgactccttcgtcattgtccccgtctgagagcctcctatcttcccaccgattcgatctcccacctccccgtcgcttcgtagccccgcttcacgatcagcttctcccctccgctaatggaatgagtatttttaccggttaaagtttggttaatgaaggaatagaaaatggggttgtgcaatttcaagactcaggtgtccatggattggagaaatttccatttagatgacccatcaacatcctacattgcctggtgatcacacctgtgtcacctgtatgaatgttggtgggttcgacttgcaatgttgttacaacctgacttgactaatgctcttactcatgcttacaagtaatttgtttcattgggttttgcatgacgtctaatagaatatgttattctgtattcattgtattagtatgttgcaaggggtcataataaatcgggtagcggtaaaatattgtatgactacaagattggcgtcttgagtgcattatgttataatttaaagttcatatttccaaccaaagcaaaaatagtttatgaagcataatagtttttccaatactaaattcttgagtggcatatgtgaaagtactatagctaagacgcgatgaagtatggatcagtgtttatttaatcatttacgatgagatgttatttgtagtgttagttattcatcttcaggttgattctgtacctaactgatatatgtctgtgtgttttcagaaacccctcatatgcaaaagcttaatactgtcaaggctgctacagtggtcataggttagaataaatccatggtaaacttgaacccctacaaactaaagaaaatgccagaatagagaaagtttaagcctagagataagtgagtcaaatccataaaattggcaagtcaaatcatcagtatgaaatgtaccaaggcatattgggtgtagaactatcaaaggtacctaatatgttttgtgtaagtataaaagaaattctggtagaggataacaagaaacatcaagcattgaggccaaggatgaactaatatgatgggcatctattttaagaagctcgattttcagacatcaactatcagttctaggatacagaagactctgaaaggccgcaagaaggtcaactttcagcctctgttaacaacacaattgaccaagagcggggatgagtagaagaggatgatcctggtgtgtatattactgttcgagcattgcatggtagcatcagagaactacgtaacgacgaggctgagcgacaattccagtgtcccaatgtgtgacccgagttcaactcctctttcgtcgacctcgagatcccaggtactatgacacacagctaccttctcgcaacgtgatgtgggatgaattttgacctgtaggttgaataagtgaagtggatgagtcagaaagtggaggagacagtgtgcaggagcagcctgtttatgtggccgtagtggatctcgcatcctgtttgtgagcttggtattcctcctgaaaacatcactgcaaaccaattgttatttggcacattgggggagtacgccggatttgatcccacagagcccacttcacgcagtgggggtaaagcaaaagcagtgcagcaaataaaacagacaattgttacgattagtgatggcgcaactgatctggaggctcggcaacctggcggagcagactgtgtgccgccagagctagcggagggaggcgggtcattcgatttgccatgcttaggattggagaatcactagagtaatagtatatacatggtggggagtgaaaccaacagaggaagaatccgttcttgatcaaaattagtcggctgcttggttcgtcgtctgcgtgttcgatcggaggttggcgacgccttggcgtggccgctttccgcaagaaagcaaggaaattgtgctgaccgccgctaatgcgctggatatttctgggagtggaaacgaaagtgtactctgaatttcaagttcctgtcaaaagtaagatcctctgacgaaggtgtggttgtgatcatgcataaactaactgttgctgccacatggatcggagagggagatcgatccacagaagatggtatcatttgtcaagtgtatgttgggacttgatgctgttgtttgggacattattgggtcgtcattgttggagaaagttgtgtatctacttacagaattggatgttaatataacatgggaagatattcttcaagataaacacaacaaaggtatatttgacatggagcttgaggatttggctgaggatgaacataaccttggccgcacaagtgtggagacttgaattcatatatacttagttaggctcaatgttagcataaacagttgatgaacaagttttcccattagtattttagtttgaatttagagtacaattatgtatgagttatttgacaatgcttatttatgagatattgaatgatatttatctatattgtattaattatagtgttattaaatatatgtgtttgtatttttctc

SEQ ID NO: 51106 - DNA, 3113 bp, Zea Mays
ctttctcttcctcaccacaccagcaaaaccaccacaacacccctcgcactacgcgcgccgccgccgccgctagcactggtgagacgagtacggaggagcagcacagggatggacggcggcctcgaggatgagcaggaggacccaagcttcctcaaaccaccacagcacccctcgcactacgggcaccgccactgctgtcgctttcagcgtcggtaagacgagtagggaggggcaatgcagggatggacggtggcctggacggcgagttggaagacgcgggcttcctcgacgaggtattacgcgcgacggacgaggtcatcgcctcccgcaaccctaaccccgctcccgctcccgctcccatccccatgtttgactccttcgtcattgtccccgtctgagagcctcctatcttcccaccgattcgatctcccacctccccgtcgcttcgtagccccgcttcacgatcagcttctcccctccgctaatggaatgagtatttttaccggttaaagtttggttaatgaaggaatagaaaatggggttgtgcaatttcaagactcaggtgtccatggattggagaaatttccatttagatgacccatcaacatcctacattgcctggtgatcacacctgtgtcacctgtatgaatgttggtgggttcgacttgcaatgttgttacaacctgacttgactaatgctcttactcatgcttacaagtaatttgtttcattgggttttgcatgacgtctaatagaatatgttattctgtattcattgtattagtatgttgcaaggggtcataataaatcgggtagcggtaaaatattgtatgactacaagattggcgtcttgagtgcattatgttataatttaaagttcatatttccaaccaaagcaaaaatagtttatgaagcataatagtttttccaatactaaattcttgagtggcatatgtgaaagtactatagctaagacgcgatgaagtatggatcagtgtttatttaatcatttacgatgagatgttatttgtagtgttagttattcatcttcaggttgattctgtacctaactgatatatgtctgtgtgttttcagaaacccctcatatgcaaaagcttaatactgtcaaggctgctacagtggtcataggttagaataaatccatggtaaacttgaacccctacaaactaaagaaaatgccagaatagagaaagtttaagcctagagataagtgagtcaaatccataaaattggcaagtcaaatcatcagtatgaaatgtaccaaggcatattgggtgtagaactatcaaaggtacctaatatgttttgtgtaagtataaaagaaattctggtagaggataacaagaaacatcaagcattgaggccaaggatgaactaatatgatgggcatctattttaagaagctcgattttcagacatcaactatcagttctaggatacagaagactctgaaaggccgcaagaaggtatcaacgacatatctgataactaaatatatgcaccaactgtaggaaaatagtaaaggaaggccctaaatgcccaaaattggccacaatatttcaccgtcaggtctacctactctgttatagtactgtccacactcaacagccgatctttgactgctttagttgcccctcctgttagtttaacaattctgttgagtgttgactccttccatgaattggtcacctagaaaaggtagtaaacatgtgaatgagtgggttgaagaggatgataattacctcaattatatttctgctttcataacttagtttactactttgtattaggtcaactttcagcctctgttaacaacacaattgaccaagagcggggatgagtagaagaggatgatcctggtgtgtatattactgttcgagcattgcatggtagcatcagagaactacgtaacgacgaggctgagcgacaattccagtgtcccaatgtgtgacccgagttcaactcctctttcgtcgacctcgagatcccagtggatgagtcagaaagtggaggagacagtgtgcaggagcagcctgtttatgtggccgtagtggatctcgcatcctgtttgtgagcttggtattcctcctgaaaacatcactgcaaaccaattgttatttggcacattgggggagtacgccggatttgatcccacagagcccacttcacgcagtgggggtaaagcaaaagcagtgcagcaaataaaacagacaattgttacgattagtgatggcgcaactgatctggaggctcggcaacctggcggagcagactgtgtgccgccagagctagcggagggaggcgggtcattcgatttgccatgcttaggattggagaatcactagagtaatagtatatacatggtggggagtgaaaccaacagaggaagaatccgttcttgatcaaaattagtcggctgcttggttcgtcgtctgcgtgttcgatcggaggttggcgacgccttggcgtggccgctttccgcaagaaagcaaggaaattgtgctgaccgccgctaatgcgctggatatttctgggagtggaaacgaaagtgtactctgaatttcaagttcctgtcaaaagtaagatcctctgacgaaggtgtggttgtgatcatgcataaactaactgttgctgccacatggatcggagagggagatcgatccacagaagatggtatcatttgtcaagtgtatgttgggacttgatgctgttgtttgggacattattgggtcgtcattgttggagaaagttgtgtatctacttacagaattggatgttaatataacatgggaagatattcttcaagataaacacaacaaaggtatatttgacatggagcttgaggatttggctgaggatgaacataaccttggccgcacaagtgtggagacttgaattcatatatacttagttaggctcaatgttagcataaacagttgatgaacaagttttcccattagtattttagtttgaatttagagtacaattatgtatgagttatttgacaatgcttatttatgagatattgaatgatatttatctatattgtattaattatagtgttattaaatatatgtgtttgtatttttctc

SEQ ID NO: 51107 - DNA, 3013 bp, Zea Mays
ctttctcttcctcaccacaccagcaaaaccaccacaacacccctcgcactacgcgcgccgccgccgccgctagcactggtgagacgagtacggaggagcagcacagggatggacggcggcctcgaggatgagcaggaggacccaagcttcctcaaaccaccacagcacccctcgcactacgggcaccgccactgctgtcgctttcagcgtcggtaagacgagtagggaggggcaatgcagggatggacggtggcctggacggcgagttggaagacgcgggcttcctcgacgaggtattacgcgcgacggacgaggtcatcgcctcccgcaaccctaaccccgctcccgctcccgctcccatccccatgtttgactccttcgtcattgtccccgtctgagagcctcctatcttcccaccgattcgatctcccacctccccgtcgcttcgtagccccgcttcacgatcagcttctcccctccgctaatggaatgagtatttttaccggttaaagtttggttaatgaaggaatagaaaatggggttgtgcaatttcaagactcaggtgtccatggattggagaaatttccatttagatgacccatcaacatcctacattgcctggtgatcacacctgtgtcacctgtatgaatgttggtgggttcgacttgcaatgttgttacaacctgacttgactaatgctcttactcatgcttacaagtaatttgtttcattgggttttgcatgacgtctaatagaatatgttattctgtattcattgtattagtatgttgcaaggggtcataataaatcgggtagcggtaaaatattgtatgactacaagattggcgtcttgagtgcattatgttataatttaaagttcatatttccaaccaaagcaaaaatagtttatgaagcataatagtttttccaatactaaattcttgagtggcatatgtgaaagtactatagctaagacgcgatgaagtatggatcagtgtttatttaatcatttacgatgagatgttatttgtagtgttagttattcatcttcaggttgattctgtacctaactgatatatgtctgtgtgttttcagaaacccctcatatgcaaaagcttaatactgtcaaggctgctacagtggtcataggttagaataaatccatggtaaacttgaacccctacaaactaaagaaaatgccagaatagagaaagtttaagcctagagataagtgagtcaaatccataaaattggcaagtcaaatcatcagtatgaaatgtaccaaggcatattgggtgtagaactatcaaaggtacctaatatgttttgtgtaagtataaaagaaattctggtagaggataacaagaaacatcaagcattgaggccaaggatgaactaatatgatgggcatctattttaagaagctcgattttcagacatcaactatcagttctaggatacagaagactctgaaaggccgcaagaaggtatcaacgacatatctgataactaaatatatgcaccaactgtaggaaaatagtaaaggaaggccctaaatgcccaaaattggccacaatatttcaccgtcaggtctacctactctgttatagtactgtccacactcaacagccgatctttgactgctttagttgcccctcctgttagtttaacaattctgttgagtgttgactccttccatgaattggtcacctagaaaaggtagtaaacatgtgaatgagtgggttgaagaggatgataattacctcaattatatttctgctttcataacttagtttactactttgtattaggtcaactttcagcctctgttaacaacacaattgaccaagagcggggatgagtagaagaggatgatcctggtgtgtatattactgttcgagcattgcatggtagcatcagagaactacgtaacgacgaggctgagcgacaattccagtgtcccaatgttgaataagtgaagtggatgagtcagaaagtggaggagacagtgtgcaggagcagcctgtttatgtggccgtagtggatctcgcatcctgtttgtgagcttggtattcctcctgaaaacatcactgcaaaccaattgttatttggcacattgggggagtacgccggatttgatcccacagagcccacttcacgcagtgggggtaaagcaaaagcagtgcagcaaataaaacagacaattgttacgattagtgatggcgcaactgatctggaggctcggcaacctggcggagcagactgtgtgccgccagagctagcggagggaggcgggtcattcgatttgccatgcttaggattggagaatcactagagtaatagtatatacatggtggggagtgaaaccaacagaggaagaatccgttcttgatcaaaattagtcggctgcttggttcgtcgtctgcgtgttcgatcggaggttggcgacgccttggcgtggccgctttccgcaagaaagcaaggaaattgtgctgaccgccgctaatgcgctggatatttctgggagtggaaacgaaagtgtactctgaatttcaagttcctgtcaaaagtaagatcctctgacgaagaagatggtatcatttgtcaagtgtatgttgggacttgatgctgttgtttgggacattattgggtcgtcattgttggagaaagttgtgtatctacttacagaattggatgttaatataacatgggaagatattcttcaagataaacacaacaaaggtatatttgacatggagcttgaggatttggctgaggatgaacataaccttggccgcacaagtgtggagacttgaattcatatatacttagttaggctcaatgttagcataaacagttgatgaacaagttttcccattagtattttagtttgaatttagagtacaattatgtatgagttatttgacaatgcttatttatgagatattgaatgatatttatctatattgtattaattatagtgttattaaatatatgtgtttgtatttttctc

SEQ ID NO: 51108 - DNA, 2324 bp, Zea Mays
caccacaccagcaaaaccaccacaacacccctcgcactacgcgcgccgccgccgccgctagcactggtgagacgagtacggaggagcagcacagggatggacggcggcctcgaggatgagcaggaggacccaagcttcctcaaaccaccacagcacccctcgcactacgggcaccgccactgctgtcgctttcagcgtcggtaagacgagtagggaggggcaatgcagggatggacggtggcctggacggcgagttggaagacgcgggcttcctcgacgaggtattacgcgcgacggacgaggtcatcgcctcccgcaaccctaaccccgctcccgctcccgctcccatccccatgtttgactccttcgtcattgtccccgtctgagagcctcctatcttcccaccgattcgatctcccacctccccgtcgcttcgtagccccgcttcacgatcagcttctcccctccgctaatggaatgagtatttttaccggttaaagtttggttaatgaaggaatagaaaatggggttgtgcaatttcaagactcaggtgtccatggattggagaaatttccatttagatgacccatcaacatcctacattgcctggtgatcacacctgtgtcacctgtatgaatgttgaaacccctcatatgcaaaagcttaatactgtcaaggctgctacagtggtcataggtcaactttcagcctctgttaacaacacaattgaccaagagcggggatgagtagaagaggatgatcctggtgtgtatattactgttcgagcattgcatggtagcatcagagaactacgtaacgacgaggctgagcgacaattccagtgtcccaatgtgtgacccgagttcaactcctctttcgtcgacctcgagatcccaggtactatgacacacagctaccttctcgcaacgtgatgtgggatgaattttgacctgtaggttgaataagtgaagtggatgagtcagaaagtggaggagacagtgtgcaggagcagcctgtttatgtggccgtagtggatctcgcatcctgtttgtgagcttggtattcctcctgaaaacatcactgcaaaccaattgttatttggcacattgggggagtacgccggatttgatcccacagagcccacttcacgcagtgggggtaaagcaaaagcagtgcagcaaataaaacagacaattgttacgattagtgatggcgcaactgatctggaggctcggcaacctggcggagcagactgtgtgccgccagagctagcggagggaggcgggtcattcgatttgccatgcttaggattggagaatcactagagtaatagtatatacatggtggggagtgaaaccaacagaggaagaatccgttcttgatcaaaattagtcggctgcttggttcgtcgtctgcgtgttcgatcggaggttggcgacgccttggcgtggccgctttccgcaagaaagcaaggaaattgtgctgaccgccgctaatgcgctggatatttctgggagtggaaacgaaagtgtactctgaatttcaagttcctgtcaaaagtaagatcctctgacgaaggtgtgtactctgaatttcaagtgccaacaatctatgttttccagtcaaaaagtattacatggtgcccggctgttagcttctcctttcagttgttgcccttgccggcctggcatttgttcaacctttcctctctctctctctctttatttctgttacagccattttactgatgataacagtgctaattggtcaatttcacatatatttaaatatatatatatatatatggagctaatactggtgaagtagtaggtgtggttgtgatcatgcataaactaactgttgctgccacatggatcggagagggagatcgatccacagaagatggtatcatttgtcaagtgtatgttgggacttgatgctgttgtttgggacattattgggtcgtcattgttggagaaagttgtgtatctacttacagaattggatgttaatataacatgggaagatattcttcaagataaacacaacaaaggtatatttgacatggagcttgaggatttggctgaggatgaacataaccttggccgcacaagtgtggagacttgaattcatatatacttagttaggctcaatgttagcataaacagttgatgaacaagttttcccattagtattttagtttgaatttagagtacaattatgtatgagttatttgacaatgcttatttatgagatattgaatgatatttatctatattgtattaattatagtgttattaaatatatgtgtttgtatttttctc

SEQ ID NO: 51109 - DNA, 2567 bp, Zea Mays
caccacaccagcaaaaccaccacaacacccctcgcactacgcgcgccgccgccgccgctagcactggtgagacgagtacggaggagcagcacagggatggacggcggcctcgaggatgagcaggaggacccaagcttcctcaaaccaccacagcacccctcgcactacgggcaccgccactgctgtcgctttcagcgtcggtaagacgagtagggaggggcaatgcagggatggacggtggcctggacggcgagttggaagacgcgggcttcctcgacgaggtattacgcgcgacggacgaggtcatcgcctcccgcaaccctaaccccgctcccgctcccgctcccatccccatgtttgactccttcgtcattgtccccgtctgagagcctcctatcttcccaccgattcgatctcccacctccccgtcgcttcgtagccccgcttcacgatcagcttctcccctccgctaatggaatgagtatttttaccggttaaagtttggttaatgaaggaatagaaaatggggttgtgcaatttcaagactcaggtgtccatggattggagaaatttccatttagatgacccatcaacatcctacattgcctggtgatcacacctgtgtcacctgtatgaatgttgaaacccctcatatgcaaaagcttaatactgtcaaggctgctacagtggtcataggtcaactttcagcctctgttaacaacacaattgaccaagagcggggatgagtagaagaggatgatcctggtgtgtatattactgttcgagcattgcatggtagcatcagagaactacgtaacgacgaggctgagcgacaattccagtgtcccaatgtgtgacccgagttcaactcctctttcgtcgacctcgagatcccaggtactatgacacacagctaccttctcgcaacgtgatgtgggatgaattttgacctgtaggttgaataagtgaagtggatgagtcagaaagtggaggagacagtgtgcaggagcagcctgtttatgtggccgtagtggatctcgcatcctgtttgtgagcttggtattcctcctgaaaacatcactgcaaaccaattgttatttggcacattgggggagtacgccggatttgatcccacagagcccacttcacgcagtgggggtaaagcaaaagcagtgcagcaaataaaacagacaattgttacgattagtgatggcgcaactgatctggaggctcggcaacctggcggagcagactgtgtgccgccagagctagcggagggaggcgggtcattcgatttgccatgcttaggattggagaatcactagagtaatagtatatacatggtggggagtgaaaccaacagaggaagaatccgttcttgatcaaaattagtcggctgcttggttcgtcgtctgcgtgttcgatcggaggttggcgacgccttggcgtggccgctttccgcaagaaagcaaggaaattgtgctgaccgccgctaatgcgctggatatttctgggagtggaaacgaaagtgtactctgaatttcaagttcctgtcaaaagtaagatcctctgacgaaggtgtggttgtgatcatgcataaactaactgttgctgccacatggatcggagagggagatcgatccacaggttggttaatggcccatgcataccaccacaccttgttccatgattcttcctttatttttcatgaagtggtgattagatgcctagctccctgttctatgttgctatagcttggttagctagggtcactgtttgtctgacagccagcaattcttgacagcaaaacttgggtgcatgtgctagctacgtacagctggttaaatacacacagagacatcacttattcacatgtgcatcatatatatatggtacagtagtgcagtgttattcttataggctattttattttttcaatagctgttgtgtctgtttacagatagtcccaacttgaattctttatagacaattggcacgcgcatggttcagaaaaactataacctctccccatggctctgttgttgtccttgacttcgttcttttctctaattctttattgggttgagcgaggggtagctaaaaaataggatgcaaactaatgttgtccagtttcaacataataagatggtatcatttgtcaagtgtatgttgggacttgatgctgttgtttgggacattattgggtcgtcattgttggagaaagttgtgtatctacttacagaattggatgttaatataacatgggaagatattcttcaagataaacacaacaaaggtatatttgacatggagcttgaggatttggctgaggatgaacataaccttggccgcacaagtgtggagacttgaattcatatatacttagttaggctcaatgttagcataaacagttgatgaacaagttttcccattagtattttagtttgaatttagagtacaattatgtatgagttatttgacaatgcttatttatgagatattgaatgatatttatctatattgtattaattatagtgttattaaatatatgtgtttgtatttttctc

SEQ ID NO: 51110 - DNA, 925 bp, Zea Mays
aactgattcgcttaggactgaagtagctggcagatggcaggctgagagttgacggaagaactttccctgttcattctataggaatatataagattcccgagcctgctcctgtttgctgccacaactccaatcatcttcctgctggcagcttccctctccctccgctgctgagcaagctgatccaccgccatggggctggcgatggggaggcttcttgggtggaagaaggaggcgcagatcgcgctgttgggcctcggcggcgctggcaagacggccattctgcacaaactcaagctcggccacgcaatcaccaccggaccaacgatagggttcaacagcgagacgcttgaatacaatggcatcagcttcagggtctgggacgtgggtggtcaaggcgaggtagctcatgtatcagcagctgtattgttcttgcattcaaggcgtggtattcgtcgtcgacagcagcgaccgggagtggattcttcgagccaaagatctgctgaacatcattctggacgaggaccagttcaggaatagggatctcgcgctgcttgtgtttgcaaacaagcaggaccggccgaacgtcatgagcgcagcagagatagcggacgagtttgggcttccgtcacggctttgcaaccgtagatgttctgcgatctctggagaaggcctccacgaggggatggcttggctctgcaccaacattcgataggaccaagatcctcctccttcacaaaagactacagtacaaaaggggggcatgctgtttatgtttttgcaggcctaaggaattgtaccagcagatgagatacatgattatgattgctggacaaggatagtttgcagtgtgatgtagaacctgttaggatttatgggctaggcccaattgagaaattcgaataaatcgcaggaaaatcacaaaagc

SEQ ID NO: 51111 - DNA, 847 bp, Zea Mays
tgctgccacaactccaatcatcttcctgctggcagcttccctctccctccgctgctgagcaagctgatccaccgccatggggctggcgatggggaggcttcttgggtggaagaaggaggcgcagatcgcgctgttgggcctcggcggcgctggcaagacggccattctgcacaaactcaagctcggccacgcaatcaccaccggaccaacgatagggttcaacagcgagacgcttgaatacaatggcatcagcttcagggtctgggacgtgggtggtcaaggcgaggtagctcatgtatcagcagctctccggcccttgctaaggcactacctctatggcgtccagggcgtggtattcgtcgtcgacagcagcgaccgggagtggattcttcgagccaaagatctgctgaacatcattctggacgaggaccagttcaggaatagggatctcgcgctgcttgtgtttgcaaacaagcaggaccggccgaacgtcatgagcgcagcagagatagcggacgagtttgggcttccgtcacggctttgcaaccgtagatggcacattcaaagtagttctgcgatctctggagaaggcctccacgaggggatggcttggctctgcaccaacattcgataggaccaagatcctcctccttcacaaaagactacagtacaaaaggggggcatgctgtttatgtttttgcaggcctaaggaattgtaccagcagatgagatacatgattatgattgctggacaaggatagtttgcagtgtgatgtagaacctgttaggatttatgggctaggcccaattgagaaattcgaataaatcgcaggaaaatcacaaaagc

SEQ ID NO: 51112 - DNA, 2044 bp, Zea Mays
cagccagtacgcaccgaggcggggcaactgctccacactccacagaccacagtcgccgccggctcatctcctccgtgcccggcacacgaactccggcgccgccgacccacaatggaatcccccgacggcagtcatggcacgaatactcggcccactctgcagcggcccaacaaagtgaggaaacaccaagacccatacaacgcgacgtcgcgatcccattgcccatccccagatctcaacccgaacctcccagccgcgccgccctgatggcctacaccacctcgccgtcgacatcgacgtcgacggcagcggcggtggcctgggccttcgctgccgccacctgcgtgaaactcctcctcgtccccacctaccgttccaccgacttcgacgttcaccggtactggctcgccctcacgcacgcgctccccgtgcggcagtggggtgggatcttattgggggagtcgtgttcgcatgcttgctgtgctcgaagcacctgttcctcgtggcagcgccggtgtactttatgtatttgttccggcattattgctgtggccggggtgtcgtgaaggggctgggaaggctcgtgctcatgggttctggagtggctgctgtttttgccgcagcatttgtgcccttcgtgtactatggtcagatgcaacaactaattagccgattgtttccctttgggcgaggcctatgccatgcttactgggcgccaaacttttgggtattctatattatacttgacaagattcttgcatttcttcttagaagactaggctttaatattgccatacctgaagcttcgtttactgggggacttgttggtgattcgtctccttttgctgttcttccaaaggtcaccccaattgctacattcttattggtcattcttgccatggctccttgccttatcaaagcattctctaatcctcaaccaaagcatattattagatgggtctcgtatgcatgcacatgtgggtttatgtttggatggcatgtacatgagaaggcatcacttcatttcactatcccacttgccctaatcgccatggatagcttgaacgatgccaggcattactttttgttgtccatagtttcatgctactctctattcccgttgctgtttgagaaccaagagtacctgataaaggtgctgctgctgctgacctacgctgccctcatgtgggtaggctttacggtccattttgctgcaaagtctgacctggaaggaaagaaaataagtcggtcaggcagcacagtgaagaagaatggcatcattggatggattggtttaagctatcttttgggaattgcaggcatagaattatggtctcaagtatttcaccatcatgtattcggcgataggctccccttcctacctcttataatggtgtcattctattgtggccttggaatgatgtactcctgggtgtggcagcttgtacatatagtccgacacacatgatttgattaccggtcatcagtggaagcattctcttgcctttcttgggttgaggctaatcgcgatgacaatgctgcctggaccgatgcagcggccaacacagtcatgtctgggcacagcattttctttttagctgtcgaagtcattgtctgtgtgcaagaaatttttagagatgtgtgaccgtgttatgatgtaattaatgtcagtttatataagtaacagaaaatctgcttgtatcaacccgcgcttcatgcgtgccgctcttttccccatctcaataacatctggcttctgcatcgagtaactgagtgtgtgtatgatatatgaacgattctattttctaggaaggaaagacatcaaatgtgatgtataatctgcttgttatctttctgcgtacatgcctattacgtctggcagatgatgcgaatatatcaacgattctattttcgactcgcctgctgatgatgctgatggcgcacgacaaatggggctcgtagttgcggccagccagcaagtttagaattgactgaattgaaatggaaaggaaaaccagggacgccgggacagaaaggaattggg

SEQ ID NO: 51113 - DNA, 2242 bp, Zea Mays
aaagtttagcacgtcaaacggccacgaatatctcggtcgccaattgctgtatactcttaccttcgccttcgccgccgccgccgtacagtctagagagaaccggcacagccgccgcagtccgcagatgtcgatcgtggtggcatcggaggtcgcgaccgctctcgcgagccgcggcgcggtcgtcgccctcgagtccaccatcatctgccacggtatgccgtacccgaagaatctccagatggccatggaggtggaggccatcatcagggacaacggggctatccctgcaaccatagccgtcctggacggagtccctcacgtcggccttaacaacgaacaattgaagagattggctataagtggaaggcaatttcagaagacggctagaagggatattgtccatgtcatcgcatctggtggcaacggcgcaacaacagtttcggccactatgttctttgctcacaaggttggcataccagtttttgttactgggggcattggaggtgtgcatagacatggtgaacaaactatggatgtctcctcagacttaactgaacttggaaagactcctgtagctgttgtatcggcaggtgtgaagtccattttggacataccgcggacacttgaatacctggaaactgaaggggtgactgttgctgcttacagaaccaatgaatttcccgcgttcttcacagaaattagtggatgccaggtgccatgtcgtgttgattctccagaagagtgtgccaaaataatatatgcaaacaagaacctacgtcttggttctgggattcttattgcagtaccgatccccaagcagcatgcaacttcagggaaaattatagagtctgcaatacagacagctctaaaagaggcagggtacagtcaacatctgcacttctggtaatgatatataaaactgatagctgatgttgccctttttttctcagggataaaaggataataggaaatgcgatcactcccttcatgcttgaaagagtaaaagaactaactggaggatcttccttggaagctagtatcctatagcattattatctgtatatagtttcattcagtggcatattattaagatggttgcataacgtgcaccaataattttaagcctacttgctgcattccacagatatgaaatccaatgcatcttcaaattcttattagacaatccatattggatttttgtgggaaacaaaggttcactgggcataattacaaaatcccatatcagttgtgtgctcttttagttcccttcatccaaagacagttctccttattgatgtttagatattgcacttgttaagaacaatgctcttattggtgcgaacattgctgttgccctttctaaccttcagcagagagaaataagcagtaagctactgtcactttaatagaagggcaggcctggtgaaatggtgagagctatctcaccgagtcactaggtcgtggattcgaagcaccctctccgcttttgtggggcaaagggtggcattagtttatctctttcctagactactcatgtctgagcatttggtaccgagtctgccctttactatcaataataagttttcattttgccatatgtagtgcttatgatatcacactactacttaatttactagtgttcttctaacacctctttctttctcttgtttataaaaataaaataaaagagagatatggtattaacttgtattgaatgtggcgttaagctactctttttatctccaacattgtgaatcaatcttgattcgtgtggttatggcttgatgaaatgtgattgtttgaatgacaggaatgggaagatccgcgttgtagggttacgctcgcggatggagtagcacaggaagcaaaccatttacgaggatggaagctagctgcaggttgggaactggatgtgattgagatgtgtctgagtctgacaagaataggttgcctgccactttggcaccgtaatgagatgtaggccatcaatgtactataattagatgttttttgggatgtaatctgaatttggatggttctctatactgaaatcatctgctttgtgagcggaattatggaatggttttggcacttccatttgatacatgtagtatgtgcatgcaaagcaacctgttttggcacttccatttgacctaccgtaggggtggttacattagctagagactcttttgcttacatggttgtcaattatttgataccaatattgatttgttaatttatt

SEQ ID NO: 51114 - DNA, 1911 bp, Zea Mays
aaagtttagcacgtcaaacggccacgaatatctcggtcgccaattgctgtatactcttaccttcgccttcgccgccgccgccgtacagtctagagagaaccggcacagccgccgcagtccgcagatgtcgatcgtggtggcatcggaggtcgcgaccgctctcgcgagccgcggcgcggtcgtcgccctcgagtccaccatcatctgccacggtatgccgtacccgaagaatctccagatggccatggaggtggaggccatcatcagggacaacggggctatccctgcaaccatagccgtcctggacggagtccctcacgtcggccttaacaacgaacaattgaagagattggctataagtggaaggcaatttcagaagacggctagaagggatattgtccatgtcatcgcatctggtggcaacggcgcaacaacagtttcggccactatgttctttgctcacaaggttggcataccagtttttgttactgggggcattggaggtgtgcatagacatggtgaacaaactatggatgtctcctcagacttaactgaacttggaaagactcctgtagctgttgtatcggcaggtgtgaagtccattttggacataccgcggacacttgaatacctggtagtatactttctgtttgctgtcttccacagataacttggtttattagaactgactttcatgtagaattgtatattgctttcatatttagctgttaagatgtaaaatatggataggctatacttgaggaatttaccttcctttggttagcatttaactcaatttaaagcaaaccaaaacgtcaacttattggtgtttgttattttgaagggaccattttgttcatgtttatcctgaatgacctgagatcatcttttcagtagatgcttacacgaagtttcttgtgttgtttgacaattgagtcaatatgtggtgcttaatacgagagtaatattgtagaaattcgtttgtgtttctgcaagatcctgtgtaagttataatgctttgctcatgttcagtcacgtgatcttattagtctattgcatgacaggaaactgaaggggtgactgttgctgcttacagaaccaatgaatttcccgcgttcttcacagaaattagtggatgccaggtgccatgtcgtgttgattctccagaagagtgtgccaaaataatatatgcaaacaagaacctacgtcttggttctgggattcttattgcagtaccgatccccaagcagcatgcaacttcagggaaaattatagagtctgcaatacagacagctctaaaagaggcaggggataaaaggataataggaaatgcgatcactcccttcatgcttgaaagagtaaaagaactaactggaggatcttccttggaagctaatattgcacttgttaagaacaatgctcttattggtgcgaacattgctgttgccctttctaaccttcagcagagagaaataagcagaatgggaagatccgcgttgtagggttacgctcgcggatggagtagcacaggaagcaaaccatttacgaggatggaagctagctgcaggttgggaactggatgtgattgagatgtgtctgagtctgacaagaataggttgcctgccactttggcaccgtaatgagatgtaggccatcaatgtactataattagatgttttttgggatgtaatctgaatttggatggttctctatactgaaatcatctgctttgtgagcggaattatggaatggttttggcacttccatttgatacatgtagtatgtgcatgcaaagcaacctgttttggcacttccatttgacctaccgtaggggtggttacattagctagagactcttttgcttacatggttgtcaattatttgataccaatattgatttgttaatttatt

SEQ ID NO: 51115 - DNA, 2596 bp, Zea Mays
aaagtttagcacgtcaaacggccacgaatatctcggtcgccaattgctgtatactcttaccttcgccttcgccgccgccgccgtacagtctagagagaaccggcacagccgccgcagtccgcagatgtcgatcgtggtggcatcggaggtcgcgaccgctctcgcgagccgcggcgcggtcgtcgccctcgagtccaccatcatctgccacggtatgccgtacccgaagaatctccagatggccatggaggtggaggccatcatcagggacaacggggctatccctgcaaccatagccgtcctggacggagtccctcacgtcggccttaacaacgaacaattgaagagattggctataagtggaaggcaatttcagaagacggctagaagggatattgtccatgtcatcgcatctggtggcaacggcgcaacaacagtttcggccactatgttctttgctcacaaggttggcataccagtttttgttactgggggcattggaggtgtgcatagacatggtgaacaaactatggatgtctcctcagacttaactgaacttggaaagactcctgtagctgttgtatcggcaggtgtgaagtccattttggacataccgcggacacttgaatacctggtagtatactttctgtttgctgtcttccacagataacttggtttattagaactgactttcatgtagaattgtatattgctttcatatttagctgttaagatgtaaaatatggataggctatacttgaggaatttaccttcctttggttagcatttaactcaatttaaagcaaaccaaaacgtcaacttattggtgtttgttattttgaagggaccattttgttcatgtttatcctgaatgacctgagatcatcttttcagtagatgcttacacgaagtttcttgtgttgtttgacaattgagtcaatatgtggtgcttaatacgagagtaatattgtagaaattcgtttgtgtttctgcaagatcctgtgtaagttataatgctttgctcatgttcagtcacgtgatcttattagtctattgcatgacaggaaactgaaggggtgactgttgctgcttacagaaccaatgaatttcccgcgttcttcacagaaattagtggatgccaggtgccatgtcgtgttgattctccagaagagtgtgccaaaataatatatgcaaacaagaacctacgtcttggttctgggattcttattgcagtaccgatccccaagcagcatgcaacttcagggaaaattatagagtctgcaatacagacagctctaaaagagggataaaaggataataggaaatgcgatcactcccttcatgcttgaaagagtaaaagaactaactggaggatcttccttggaagctagtatcctatagcattattatctgtatatagtttcattcagtggcatattattaagatggttgcataacgtgcaccaataattttaagcctacttgctgcattccacagatatgaaatccaatgcatcttcaaattcttattagacaatccatattggatttttgtgggaaacaaaggttcactgggcataattacaaaatcccatatcagttgtgtgctcttttagttcccttcatccaaagacagttctccttattgatgtttagatattgcacttgttaagaacaatgctcttattggtgcgaacattgctgttgccctttctaaccttcagcagagagaaataagcagtaagctactgtcactttaatagaagggcaggcctggtgaaatggtgagagctatctcaccgagtcactaggtcgtggattcgaagcaccctctccgcttttgtggggcaaagggtggcattagtttatctctttcctagactactcatgtctgagcatttggtaccgagtctgccctttactatcaataataagttttcattttgccatatgtagtgcttatgatatcacactactacttaatttactagtgttcttctaacacctctttctttctcttgtttataaaaataaaataaaagagagatatggtattaacttgtattgaatgtggcgttaagctactctttttatctccaacattgtgaatcaatcttgattcgtgtggttatggcttgatgaaatgtgattgtttgaatgacaggaatgggaagatccgcgttgtagggttacgctcgcggatggagtagcacaggaagcaaaccatttacgaggatggaagctagctgcaggttgggaactggatgtgattgagatgtgtctgagtctgacaagaataggttgcctgccactttggcaccgtaatgagatgtaggccatcaatgtactataattagatgttttttgggatgtaatctgaatttggatggttctctatactgaaatcatctgctttgtgagcggaattatggaatggttttggcacttccatttgatacatgtagtatgtgcatgcaaagcaacctgttttggcacttccatttgacctaccgtaggggtggttacattagctagagactcttttgcttacatggttgtcaattatttgataccaatattgatttgttaatttatt

SEQ ID NO: 51116 - DNA, 1976 bp, Zea Mays
aaagtttagcacgtcaaacggccacgaatatctcggtcgccaattgctgtatactcttaccttcgccttcgccgccgccgccgtacagtctagagagaaccggcacagccgccgcagtccgcagatgtcgatcgtggtggcatcggaggtcgcgaccgctctcgcgagccgcggcgcggtcgtcgccctcgagtccaccatcatctgccacggtatgccgtacccgaagaatctccagatggccatggaggtggaggccatcatcagggacaacggggctatccctgcaaccatagccgtcctggacggagtccctcacgtcggccttaacaacgaacaattgaagagattggctataagtggaaggcaatttcagaagacggctagaagggatattgtccatgtcatcgcatctggtggcaacggcgcaacaacagtttcggccactatgttctttgctcacaaggttggcataccagtttttgttactgggggcattggaggtgtgcatagacatggtgaacaaactatggatgtctcctcagacttaactgaacttggaaagactcctgtagctgttgtatcggcaggtgtgaagtccattttggacataccgcggacacttgaatacctggaaactgaaggggtgactgttgctgcttacagaaccaatgaatttcccgcgttcttcacagaaattagtggatgccaggtgccatgtcgtgttgattctccagaagagtgtgccaaaataatatatgcaaacaagaacctacgtcttggttctgggattcttattgcagtaccgatccccaagcagcatgcaacttcagggaaaattatagagtctgcaatacagacagctctaaaagaggcagggtacagtcaacatctgcacttctggtaatgatatataaaactgatagctgatgttgccctttttttctcagggataaaaggataataggaaatgcgatcactcccttcatgcttgaaagagtaaaagaactaactggaggatcttccttggaagctaatattgcacttgttaagaacaatgctcttattggtgcgaacattgctgttgccctttctaaccttcagcagagagaaataagcagtaagctactgtcactttaatagaagggcaggcctggtgaaatggtgagagctatctcaccgagtcactaggtcgtggattcgaagcaccctctccgcttttgtggggcaaagggtggcattagtttatctctttcctagactactcatgtctgagcatttggtaccgagtctgccctttactatcaataataagttttcattttgccatatgtagtgcttatgatatcacactactacttaatttactagtgttcttctaacacctctttctttctcttgtttataaaaataaaataaaagagagatatggtattaacttgtattgaatgtggcgttaagctactctttttatctccaacattgtgaatcaatcttgattcgtgtggttatggcttgatgaaatgtgattgtttgaatgacaggaatgggaagatccgcgttgtagggttacgctcgcggatggagtagcacaggaagcaaaccatttacgaggatggaagctagctgcaggttgggaactggatgtgattgagatgtgtctgagtctgacaagaataggttgcctgccactttggcaccgtaatgagatgtaggccatcaatgtactataattagatgttttttgggatgtaatctgaatttggatggttctctatactgaaatcatctgctttgtgagcggaattatggaatggttttggcacttccatttgatacatgtagtatgtgcatgcaaagcaacctgttttggcacttccatttgacctaccgtaggggtggttacattagctagagactcttttgcttacatggttgtcaattatttgataccaatattgatttgttaatttatt

SEQ ID NO: 51117 - DNA, 2177 bp, Zea Mays
aaagtttagcacgtcaaacggccacgaatatctcggtcgccaattgctgtatactcttaccttcgccttcgccgccgccgccgtacagtctagagagaaccggcacagccgccgcagtccgcagatgtcgatcgtggtggcatcggaggtcgcgaccgctctcgcgagccgcggcgcggtcgtcgccctcgagtccaccatcatctgccacggtatgccgtacccgaagaatctccagatggccatggaggtggaggccatcatcagggacaacggggctatccctgcaaccatagccgtcctggacggagtccctcacgtcggccttaacaacgaacaattgaagagattggctataagtggaaggcaatttcagaagacggctagaagggatattgtccatgtcatcgcatctggtggcaacggcgcaacaacagtttcggccactatgttctttgctcacaaggttggcataccagtttttgttactgggggcattggaggtgtgcatagacatggtgaacaaactatggatgtctcctcagacttaactgaacttggaaagactcctgtagctgttgtatcggcaggtgtgaagtccattttggacataccgcggacacttgaatacctggtagtatactttctgtttgctgtcttccacagataacttggtttattagaactgactttcatgtagaattgtatattgctttcatatttagctgttaagatgtaaaatatggataggctatacttgaggaatttaccttcctttggttagcatttaactcaatttaaagcaaaccaaaacgtcaacttattggtgtttgttattttgaagggaccattttgttcatgtttatcctgaatgacctgagatcatcttttcagtagatgcttacacgaagtttcttgtgttgtttgacaattgagtcaatatgtggtgcttaatacgagagtaatattgtagaaattcgtttgtgtttctgcaagatcctgtgtaagttataatgctttgctcatgttcagtcacgtgatcttattagtctattgcatgacaggaaactgaaggggtgactgttgctgcttacagaaccaatgaatttcccgcgttcttcacagaaattagtggatgccaggtgccatgtcgtgttgattctccagaagagtgtgccaaaataatatatgcaaacaagaacctacgtcttggttctgggattcttattgcagtaccgatccccaagcagcatgcaacttcagggaaaattatagagtctgcaatacagacagctctaaaagaggcaggggataaaaggataataggaaatgcgatcactcccttcatgcttgaaagagtaaaagaactaactggaggatcttccttggaagctagtatcctatagcattattatctgtatatagtttcattcagtggcatattattaagatggttgcataacgtgcaccaataattttaagcctacttgctgcattccacagatatgaaatccaatgcatcttcaaattcttattagacaatccatattggatttttgtgggaaacaaaggttcactgggcataattacaaaatcccatatcagttgtgtgctcttttagttcccttcatccaaagacagttctccttattgatgtttagatattgcacttgttaagaacaatgctcttattggtgcgaacattgctgttgccctttctaaccttcagcagagagaaataagcagaatgggaagatccgcgttgtagggttacgctcgcggatggagtagcacaggaagcaaaccatttacgaggatggaagctagctgcaggttgggaactggatgtgattgagatgtgtctgagtctgacaagaataggttgcctgccactttggcaccgtaatgagatgtaggccatcaatgtactataattagatgttttttgggatgtaatctgaatttggatggttctctatactgaaatcatctgctttgtgagcggaattatggaatggttttggcacttccatttgatacatgtagtatgtgcatgcaaagcaacctgttttggcacttccatttgacctaccgtaggggtggttacattagctagagactcttttgcttacatggttgtcaattatttgataccaatattgatttgttaatttatt

SEQ ID NO: 51118 - DNA, 1818 bp, Zea Mays
aaagtttagcacgtcaaacggccacgaatatctcggtcgccaattgctgtatactcttaccttcgccttcgccgccgccgccgtacagtctagagagaaccggcacagccgccgcagtccgcagatgtcgatcgtggtggcatcggaggtcgcgaccgctctcgcgagccgcggcgcggtcgtcgccctcgagtccaccatcatctgccacggtatgccgtacccgaagaatctccagatggccatggaggtggaggccatcatcagggacaacggggctatccctgcaaccatagccgtcctggacggagtccctcacgtcggccttaacaacgaacaattgaagagattggctataagtggaaggcaatttcagaagacggctagaagggatattgtccatgtcatcgcatctggtggcaacggcgcaacaacagtttcggccactatgttctttgctcacaaggttggcataccagtttttgttactgggggcattggaggtgtgcatagacatggtgaacaaactatggatgtctcctcagacttaactgaacttggaaagactcctgtagctgttgtatcggcaggtgtgaagtccattttggacataccgcggacacttgaatacctggaaactgaaggggtgactgttgctgcttacagaaccaatgaatttcccgcgttcttcacagaaattagtggatgccaggtgccatgtcgtgttgattctccagaagagtgtgccaaaataatatatgcaaacaagaacctacgtcttggttctgggattcttattgcagtaccgatccccaagcagcatgcaacttcagggaaaattatagagtctgcaatacagacagctctaaaagaggcagggtacagtcaacatctgcacttctggtaatgatatataaaactgatagctgatgttgccctttttttctcagggataaaaggataataggaaatgcgatcactcccttcatgcttgaaagagtaaaagaactaactggaggatcttccttggaagctagtatcctatagcattattatctgtatatagtttcattcagtggcatattattaagatggttgcataacgtgcaccaataattttaagcctacttgctgcattccacagatatgaaatccaatgcatcttcaaattcttattagacaatccatattggatttttgtgggaaacaaaggttcactgggcataattacaaaatcccatatcagttgtgtgctcttttagttcccttcatccaaagacagttctccttattgatgtttagatattgcacttgttaagaacaatgctcttattggtgcgaacattgctgttgccctttctaaccttcagcagagagaaataagcagaatgggaagatccgcgttgtagggttacgctcgcggatggagtagcacaggaagcaaaccatttacgaggatggaagctagctgcaggttgggaactggatgtgattgagatgtgtctgagtctgacaagaataggttgcctgccactttggcaccgtaatgagatgtaggccatcaatgtactataattagatgttttttgggatgtaatctgaatttggatggttctctatactgaaatcatctgctttgtgagcggaattatggaatggttttggcacttccatttgatacatgtagtatgtgcatgcaaagcaacctgttttggcacttccatttgacctaccgtaggggtggttacattagctagagactcttttgcttacatggttgtcaattatttgataccaatattgatttgttaatttatt

SEQ ID NO: 51119 - DNA, 979 bp, Zea Mays
ctgaagcttaaagttcatgaataaactatggatgtctcctcagacttaactgaacttggaaagactcctgtagctgttgtatcggcaggtgtgaagtccattttggacataccgcggacacttgaatacctggaaactgaaggggtgactgttgctgcttacagaaccaatgaatttcccgcgttcttcacagaaattagtggatgccaggtgccatgtcgtgttgattctccagaagagtgtgccaaaataatatatgcaaacaagaacctacgtcttggttctgggattcttattgcagtaccgatccccaagcagcatgcaacttcagggaaaattatagagtctgcaatacagacagctctaaaagaggcaggggataaaaggataataggaaatgcgatcactcccttcatgcttgaaagagtaaaagaactaactggaggatcttccttggaagctaatattgcacttgttaagaacaatgctcttattggtgcgaacattgctgttgccctttctaaccttcagcagagagaaataagcagaatgggaagatccgcgttgtagggttacgctcgcggatggagtagcacaggaagcaaaccatttacgaggatggaagctagctgcaggttgggaactggatgtgattgagatgtgtctgagtctgacaagaataggttgcctgccactttggcaccgtaatgagatgtaggccatcaatgtactataattagatgttttttgggatgtaatctgaatttggatggttctctatactgaaatcatctgctttgtgagcggaattatggaatggttttggcacttccatttgatacatgtagtatgtgcatgcaaagcaacctgttttggcacttccatttgacctaccgtaggggtggttacattagctagagactcttttgcttacatggttgtcaattatttgataccaatattgatttgttaatttatt

SEQ ID NO: 51120 - DNA, 1578 bp, Zea Mays
cgccatcgtcgtcaacaccttccctcgcgccgccgccgccgtcgatccatcccctcccctccgcaggatcgtagcattagtatgagctatatgctagtattaagaagaagaccttctcacgtaggtcaagaaaatatatccaacattgttggtatgactttttcccgtgactgtctaagcaatgtttcactaatcccataggttattatcttctgatctcaaagcaatgtcctaatagctcacatagacaagagaaggcaaaagttgtgtcaggggccgtcgaaaataggcttattttcggcggccaggtcaagccgccgaaaataacagacaattttcggcggccaggggtgggccgccgaaaatgatccacagtgctgttgtgtaagggaaatcctagctacatcataagtttccagttttcatctcacatgattgaaaaggggcagaaagaaaggcggcgagggctgaaggacaagaacatctcaatcttcaagtgattatactttttttctaataatcaaatcaaatagctatgaatggtctattggtgtattgatattcatgctgccagggaaatccaaagctatccaataaaaatgagaaacaacagtccattttgctgggttcgtgaaattcaaaggcttatcaagactaaatatttgcataacaacttactcggaaatagttttaattcttgaatcaactatgctagactagaaaacaagaaataacaaaggtggcgtttaatccgcgtctgatctccagaactaacctgtagccttgttagagtttagtccctccatgaactaattggtcactaacgagatagtggttggttcttaccacagcctccaagccagggaggtttgactaagctttattaatactccaagccagggaggctcgatctgtgaaaccgacactcacatgacaagtagcaaaagtttcagacagcctgcctatcctaccgcctcaatctggaccaactgcacagcctaagaagtaagaatagatggccgtagagatggccttctacgggtagtcaaagctataagataacacgagtttcacggccaattaaattccaaacaacacatgcttcccctgctgcgacgaaatcacttcacatcaaactgatggggagatcggagcatccatccatccaaggaagatccggatccaattactcagagtcatatagcaaaagaaatatgctatctatcccgcacaactcacagctcgttctccgaacaatccgtccaagcaaggtaggcttccttaccagcgagcgataaagtcggactatgtcggcacggatctccactccgacgcagtcccttatagaagaggaggaacaaggccacgaggatgagtgctagagaagctgatcccttcgaggccggtggcgtgcttcgcttcggttgggctgggaatggaagcacgcgacttgggtgatttcgtctggtggtgtgtgcaaggaaagggaaggcaagtcgaaggagagcaaggcccgggcggtgaaaaggtggaccgggagacaacagacaagaaagaaatcacgcgtatcgaaatcgc

SEQ ID NO: 51121 - DNA, 1992 bp, Zea Mays
gtctttgtcgaggataacatgacgtgctccacctcgtagacggacctgtgccactactcatcgtcagcacgccatgacagccgcagcaacaaggtcacctcctctcggaacggtggccggttcctcgcctcccgccacaggaaaatatcactctcagatttcttcatctatgggtcggcgcaatccaagagtgacacacaccagcaatgaatggctctggtattgaccaagatgagaacatggaacattgagacgtatgtcaacccaatgaattggatattgaagaatggctggatatagatgaaccagctgatatttatgttcttagctgtttacgtgcatctgttcgatctatggcttctcggcgctctcccagggaagaatgtgcgccttcaaaggaaggtgaacttaagagtaaaagcagctaatgagttatagtttaacaaggatggctcagctatcaagaagctccagactggagtcaataagcttgttactgctacttcctaactggtgcatagataatttaacgccgcttgtgcggcaatctccatctatatgtgacctgcaaaagataaatccttaaatagtaggtcaattgcgaagctttgttagtgatgatccgatgatcaagaaccgaagcaccttcaagattggaactgcagagtggtcgggttctcagatgtaagctgcacaacattaagctatctccccatcgatattgcacactttaacttgttaccatatttagttcttttgtatgcctttatagtggcttgttaatttacactgctggttcctgcaaccttttacaaattggtaaaaatgaaaattgagagaggaaaatttgtgctgaagctttattcgtcctttggttaagtgattactgaatgaaaacaaatttaaaaatagtaataaggtttttgttctatcaaacacaatcaagatttgttagcttgcttgctgctgcttagatcaatattggtttctcacatcaactatgctaatgttgaggtgataatcagtctttcactagcataatgatgtatatgcagactaatttttgtctccgttgcatggcatttgtgttgttgtatactgctcaagtactgcttatgagattgcttgaactttatcctagagcctcaagagttgtcgttggccaaagctacatctatctttctttcagtgttttgctggaactgataacgtttcgagtctgcagaagaatgaatcatagaaagttaatgtgtgcatccatggttgtggtcttgacacggcggagcggacctcgctcgggaagctgctgcagccggtagactattgattggaacttttaggtacataagttctccacatgtagatgagcgttatcatcatagatatggggtcaatccctgttttgttcccatgcttgaaattgatggtcttcattttgttggttgtgacaaaagtcaaaaccggatggagttgtggagcagattgcgggttttgaatttcttttccaaatgtcgtcttcacgcccaccgcggaggggtggtgaccgaagagatagtggcaaaggcgtcccttgtgggctctgctcctatctcgcggtatgaagcctttaacttatgagatgagataggagtctgtgttcttatcccaatataaggtctacaatggcacaatgcttgtaccatctgtttttgcggtaacttatttttatcatgcagtgcatgtgatttgaaactttgtgttagcctttattgctttctaccttatggcacctgtagtagtgaactgatgatattattgtggactctgaagctttgtttgcttagaatggtaattttgttgtattctatttcacaggataaaaccgagttgagcaattgtcgttcatcttagtgctaatttatgggtattgctacttaacaataacatttcgttattgttgtacgaaaccagtgcttcatggtaacatatagtatattgctacttaaaaatgat

SEQ ID NO: 51122 - DNA, 1347 bp, Zea Mays
gcgcgtctctactctccaggcagttttggcccctagttttctgctgaacgcgaaccatgtccatgccgaacccccgcgcacaccacgccagcgggggtggagacgaaggcggcgctggccgcggcaagtgactcggcataagcagcgcaggatcgccgtcgtccatccccaccgcagaatcgactggcgattacaaaatagtggacaagagttatatggtttgagtgcattaatttagaagattcgtcatgttcaagcactaggagtattttcaggatgtccggtgcgattgaaatgatgacttcttgcaggtagtgcagagagactgatagttgatgtggcatgacagctcagtagttcactgcccatagacataatgtgataatgctcatgttttcacacctcactatgacagaacttggtgcattaagactctgtctgaatcactcccagaatagtggatttggtctcctgggtcgagtttcctggagctaagcatctttgctgccggtaccacaatagatctgctggcttttggccgtcagcaggagcagaaggctgttttgatgggacatggcgactaacagaagtccaagattcctttctcatggatggatggtcccaattgagttggacgttttcggtgggaagcggacaaaccaaagcaggttcccgtttgacacctaaactttcttatacaaaattacttcttgcaagaccttttccaacataacacttacatataaatctgcatccttctaaccctaacgctttctagttgtctgaattgtgcccatattttgaagcacatgaaagtctattccttgtcatgggagcaatcaagagattgcttagatcactagctcactgttgaacgttgattggttggcgcgagctttgcttcgatcgtgaggagtgggtgatttgatccattcatcgcttgttctgagcattcggggactaggttgtggcaagacaaaatctgattggaagtattgatacagcgggacgggggacaagtagaggccaaaaaacaatgggaacgcagttcggcacactgaattttgacttgccaggtgccctcagagatcagaatccaatgctccctgacggcctgaccccctctcgctgtctttcgccccctcccccctactacactcacgtgaaacatcctgtggaagtcttctgttcctccgtttgcccatgtttttgtcctttgtttgttgttggtgccgttgcgctgacagctgggtttggaagagtgaaatacgttgttcaaattagttagttgctcgcatattactatggttttatatcatgtatgtaaatcttacttaaataagtttt

SEQ ID NO: 51123 - DNA, 1264 bp, Zea Mays
cgcgtctctactctccaggcagttttggcccctagttttctgctgaacgcgaaccatgtccatgccgaacccccgcgcacaccacgccagcgggggtggagacgaaggcggcgctggccgcggcaagtgactcggcataagcagcgcaggatcgccgtcgtccatccccaccgcagaatcgactggcgattacaaaatagtggacaagagttatatggtttgagtgcattaatttagaagattcgtcatgttcaagcactaggagtattttcaggatgtccggtgcgattgaaatgatgacttcttgcaggtagtgcagagagactgatagttgatgtggcatgacagctcagtagttcactgcccatagacataatgtgataatgctcatgttttcacacctcactatgacagaacttggtgcattaagactctgtctggttcgcaagtgctcagcaatcttgactgttaaatagattttagtgtcttagaatgctctcaaaactctaaatgccaataactgtatggagatctctgaatcatttcacacatacacttctgtccttccaacttctcttgacaacggtcaagtatccttgattgtacatggttgagcttgatgttgtattttcctccttggtggttcttaccagatgtgttgcacaaggttgaatccccaacacaaatgataaactgacacttcccctctttatctagaatcaaatttcgactgtgcatacagttgagccaattcatatgcgtgcttggtgcattgcatgttctgcgcatgcctggttgataagagctcggcaagtgttggaaactatgttgccatacaccatatctttgagtaaaggataccttgtactgtggtattaagaaactctggcaattaatttactttgtcatgtcaaatttacttttgcaaatggctaatctatcacgcagctattgatccatcatccatccacagcacttcttatctgttctgaataaccttgtgtgttcgatgaaaaatataagatttttttttcacttgatcatcgtagcaatatcctgaaatttgagcaaattttacccttaacataccagtttgccttggctgcacagctgtctgttgacagcagcttccaagctctacaatctttatggttcataataggcaactttctcagttcattgagtggatcaaatcacaaaaaaaaaaggtgatgaattgaatcactcccagaatagtggatttggtctcctgggtcgagtttcc

SEQ ID NO: 51124 - DNA, 3796 bp, Zea Mays
cgcgtctctactctccaggcagttttggcccctagttttctgctgaacgcgaaccatgtccatgccgaacccccgcgcacaccacgccagcgggggtggagacgaaggcggcgctggccgcggcaagtgactcggcataagcagcgcaggatcgccgtcgtccatccccaccgcagaatcgactggcgattacaaaatagtggacaagagttatatggtagtgcagagagactgatagttgatgtggcatgacagctcagtagttcactgcccatagacataatgtgataatgctcatgttttcacacctcactatgacagaacttggtgcattaagactctgtctgaatcactcccagaatagtggatttggtctcctgggtcgagtttcctggagctaagcatctttgctgccggtaccacaatagatctgctggcttttggccgtcagcaggagcagaaggctgttttgatggtacatttgtttgatctctagtcttaaagccaaaggtcaatgttctgtgctgcaaaagggacatggcgactaacagaagtccaagattcctttctcatggatggatggtcccaattgagttggacgttttcggtgggaagcggacaaaccaaagcagtccgcaccctccacgtcaacaccgcgccgccacgtcactgcttcccctttctgctctctacagccgtgcagcgtgaggaaggcgggtgcggttgcgccgctgcggacaaaacgaccacacacaaggccacaaccacaagtccacaaccatacaagctccacctggcagctggcacggcgctcttccggtctcccggggctcggctcgtgtcttgaatttttttgcatgggaaacattgaggaagactgattttgtcaaacggaccccgtggccactgcaactgccaactgcaagtcatcgctcacggcgcactcgcgcacggcgcactcttcggctcctcccctcctcggcagtgcggcactgcggcgtatactagtaataaaaaggtactcggtctcggagtagcttggcgagtgctccacatcgtctgcttggctgctttccaccgccggagacggagtgtcggatgccatgggcagcggcgcgtcgcggctgctcaccgcgtgcgcgtgctcgcggccgccgccggcgccagcggacgacgggccgtgcctggacgacgcgctcggccactccttctgctacgccgccagctccgccgccgccgccgccgcgggccattcgtcatccttccgccacgccatctccggcgccgcgctctccgccaactcctcagtgcccgtgccgatctaccaatcctccgtcgccggcggcatgccgccgcagtaccactccgcgttccacacttcctcgtcgttctcctccgcgccgctgcagctatccaacctctcctcggggccgctcttcctctccgggcccatcgaccgcggcgcccagctctccggcccgctcgaccaggccgtgcccttctcgggcccgctccccgcgaagcccaccaagcccgctcgcccctcgtcgtcgcgagggttctcgaggaggttcaggaaaccctcgttcggcagcctgcggcggagcatctcggagaagaaccgaccatgcgtcgtgccgctccgccgggaggacggcgttcagtgggcgcacggccgcgccggggaggacagggtccacgtggttgtctccgaggatcagcgctggcttttcgtcggcatctatgacggcttcaacggccccgaggccccggacttcctggtcgctaatctctaccgcttcctgctgcgcgagctccgtgggatcttctacaaagaggccgatccggaatccaagcgactgtggcagttcctggcggatggcgaggacgaggatagcgaactcgacttctcgggctccggccggttcgcgctatcgcttgccaggctcaaggagcagaggcatcccttgtgggcccatgcggccgccgctggcgatggtcaaagcggcagggagtggggagttaagaggttgacggccgcaccggcggtgagggatcacagggcggtactgagcgcactggcccgggcgctagctacgacggagtcggcgtacctggacatgaccagtcagtcaatgggatcccacccagagctggcagtgaccggagcttgcctgctcgtggtcctgttgagggatgacgacgtgtatgtaatgaaccttggggatagccgtgccattgtggcgcagcgacgggacgacgaagattgcttgattgggagcattccggtggaggacattggtgtgggcttggagatcgagacaaggatccctgggtattcggcaattgggctcgaggcattgcagctgtcgactgatcatagcacgagcgttgaagagtatgtggactggcctgttcaacagcatggttttacaatcggcagaccatttttcttttggagttatgaatttatatatcgtgggatagaagtgcagaggatcagacgcgaacatccagatgatgatcagtgtgttgttaatgatagagtgaaaggtcgtctaacagttacccgtgcatttggtgctgggtatctcaaacaggcaaggttcaatgatgggttgctagagatgtttcgcaatgagtatataggtgataccccatatatatcatgcacacctactctttgccatcataagctctccatcagggatcagtttcttgttctttcgtctgatggcttatatcagtacctaagcaatgaggaggtagtgctgcatgttgagaattttatggagcggtttcctgagggtgatcctgcacagagtttaattgaggagctactctcccgtgctgcaaagaaagctggcatggacttctatgaactattagatatacctcaaggggaccgcagaaaataccatgatgacgtcaccattatggttatttctcttgaggggagaatatggaaatcctctggaacatatgtgtgatgttcagctgatatactgtccgtgtcagtatttattccgatgcaatattcagctgaaatgaacttcagccggtcagcactcccaggcgattgcacatatgctcaccaagaggggaaaagtctggcatgacatacagctatgtagtccatacacttgtcgaagtggagttctccagctggggatcatcgctgatccttcacatcagctttgtcacagctcatgctcataggttaactcgggcagattaaagttgcagaaaaatgacagcctggtagggaggaattcctggaaaagcagagccaattttgttctgtttgccactacagctttgtttggttacatactcaccactgacaattttttccacctcacactgagttgtcatagagttgggtgcttattttatccttggaaatagaaaacttttaggtatatgcagctttttctcattcatgtgaggattgagcctgtattatattggaaactagaactgatcatgtcagaaaaatggatgattggcacctcattttgtcctgactcctgaaggtggttctccttcgagtctttgagccgttagtggcatccgtgaaagaaaattttacatttcgcctccactggaaaaacaaagctagtgcctcctagcccttggcaagttatttggttggtcctcagaaaagctaagagctgaaagatattttggaggcaatccatcagtcgttggcgatatttttcatgtgcatggtatatctgtttgtcgatcctgacgatatttaactctcaacatgatgaagaaatttcggttaggc

SEQ ID NO: 51125 - DNA, 234 bp, Zea Mays
ctcagtagttcactgcccatagacataatgtgataatgctcatgttttcacacctcactatgacagaacttggtgcattaagactctgtctgaatcaaatttcgactgtgcatacagttgagccaattcatatgcgtgcttggtgcattgcatgttctgcgcatgcctggttgataagagctcggcaagtgttggaaactatgttgccatacaccatatctttgagtaaaggat

SEQ ID NO: 51126 - DNA, 2616 bp, Zea Mays
gtcggatgccatgggcagcggcgcgtcgcggctgctcaccgcgtgcgcgtgctcgcggccgccgccggcgccagcggacgacgggccgtgcctggacgacgcgctcggccactccttctgctacgccgccagctccgccgccgccgccgccgcgggccattcgtcatccttccgccacgccatctccggcgccgcgctctccgccaactcctcagtgcccgtgccgatctaccaatcctccgtcgccggcggcatgccgccgcagtaccactccgcgttccacacttcctcgtcgttctcctccgcgccgctgcagctatccaacctctcctcggggccgctcttcctctccgggcccatcgaccgcggcgcccagctctccggcccgctcgaccaggccgtgcccttctcgggcccgctccccgcgaagcccaccaagcccgctcgcccctcgtcgtcgcgagggttctcgaggaggttcaggaaaccctcgttcggcagcctgcggcggagcatctcggagaagaaccgaccatgcgtcgtgccgctccgccgggaggacggcgttcagtgggcgcacggccgcgccggggaggacagggtccacgtggttgtctccgaggatcagcgctggcttttcgtcggcatctatgacggcttcaacggccccgaggccccggacttcctggtcgctaatctctaccgcttcctgctgcgcgagctccgtgggatcttctacaaagaggccgatccggaatccaagcgactgtggcagttcctggcggatggcgaggacgaggatagcgaactcgacttctcgggctccggccggttcgcgctatcgcttgccaggctcaaggagcagaggcatcccttgtgggcccatgcggccgccgctggcgatggtcaaagcggcagggagtggggagttaagaggttgacggccgcaccggcggtgagggatcacagggcggtactgagcgcactggcccgggcgctagctacgacggagtcggcgtacctggacatgaccagtcagtcaatgggatcccacccagagctggcagtgaccggagcttgcctgctcgtggtcctgttgagggatgacgacgtgtatgtaatgaaccttggggatagccgtgccattgtggcgcagcgacgggacgacgaagattgcttgattgggagcattccggtggaggacattggtgtgggcttggagatcgagacaaggatccctgggtattcggcaattgggctcgaggcattgcagctgtcgactgatcatagcacgagcgttgaagaggaagtgcagaggatcagacgcgaacatccagatgatgatcagtgtgttgttaatgatagagtgaaaggtcgtctaacagttacccgtgcatttggtgctgggtatctcaaacaggcaaggttcaatgatgggttgctagagatgtttcgcaatgagtatataggtgataccccatatatatcatgcacacctactctttgccatcataagctctccatcagggatcagtttcttgttctttcgtctgatggcttatatcagtacctaagcaatgaggaggtagtgctgcatgttgagaattttatggagcggtttcctgagggtgatcctgcacagagtttaattgaggagctactctcccgtgctgcaaagaaagctggcatggacttctatgaactattagatatacctcaaggggaccgcagaaaataccatgatgacgtcaccattatggttatttctcttgaggggagaatatggaaatcctctggaacatatgtgtgatgttcagctgatatactgtccgtgtcagtatttattccgatgcaatattcagctgaaatgaacttcagccggtcagcactcccaggcgattgcacatatgctcaccaagaggggaaaagtctggcatgacatacagctatgtagtccatacacttgtcgaagtggagttctccagctggggatcatcgctgatccttcacatcagctttgtcacagctcatgctcataggttaactcgggcagattaaagttgcagaaaaatgacagcctggtagggaggaattcctggaaaagcagagccaattttgttctgtttgccactacagctttgtttggttacatactcaccactgacaattttttccacctcacactgagttgtcatagagttgggtgcttattttatccttggaaatagaaaacttttaggtatatgcagctttttctcattcatgtgaggattgagcctgtattatattggaaactagaactgatcatgtcagaaaaatggatgattggcacctcattttgtcctgactcctgaaggtggttctccttcgagtctttgagccgttagtggcatccgtgaaagaaaattttacatttcgcctccactggaaaaacaaagctagtgcctcctagcccttggcaagttatttggttggtcctcagaaaagctaagagctgaaagatattttggaggcaatccatcagtcgttggcgatatttttcatgtgcatggtatatctgtttgtcgatcctgacgatatttaactctcaacatgatgaagaaatttcggttaggc

SEQ ID NO: 51127 - DNA, 2687 bp, Zea Mays
atgggcagcggcgcgtcgcggctgctcaccgcgtgcgcgtgctcgcggccgccgccggcgccagcggacgacgggccgtgcctggacgacgcgctcggccactccttctgctacgccgccagctccgccgccgccgccgccgcgggccattcgtcatccttccgccacgccatctccggcgccgcgctctccgccaactcctcagtgcccgtgccgatctaccaatcctccgtcgccggcggcatgccgccgcagtaccactccgcgttccacacttcctcgtcgttctcctccgcgccgctgcagctatccaacctctcctcggggccgctcttcctctccgggcccatcgaccgcggcgcccagctctccggcccgctcgaccaggccgtgcccttctcgggcccgctccccgcgaagcccaccaagcccgctcgcccctcgtcgtcgcgagggttctcgaggaggttcaggaaaccctcgttcggcagcctgcggcggagcatctcggagaagaaccgaccatgcgtcgtgccgctccgccgggaggacggcgttcagtgggcgcacggccgcgccggggaggacagggtccacgtggttgtctccgaggatcagcgctggcttttcgtcggcatctatgacggcttcaacggccccgaggccccggacttcctggtcgctaatctctaccgcttcctgctgcgcgagctccgtgggatcttctacaaagaggccgatccggaatccaagcgactgtggcagttcctggcggatggcgaggacgaggatagcgaactcgacttctcgggctccggccggttcgcgctatcgcttgccaggctcaaggagcagaggcatcccttgtgggcccatgcggccgccgctggcgatggtcaaagcggcagggagtggggagttaagaggttgacggccgcaccggcggtgagggatcacagggcggtactgagcgcactggcccgggcgctagctacgacggagtcggcgtacctggacatgaccagtcagtcaatgggatcccacccagagctggcagtgaccggagcttgcctgctcgtggtcctgttgagggatgacgacgtgtatgtaatgaaccttggggatagccgtgccattgtggcgcagcgacgggacgacgaagattgcttgattgggagcattccggtggaggacattggtgtgggcttggagatcgagacaaggatccctgggtattcggcaattgggctcgaggcattgcagctgtcgactgatcatagcacgagcgttgaagaggaagtgcagaggatcagacgcgaacatccagatgatgatcagtgtgttgttaatgatagagtgaaaggtcgtctaacagttacccgtgcatttggtgctgggtatctcaaacaggcaaggttcaatgatgggttgctagagatgtttcgcaatgagtatataggtgataccccatatatatcatgcacacctactctttgccatcataagctctccatcagggatcagtttcttgttctttcgtctgatggcttatatcagtacctaagcaatgaggaggtagtgctgcatgttgagaattttatggagcggtttcctgagggtgatcctgcacagagtttaattgaggagctactctcccgtgctgcaaagaaagctgtctctagatcaattagtggttcttcaagatttctcttccatgagcaatactccactactaacctggagtctgccttttcaggcatggacttctatgaactattagatatacctcaaggggaccgcagaaaataccatgatgacgtcaccattatggttatttctcttgaggggagaatatggaaatcctctggaacatatgtgtgatgttcagctgatatactgtccgtgtcagtatttattccgatgcaatattcagctgaaatgaacttcagccggtcagcactcccaggcgattgcacatatgctcaccaagaggggaaaagtctggcatgacatacagctatgtagtccatacacttgtcgaagtggagttctccagctggggatcatcgctgatccttcacatcagctttgtcacagctcatgctcataggttaactcgggcagattaaagttgcagaaaaatgacagcctggtagggaggaattcctggaaaagcagagccaattttgttctgtttgccactacagctttgtttggttacatactcaccactgacaattttttccacctcacactgagttgtcatagagttgggtgcttattttatccttggaaatagaaaacttttaggtatatgcagctttttctcattcatgtgaggattgagcctgtattatattggaaactagaactgatcatgtcagaaaaatggatgattggcacctcattttgtcctgactcctgaaggtggttctccttcgagtctttgagccgttagtggcatccgtgaaagaaaattttacatttcgcctccactggaaaaacaaagctagtgcctcctagcccttggcaagttatttggttggtcctcagaaaagctaagagctgaaagatattttggaggcaatccatcagtcgttggcgatatttttcatgtgcatggtatatctgtttgtcgatcctgacgatatttaactctcaacatgatgaagaaatttcggttaggc

SEQ ID NO: 51128 - DNA, 1792 bp, Zea Mays
atgggcagcggcgcgtcgcggctgctcaccgcgtgcgcgtgctcgcggccgccgccggcgccagcggacgacgggccgtgcctggacgacgcgctcggccactccttctgctacgccgccagctccgccgccgccgccgccgcgggccattcgtcatccttccgccacgccatctccggcgccgcgctctccgccaactcctcagtgcccgtgccgatctaccaatcctccgtcgccggcggcatgccgccgcagtaccactccgcgttccacacttcctcgtcgttctcctccgcgccgctgcagctatccaacctctcctcggggccgctcttcctctccgggcccatcgaccgcggcgcccagctctccggcccgctcgaccaggccgtgcccttctcgggcccgctccccgcgaagcccaccaagcccgctcgcccctcgtcgtcgcgagggttctcgaggaggttcaggaaaccctcgttcggcagcctgcggcggagcatctcggagaagaaccgaccatgcgtcgtgccgctccgccgggaggacggcgttcagtgggcgcacggccgcgccggggaggacagggtccacgtggttgtctccgaggatcagcgctggcttttcgtcggcatctatgacggcttcaacggccccgaggccccggacttcctggtcgctaatctctaccgcttcctgctgcgcgagctccgtgggatcttctacaaagaggccgatccggaatccaagcgactgtggcagttcctggcggatggcgaggacgaggatagcgaactcgacttctcgggctccggccggttcgcgctatcgcttgccaggctcaaggagcagaggcatcccttgtgggcccatgcggccgccgctggcgatggtcaaagcggcagggagtggggagttaagaggttgacggccgcaccggcggtgagggatcacagggcggtactgagcgcactggcccgggcgctagctacgacggagtcggcgtacctggacatgaccagtcagtcaatgggatcccacccagagctggcagtgaccggagcttgcctgctcgtggtcctgttgagggatgacgacgtgtatgtaatgaaccttggggatagccgtgccattgtggcgcagcgacgggacgacgaagattgcttgattgggagcattccggtggaggacattggtgtgggcttggagatcgagacaaggatccctgggtattcggcaattgggctcgaggcattgcagctgtcgactgatcatagcacgagcgttgaagagtatgtggactggcctgttcaacagcatggttttacaatcggcagaccatttttcttttggagttatgaatttatatatcgtgggatagaagtgcagaggatcagacgcgaacatccagatgatgatcagtgtgttgttaatgatagagtgaaaggtcgtctaacagttacccgtgcatttggtgctgggtatctcaaacaggcaaggttcaatgatgggttgctagagatgtttcgcaatgagtatataggtgataccccatatatatcatgcacacctactctttgccatcataagctctccatcagggatcagtttcttgttctttcgtctgatggcttatatcagtacctaagcaatgaggaggtagtgctgcatgttgagaattttatggagcggtttcctgagggtgatcctgcacagagtttaattgaggagctactctcccgtgctgcaaagaaagctgagaggagattcgaaacgaagaacaccaaag

SEQ ID NO: 51129 - DNA, 1136 bp, Zea Mays
atgtccacaccgccagccaaagatgaagtgggaagactatagaacttgatgatgtcacattccaccagtgtgtcaacttaacaagatttaactcagaaaagacagtcagtttcgtgccacctgacggtgaatttgagttgatgaagtatcgaatcacagagggtgtaaaccttccattccgtgttctgccgacaatcaaggaattgggccgaacacgcatggagatcaacgtgaaagtcaagagtgttttcggtgctaagatgtttgcacttggtgtcgttgttaaggttccagttccgaagcagacagctaagactagtttccaaacaacatcaggcaaagcaaaatacaatgcttcgattgattcactggtgtggaagatcaggaaattccctgggcagactgaggcaactatgagcgcagaggtggagttgatttctactatgggtgaaaagaagtcatggaacagaccacctatccagatggaattccaggttccaatgttcactgcttctggtttacgtgttcgcttccttaaggtttgggagaagagtggttataacactgttgagtgggttcgctacatcacaagggctggatcatatgagataaggtgttagcaacaaatccatacaagatcaagatattattgacaaatgatattcattggtctccattgagcagctatccacagagatcaatctgtggcatcatgcatgatcataaagcgcatatattgtgacacaagtatctgaaactttgtacttcaacagagggtggggcagggcagatcagacaattttctgtgtttcttatttccattgtagtctgggatctctgttcttccctccatgccctgtttgtagtagggattattttttgctcgtatatttggctgtagctttccttgtttgttgatcaatacacctgttcagtttgtattgttttctccctcaaatggatgtatggattcacttgcataacagtgtgaacaaacattcgctgccaaagatctggtacgttgttagtgtttgacaattgtagtgtctgataggaaggtacattgtgcccttaaatattgctgtatataaagtttatttgattgtgatgattgccggttttggcgcttatgagtc

SEQ ID NO: 51130 - DNA, 1876 bp, Zea Mays
tttgtctctttgacacgcagtcacgccctccgcaaaactcccccactccacgcccggccgcacctctcctatcttgctccaagcagcaagttccaactcgagtagattcacttcgccactccgttgccctctcctccgccgcccgatcctttccccgtctgagatggcatctccggcatcggcgtcgcttaaggaagccgtgggcagcctcgaccgcgacggctttgttggtctcctctccaacctcatcggcgagaccgcacacctgcagaacgacccgccgacctacaggcctcaggaggagcgcgtggcgcagcacgtagtcgacgtgctccgcccggtgtccgcggacaccgggggcggccccctccttgtgcggaagataagctacgccgagggcaggagcaacgtcatcgttgaataccccggcaccgtcccaggccgcgttgtctccttcgtcggcatgcacatggacgtcgtccctgccaacggcagcgacgaggataaggacaaacttcggggacgtgggacaaccgactgtcttggacatgtcgcactggtggctcagctaatgcggcggcttggtgaggtcaagccacccctgaaacattctgtcattgctgtgttcattgccaatgaggagaactcatctgtcactggcattggtgttgatggcctcgtgaaggatggattacttgacaagctcaaaacaggacccttgttttggatagatacagctgataagcagccatgcattggcactggtggaatgattccatggcatctcaaggcaacagggaagctgttccacagtggccttgcacataaggccataaatgcaatggagatgaacatggaagcactaaaggtaatccaaaaacggttttacactgacttccctccacatgagaaagagaaggtctataaatttgctactccatctacaatgaagccaactaaatggagctatcctggcggggggcttaatcaaattccgggagaatgcacaatttcaggggatgtaaggttgactcctttctatagcacttcgcatgtcatggagaagttgaaggaatatgtagaggacatcaatgagagatttgaaacagtacttgatactcgtggtcctgtgtccaaatatattcttcctgatgaaaatctacaaggaaggcttgaaatcacttttgatggagatgtgatgaatggggtggcttgcaatctggagtctcgaggctatcatgcattatgcaaagcaaccaaggaaatagttggccacgtggagccatattccatcaccgggagtctacctctaatccgggaattacaggacgagggatttgatgttcaaacagctggatatggcttactgaagacgtaccatgcgaagaacgagtactgtctgttttcagacatggcccagggctttcaggtgtttctgagcatcatttcacagctggaagaagaggtctgagccttcttgatgggatagaccaatactccctccgtttcgttttagttgtcgctggatagtgcaaaattgaactatccagcgacaactaaaaagaaacggagggagtacctccaatttacattactcgttgctcagtgatctgtttaatacctccaatttacatcactggttgctcagttgtctgtttacaactcttttcaagattccgggacacggacatctaacaagccttcgaggttgtctgtcacccgttgaaaacggagccatttcaccgcagtgttctcgtgggcataaaacctttgtgctacaacttggcataaaatctttgtgctacaactctacgtaggcattacaactcgttgtatgaacttgaaattaatatatctcccatttccaaaaaaaaaa

SEQ ID NO: 51131 - DNA, 1593 bp, Zea Mays
cgcagtcacgccctccgcaaaactcccccactccacgcccggccgcacctctcctatcttgctccaagcagcaagttccaactcgagtagattcacttcgccactccgttgccctctcctccgccgcccgatcctttccccgtctgagatggcatctccggcatcggcgtcgcttaaggaagccgtgggcagcctcgaccgcgacggctttgttggtctcctctccaacctcatcggcgagaccgcacacctgcagaacgacccgccgacctacaggcctcaggaggagcgcgtggcgcagcacgtagtcgacgtgctccgcccggtgtccgcggacaccgggggcggccccctccttgtgcggaagataagctacgccgagggcaggagcaacgtcatcgttgaataccccggcaccgtcccaggccgcgttgtctccttcgtcggcatgcacatggacgtcgtccctgccaacggcagcgagtgggactttgatcctttctcactaacctttgatagcgaggataaggacaaacttcggggacgtgggacaaccgactgtcttggacatgtcgcactggtggctcagctaatgcggcggcttggtgaggatggattacttgacaagctcaaaacaggacccttgttttggatagatacagctgataagcagccatgcattggcactggtggaatgattccatggcatctcaaggcaacagggaagctgttccacagtggccttgcacataaggccataaatgcaatggagatgaacatggaagcactaaaggtaatccaaaaacggttttacactgacttccctccacatgagaaagagaaggtctataaatttgctactccatctacaatgaagccaactaaatggagctatcctggcggggggcttaatcaaattccgggagaatgcacaatttcaggggatgtaaggttgactcctttctatagcacttcgcatgtcatggagaagttgaaggaatatgtagaggacatcaatgagagatttgaaacagtacttgatactcgtggtcctgtgtccaaatatattcttcctgatgaaaatctacaaggaaggcttgaaatcacttttgatggagatgtgatgaatggggtggcttgcaatctggagtctcgaggctatcatgcattatgcaaagcaaccaaggaaatagttggccacgtggagccatattccatcaccgggagtctacctctaatccgggaattacaggacgagggatttgatgttcaaacagctggatatggcttactgaagacgtaccatgcgaagaacgagtactgtctgttttcagacatggcccagggctttcaggtgtttctgagcatcatttcacagctggaagaagagattccgggacacggacatctaacaagccttcgaggttgtctgtcacccgttgaaaacggagccatttcaccgcagtgttctcgtgggcataaaacctttgtgctacaacttggcataaaatctttgtgctacaactctacgtaggcattacaactcgttgtatgaacttgaaattaatatatctcccatttccaaaaaaaaaa

SEQ ID NO: 51132 - DNA, 1865 bp, Zea Mays
cgcagtcacgccctccgcaaaactcccccactccacgcccggccgcacctctcctatcttgctccaagcagcaagttccaactcgagtagattcacttcgccactccgttgccctctcctccgccgcccgatcctttccccgtctgagatggcatctccggcatcggcgtcgcttaaggaagccgtgggcagcctcgaccgcgacggctttgttggtctcctctccaacctcatcggcgagaccgcacacctgcagaacgacccgccgacctacaggcctcaggaggagcgcgtggcgcagcacgtagtcgacgtgctccgcccggtgtccgcggacaccgggggcggccccctccttgtgcggaagataagctacgccgagggcaggagcaacgtcatcgttgaataccccggcaccgtcccaggccgcgttgtctccttcgtcggcatgcacatggacgtcgtccctgccaacggcagcgagtggcgaggataaggacaaacttcggggacgtgggacaaccgactgtcttggacatgtcgcactggtggctcagctaatgcggcggcttggtgaggtcaagccacccctgaaacattctgtcattgctgtgttcattgccaatgaggagaactcatctgtcactggcattggtgttgatggcctcgtgaaggatggattacttgacaagctcaaaacaggacccttgttttggatagatacagctgataagcagccatgcattggcactggtggaatgattccatggcatctcaaggcaacagggaagctgttccacagtggccttgcacataaggccataaatgcaatggagatgaacatggaagcactaaaggtaatccaaaaacggttttacactgacttccctccacatgagaaagagaaggtctataaatttgctactccatctacaatgaagccaactaaatggagctatcctggcggggggcttaatcaaattccgggagaatgcacaatttcaggggatgtaaggttgactcctttctatagcacttcgcatgtcatggagaagttgaaggaatatgtagaggacatcaatgagagatttgaaacagtacttgatactcgtggtcctgtgtccaaatatattcttcctgatgaaaatctacaaggaaggcttgaaatcacttttgatggagatgtgatgaatggggtggcttgcaatctggagtctcgaggctatcatgcattatgcaaagcaaccaaggaaatagttggccacgtggagccatattccatcaccgggagtctacctctaatccgggaattacaggacgagggatttgatgttcaaacagctggatatggcttactgaagacgtaccatgcgaagaacgagtactgtctgttttcagacatggcccagggctttcaggtgtttctgagcatcatttcacagctggaagaagaggtctgagccttcttgatgggatagaccaatactccctccgtttcgttttagttgtcgctggatagtgcaaaattgaactatccagcgacaactaaaaagaaacggagggagtacctccaatttacattactcgttgctcagtgatctgtttaatacctccaatttacatcactggttgctcagttgtctgtttacaactcttttcaagattccgggacacggacatctaacaagccttcgaggttgtctgtcacccgttgaaaacggagccatttcaccgcagtgttctcgtgggcataaaacctttgtgctacaacttggcataaaatctttgtgctacaactctacgtaggcattacaactcgttgtatgaacttgaaattaatatatctcccatttccaaaaaaaaaa

SEQ ID NO: 51133 - DNA, 1792 bp, Zea Mays
cgcagtcacgccctccgcaaaactcccccactccacgcccggccgcacctctcctatcttgctccaagcagcaagttccaactcgagtagattcacttcgccactccgttgccctctcctccgccgcccgatcctttccccgtctgagatggcatctccggcatcggcgtcgcttaaggaagccgtgggcagcctcgaccgcgacggctttgttggtctcctctccaacctcatcggcgagaccgcacacctgcagaacgacccgccgacctacaggcctcaggaggagcgcgtggcgcagcacgtagtcgacgtgctccgcccggtgtccgcggacaccgggggcggccccctccttgtgcggaagataagctacgccgagggcaggagcaacgtcatcgttgaataccccggcaccgtcccaggccgcgttgtctccttcgtcggcatgcacatggacgtcgtccctgccaacggcagcgagactttgatcctttctcactaacctttgatagcgaggataaggacaaacttcggggacgtgggacaaccgactgtcttggacatgtcgcactggtggctcagctaatgcggcggcttggatggattacttgacaagctcaaaacaggacccttgttttggatagatacagctgataagcagccatgcattggcactggtggaatgattccatggcatctcaaggcaacagggaagctgttccacagtggccttgcacataaggccataaatgcaatggagatgaacatggaagcactaaaggtaatccaaaaacggttttacactgacttccctccacatgagaaagagaaggtctataaatttgctactccatctacaatgaagccaactaaatggagctatcctggcggggggcttaatcaaattccgggagaatgcacaatttcaggggatgtaaggttgactcctttctatagcacttcgcatgtcatggagaagttgaaggaatatgtagaggacatcaatgagagatttgaaacagtacttgatactcgtggtcctgtgtccaaatatattcttcctgatgaaaatctacaaggaaggcttgaaatcacttttgatggagatgtgatgaatggggtggcttgcaatctggagtctcgaggctatcatgcattatgcaaagcaaccaaggaaatagttggccacgtggagccatattccatcaccgggagtctacctctaatccgggaattacaggacgagggatttgatgttcaaacagctggatatggcttactgaagacgtaccatgcgaagaacgagtactgtctgttttcagacatggcccagggctttcaggtgtttctgagcatcatttcacagctggaagaagaggtctgagccttcttgatgggatagaccaatactccctccgtttcgttttagttgtcgctggatagtgcaaaattgaactatccagcgacaactaaaaagaaacggagggagtacctccaatttacattactcgttgctcagtgatctgtttaatacctccaatttacatcactggttgctcagttgtctgtttacaactcttttcaagattccgggacacggacatctaacaagccttcgaggttgtctgtcacccgttgaaaacggagccatttcaccgcagtgttctcgtgggcataaaacctttgtgctacaacttggcataaaatctttgtgctacaactctacgtaggcattacaactcgttgtatgaacttgaaattaatatatctcccatttccaaaaaaaaaa

SEQ ID NO: 51134 - DNA, 937 bp, Zea Mays
ctgtgtgatttttgtctgtgcttggtggttgcgcgcgcctgcgagtgatactgtgtgctgatgtgcccgtcgttttgtgcctcctttttgagctacgaaccaggaatgaacgaagagaatcttgtatatgtgtgtgtttttcttttgggtagcaatacattttgaggaaaaacacagcaggaacgttgctgttttttttaccttccctttttttaacaagttcagtagctactgaccgaactttcaacgtcatcaaagaagggcatcttgatgaggaatatttgatggactggactcgtaggaggagggaggcgttagcttgcattggtggtatcttttgaagaacaaattggataatttcgtcggaggcatgacccaataatcatgacgagcacgttggtgcttcattcgacatgagatttggacccctcccaaaagatcttgcgtgactcgaaaggcatgtctgtacgtggacttgcttggctggacacggggagagcgccccctgaccctgatgatgatttgtatcgcaccgcgcaccacggaatctgttctaggctgtctaacttggcattagccagtgtggtttttagagccaatctgttcgtgcaccggccgggcaaaagatatcttccccaaaaaaacgcagctactcgtagtactccctacggacgtgtgcacggatttgcacgggacgtgcgggcacggtgcacgcatgcatgccgcgcgcggccgccgaaagaagcgctggtgttgtcatagcttgacgccaccgagcgggtacaccgtacacctgcatttaattgacacattatgttacggccctaggagttacttaaacaggagcaaaggactaatcccagttcccggatcaagctcgagccggaaatttccgtgccgagatgcggaaccccacacaagcacagctcgcgcgcgc

SEQ ID NO: 51135 - DNA, 1569 bp, Zea Mays
cacgacttcaagaccgacatgcggaccccccgatgctgtcccccacacggctcattcccgccccgcacgtgcggcggcagccttatcggtagaccccaagtcgggatcgtctgtgaccctaacgacgtgttgtgcctgttcctactgtgtttctgtgaacaaactgagcacggctgctgctgtctcccgtgccctgtgcgtggatctctggttccacgctcgcgcgtttcggttcgttctccgccggcttctcacttgccacacgtactactactactaggacgaaagggaaggaggaaaaggaaccaaccaaagttaaactgcaggagtaggacggtttatgttgttgctcttcaaccacagaagatccccgcgcaactgctggccacctttgccaatggcactcccgtagatagcttgtaagttgacgcccgctttccccgctccgaaactacacgccgttcagccccttatcacaggctccgacgctccgtgccgttgccccgctctttttcaacagcgacgctggtaacgcactaacgcccgtcccctcacccacccgcgcagaccgcagagagaagagagcgaggcagcctaggaggagcaaccgcgtgagtcgatgaaggcagcggtggccgcggtcgtcgtcggcggcggaggaggcgacgaatggaggtgccggaagcaccctgccgcgagatccggcggcggggtgtgcccccactgcctccgggaccgcctcctccggctctgccccaactgcgcgcacgtgcggccctgcgcctgcgccgcggcgtgcgcctcgccgtcctcctcctcctcggcctccggcgacgcggtcggccgcgtccacagcctcatcgagcgggagcaccggatcgcgcgctccaggtccgtggccacgggctcctccgccgcgctcgccgccccctcggcggcgaccgcgtccgggggcggcaggcggaaggcgcgggtctgggggtggccgccgttctggaagcccgcggcgcgggaggggggcgcggagccaggggaggaggaggacgacgacgaggggatggggctgccgcgctcgagctccgtgtccgccacagcggtggaggccaagagcgcggccgcggcggcgcgggcgcggtgggggtggcacttcccgagcccgctgaaggcgttccggcaccgcaggttgtcggcgagcgtggcggggcgggcgtgagcgaggtgcctcacctccagatgcccggaaagtggttagtgtgggggtcatgtggccgggatcattacctattaatcactagttaactatatcaaggcggtggattagaggaggagcgttcgtgctcctttttctgcttttgcgatcgcgtcgcgtgccgctaattccatgattaagttagacgaaacctggaaagcctgtgatctgggcgtaatgtgtgcatattcgctgctagtgggtgggtgaacccctcatggtctcttggcttttgtagcgtgcttgtactccactctgtagcaacaaattggatgttttgagctctccaatttgatcttatcttgtgttgctgtactacc

SEQ ID NO: 51136 - DNA, 1270 bp, Zea Mays
gttggaatggaaaactctccccctaagggcttgttcggttattcccaatacacatggattggatgggattggaaaaaattgtgaagaagtttgacttgtttgggattcaaactcatccaatcccgctcaatccacatggattgagagctaaccgaacaagccctaactgggttgggggtgcaaaatatataagctacactgaaagtatgcaagtaattacacagggactagccccggaaccctaatagtactctaacagggataactaactgttgacataaaaaaatcatcagctggcgggtatttatcaaaaatacttatgagaaagatcaagtaaggcttcagttaggtgtgtagcaatactctttgatgttaaggattgtagcttaaactactatttaataactggacctatttaatttgatttgttttagacattcaaggcttttagttttgttttggaagttgggcttagggtctatgttaggataaggcttgcaaagtttgttgtctggacataatttcctaatttacaggcccacttcatgaaggaacattgatttcatcgcagagcaacttcaataacctcttttatcctttgctattgttagaaatagagatttttggtgaaaaaaatccctccaacagcttcttttaattagatgtccaactattgccatccaatattcctgcacaagatgtagaggagctgttggagggtgaaaagatacggagagcgttttttagtacttgagggctttcgtgaagatgctggttgccaagttctggagcaaagaggaccattgcaatccgagatggaccagatgtcaggaatcaaacaccctcttggcaacacaaagtaataaacggataatcagcggtgataataccagatgtcatgtctaatcttagttgtgatgacaatttctcgtcttttactttcctttttttctcttggaggagtttattgaaacaaccgctgttgttgtacacttctgatacgggtacataagttctcaaatagttgtagtcacgtcacattcgttgtaaagaagaggggaaaggagaaactggtaacgttgggagtgttgtgcaatgttgaaatgatcgtgttgaattaactgaagctgatcttttttggtttgtacaaaagcagcggtatgagtacagttaggctagtcacagtgaggagtgaggattttatgtctctgtttctaaaaataccacatcagctttatgactgaatgaaacatcctctctcaatagagag

SEQ ID NO: 51137 - DNA, 1150 bp, Zea Mays
gaacaagccctaactgggttgggggtgcaaaatatataagctacactgaaagtatgcaagtaattacacagggactagccccggaaccctaatagtactctaacagggataactaactgttgacataaaaaaatcatcagctggcgggtatttatcaaaaatacttatgagaaagatcaagtaaggcttcagttaggtgtgtagcaatactctttgatgttaaggattgtagcttaaactactatttaataactggacctatttaatttgatttgttttagacattcaaggcttttagttttgttttggaagttgggcttagggtctatgttaggataaggcttgcaaagtttgttgtctggacataatttcctaatttacaggcccacttcatgaaggaacattgatttcatcgcagagcaacttcaataacctcttttatcctttgctattgttagaaatagagatttttggtgaaaaaaatccctccaacagcttcttttaattagatgtccaactattgccatccaatattcctgcacaagatgtagaggagctgttggagggtgaaaagatacggagagcgttttttagtacttgagggagattgtaacttcatttgttgttgacttcagggctttcgtgaagatgctggttgccaagttctggagcaaagaggaccattgcaatccgagatggaccagatgtcaggaatcaaacaccctcttggcaacacaaagtaataaacggataatcagcggtgataataccagatgtcatgtctaatcttagttgtgatgacaatttctcgtcttttactttcctttttttctcttggaggagtttattgaaacaaccgctgttgttgtacacttctgatacgggtacataagttctcaaatagttgtagtcacgtcacattcgttgtaaagaagaggggaaaggagaaactggtaacgttgggagtgttgtgcaatgttgaaatgatcgtgttgaattaactgaagctgatcttttttggtttgtacaaaagcagcggtatgagtacagttaggctagtcacagtgaggagtgaggattttatgtctctgtttctaaaaataccacatcagctttatgactgaatgaaacatcctctctcaatagagag

SEQ ID NO: 51138 - DNA, 956 bp, Zea Mays
tacaatcgagcatctgttactcggtagtcgtgtccatctggagggctacagcagtgactacaccatccaggtgctggtgggctactgtgccgtgtacatattcatgcagacgttcatgatcccagggaccattttcatgtccctgcttgccggggccctctttgggcagctcggtggtctagccctggtgatctttgctgccactgccggtgcttcttcctgttatttcctgtccaagctagtagggaaaccactggtcttctcgttgtggccagacaagctcacgttcttccaaaagcaggttgcaaaaagaagagagaagctgctgaattacatgcttttcctgagagtcactccaacactgcccaatactttcatcaatttttcttcacctatagtgggtgtgccataccatactttcttctttgcgacggccattggcctcgtcccagctgcctatgtgactgtcagggtattccagcttctaatgtacccgttccatcagtcgatagcggtgctgttcctgatcgggcttgtttcggtggcgccaacgttgctgggcaagaacgagaagccaaccagcgcatcggacatggcagctaacaccaactgatcactagtacacgccactccagctctcttctcatgtacatacaaaagtccagcgtttggtagtggtggcttcgagactctggatcaaataggacatgtcgccggccacgaacatggcgagggtcccaatctgtagatctgtcgacacttctgggaaacttttgtgctgactgctgattttgcagaagtgatgtctcatgatcacctcatcgtgaatcttgctggcaaaacgggctgggaacatctctctttcggttgctttgttttacattgtttcgctgttgtatcttgcacacgtcaaccagattcaatcaatacagccgattcagtgattcattcatgaa

SEQ ID NO: 51139 - DNA, 2127 bp, Zea Mays
ctttctttcaattcaaccttagcaacgcccgtcaaagaaaaagcggcgaactcggccaggcggcgaggggccaatctattcgccggatactctaatgtccagcggagccacgtcatcgtcctcgccgccgctggcagaggctggggacggatactgggaggggcgggaggaggcggtggcgcggctgaaggcgatggccgcgagggctcattgggaggacgaactctcggcggagcggttggagaccaacaaccaggtgcaggaggacgagatgctggcactgcaagccatttatggggatgacatggttatcttggaggataaggctggttttcgttcttttcagatttttgtttggtatccaattcctaatggtactaaggtgttcttgaatcttcatccaaatggaactatggttggaactgataatgatgagagcaaagatggtggtgaactcatctatgcttgcagtttaaagcatttgccacctgtggtgttaacatgtttgctgccatgttcatatcccagtgcaagtgctccttattttactatctcagccaagtggttggatgaacccaaagtttcacacctctgtaccatgtttgatgagatttggactgagctgccaggacaagaagtagtgtatagatggctggactggctgaatagctcttcatgggcttgcatttctttgaatgacaacataatactaatcgcagataaaacttcagatgttggagatgcacgtgctattgcaagaaggcttctagttgatcatactattcctcttatgcaaagttacaatgagaggaggtctcatgaaatatttctgaaaagcttacataagtgccgaatttgtcttagtgaaaatactgaattcacgtaacagaagggagtttaaccaagctcacatgccctgatacaacttgctgcagcccacttccaccatcagttttgaaaagcctcctgggagatgattgctataagcgatgggaatcattcgcgttacagaagctcttagatacaatgcctgatctgaacgcaggcatgtggggaaggattgcgttactccagaagaaaagattaggattctgagggaaaaacaccagaaatattccctcccagaaaaacaattgttgaaagaacagagggaaatagatgaattaataagtgtctgcgaagcgcttcgcgattcgaagcaatgtccttcttgcaaaatggctatctcaaagactgaaggatgcaacaagatgatctgtaggaactgcgggaaattcttctgttaccgttgtaaccaggcaattcgtggatatgaacatttttgggatggaaattgcgtgctatttgaacaccagaatcaagtgcaaatatatggacggcttgaggagtccgatgatgaagaacattttgatgatgaagatctagaggagacagagcctgaactggtatggggttgtccttgtccagtgtgtggtcggtggaatggaaagcttgacacaaacaatcatatattgtgcatgggttgccgaggccactattgcgcgttatgccggaggagggtaatgaagagctccgaacactatggaccaagaggttgccaacaacacacggatccgtagtgattcccaatcttgtacagtacagaatctcctttatacatagcattttgccacttccagtgttggcatcgacttgttgagttgtttcccaaaacgagaggcttctcgtggtagggccaatgtgaatttgcaattggaagggtccattgcatttatctaggatcgttgatgtcaacaacagatggttggccatgtaatgaacagggcattttattgaaaatgaccgtgcagattgaagattcagttcgtttatgacgtagccataagcgactactacgtatttcagtctgaaccctgggttttcttgcattctatatttcgagcaccgatagcctgcagcaggttttgaatattgtcgctctctctcgtccagtctctactccctaccttcagtcttcagtcttggcgacacgtgacatgtgccatctagttttgtattggttgttgataaatagtttgtgagatattaaagtcaatgtaatatatgtatcgcttatttttatgtaat

SEQ ID NO: 51140 - DNA, 2135 bp, Zea Mays
gcccgtcaaagaaaaagcggcgaactcggccaggcggcgaggggccaatctattcgccggatactctaatgtccagcggagccacgtcatcgtcctcgccgccgctggcagaggctggggacggatactgggaggggcgggaggaggcggtggcgcggctgaaggcgatggccgcgagggctcattgggaggacgaactctcggcggagcggttggagaccaacaaccaggtgcaggaggacgagatgctggcactgcaagccatttatggggatgacatggttatcttggaggataaggctggttttcgttcttttcagatttttgtttggtatccaattcctaatggtactaaggtgttcttgaatcttcatccaaatggaactatggttggaactgataatgatgagagcaaagatggtggtgaactcatctatgcttgcagtttaaagcatttgccacctgtggtgttaacatgtttgctgccatgttcatatcccagtgcaagtgctccttattttactatctcagccaagtggttggatgaacccaaagtttcacacctctgtaccatgtttgatgagatttggactgagctgccaggacaagaagtagtgtatagatggctggactggctgaatagctcttcatgggcttgcatttctttgaatgacaacataatactaatcgcagataaaacttcagatgttggagatgcacgtgctattgcaagaaggcttctagttgatcatactattcctcttatgcaaagttacaatgagaggaggtctcatgaaatatttctgaaaagcttacataagtgccgaatttgtcttagtgaaaatactgcccacttccaccatcagttttgaaaagcctcctgggagatgattgctataagcgatgggaatcattcgcgttacagaagctcttagatacaatgcctgatctggtatattgtccgaggtgtaatgctgcctgcttggaggatgacaatgatgctcaatgcccagagtgttttttcaccttctgctctttgtgcaaagaacgcaggcatgtggggaaggattgcgttactccagaagaaaagattaggattctgagggaaaaacaccagaaatattccctcccagaaaaacaattgttgaaagaacagagggaaatagatgaattaataagtgtctgcgaagcgcttcgcgattcgaagcaatgtccttcttgcaaaatggctatctcaaagactgaaggatgcaacaagatgatctgtaggaactgcgggaaattcttctgttaccgttgtaaccaggcaattcgtggatatgaacatttttgggatggaaattgcgtgctatttgaacaccagaatcaagtgcaaatatatggacggcttgaggagtccgatgatgaagaacattttgatgatgaagatctagaggagacagagcctgaactggtatggggttgtccttgtccagtgtgtggtcggtggaatggaaagcttgacacaaacaatcatatattgtgcatgggttgccgaggccactattgcgcgttatgccggaggagggtaatgaagagctccgaacactatggaccaagaggttgccaacaacacacggatccgtagtgattcccaatcttgtacagtacagaatctcctttatacatagcattttgccacttccagtgttggcatcgacttgttgagttgtttcccaaaacgagaggcttctcgtggtagggccaatgtgaatttgcaattggaagggtccattgcatttatctaggatcgttgatgtcaacaacagatggttggccatgtaatgaacagggcattttattgaaaatgaccgtgcagattgaagattcagttcgtttatgacgtagccataagcgactactacgtatttcagtctgaaccctgggttttcttgcattctatatttcgagcaccgatagcctgcagcaggttttgaatattgtcgctctctctcgtccagtctctactccctaccttcagtcttcagtcttggcgacacgtgacatgtgccatctagttttgtattggttgttgataaatagtttgtgagatattaaagtcaatgtaatatatgtatcgcttatttttatgtaat

SEQ ID NO: 51141 - DNA, 2340 bp, Zea Mays
gcccgtcaaagaaaaagcggcgaactcggccaggcggcgaggggccaatctattcgccggatactctaatgtccagcggagccacgtcatcgtcctcgccgccgctggcagaggctggggacggatactgggaggggcgggaggaggcggtggcgcggctgaaggcgatggccgcgagggctcattgggaggacgaactctcggcggagcggttggagaccaacaaccaggtgcaggaggacgagatgctggcactgcaagccatttatggggatgacatggttatcttggaggataaggctggttttcgttcttttcagatttttgtttggtatccaattcctaatggtactaaggtgttcttgaatcttcatccaaatggaactatggttggaactgataatgatgagagcaaagatggtggtgaactcatctatgcttgcagtttaaagcatttgccacctgtggtgttaacatgtttgctgccatgttcatatcccagtgcaagtgctccttattttactatctcagccaagtggttggatgaacccaaagtttcacacctctgtaccatgtttgatgagatttggactgagctgccaggacaagaagtagtgtatagatggctggactggctgaatagctcttcatgggcttgcatttctttgaatgacaacataatactaatcgcagataaaacttcagatgttggagatgcacgtgctattgcaagaaggcttctagttgatcatactattcctcttatgcaaagttacaatgagaggaggtctcatgaaatatttctgaaaagcttacataagtgccgaatttgtcttagtgaaaatactgcagtttcaggatctgtagtacaactactcagatgggttctgtagtgacttagctgccttcccatttattctctacaaagcagaaatttcatcaagctcccatgccaccatttgttttgcttgacgtgtatgaagtctcactgcagaattcacgtaacagaagggagtttaaccaagctcacatgccctgatacaacttgctgcagcccacttccaccatcagttttgaaaagcctcctgggagatgattgctataagcgatgggaatcattcgcgttacagaagctcttagatacaatgcctgatctggtatattgtccgaggtgtaatgctgcctgcttggaggatgacaatgatgctcaatgcccagagtgttttttcaccttctgctctttgtgcaaagaacgcaggcatgtggggaaggattgcgttactccagaagaaaagattaggattctgagggaaaaacaccagaaatattccctcccagaaaaacaattgttgaaagaacagagggaaatagatgaattaataagtgtctgcgaagcgcttcgcgattcgaagcaatgtccttcttgcaaaatggctatctcaaagactgaaggatgcaacaagatgatctgtaggaactgcgggaaattcttctgttaccgttgtaaccaggcaattcgtggatatgaacatttttgggatggaaattgcgtgctatttgaacaccagaatcaagtgcaaatatatggacggcttgaggagtccgatgatgaagaacattttgatgatgaagatctagaggagacagagcctgaactggtatggggttgtccttgtccagtgtgtggtcggtggaatggaaagcttgacacaaacaatcatatattgtgcatgggttgccgaggccactattgcgcgttatgccggaggagggtaatgaagagctccgaacactatggaccaagaggttgccaacaacacacggatccgtagtgattcccaatcttgtacagtacagaatctcctttatacatagcattttgccacttccagtgttggcatcgacttgttgagttgtttcccaaaacgagaggcttctcgtggtagggccaatgtgaatttgcaattggaagggtccattgcatttatctaggatcgttgatgtcaacaacagatggttggccatgtaatgaacagggcattttattgaaaatgaccgtgcagattgaagattcagttcgtttatgacgtagccataagcgactactacgtatttcagtctgaaccctgggttttcttgcattctatatttcgagcaccgatagcctgcagcaggttttgaatattgtcgctctctctcgtccagtctctactccctaccttcagtcttcagtcttggcgacacgtgacatgtgccatctagttttgtattggttgttgataaatagtttgtgagatattaaagtcaatgtaatatatgtatcgcttatttttatgtaat

SEQ ID NO: 51142 - DNA, 2181 bp, Zea Mays
gcccgtcaaagaaaaagcggcgaactcggccaggcggcgaggggccaatctattcgccggatactctaatgtccagcggagccacgtcatcgtcctcgccgccgctggcagaggctggggacggatactgggaggggcgggaggaggcggtggcgcggctgaaggcgatggccgcgagggctcattgggaggacgaactctcggcggagcggttggagaccaacaaccaggtgcaggaggacgagatgctggcactgcaagccatttatggggatgacatggttatcttggaggataaggctggttttcgttcttttcagatttttgtttggtatccaattcctaatggtactaaggtgttcttgaatcttcatccaaatggaactatggttggaactgataatgatgagagcaaagatggtggtgaactcatctatgcttgcagtttaaagcatttgccacctgtggtgttaacatgtttgctgccatgttcatatcccagtgcaagtgctccttattttactatctcagccaagtggttggatgaacccaaagtttcacacctctgtaccatgtttgatgagatttggactgagctgccaggacaagaagtagtgtatagatggctggactggctgaatagctcttcatgggcttgcatttctttgaatgacaacataatactaatcgcagataaaacttcagatgttggagatgcacgtgctattgcaagaaggcttctagttgatcatactattcctcttatgcaaagttacaatgagaggaggtctcatgaaatatttctgaaaagcttacataagtgccgaatttgtcttagtgaaaatactgaagggagtttaaccaagctcacatgccctgatacaacttgctgcagcccacttccaccatcagttttgaaaagcctcctgggagatgattgctataagcgatgggaatcattcgcgttacagaagctcttagatacaatgcctgatctggtatattgtccgaggtgtaatgctgcctgcttggaggatgacaatgatgctcaatgcccagagtgttttttcaccttctgctctttgtgcaaagaacgcaggcatgtggggaaggattgcgttactccagaagaaaagattaggattctgagggaaaaacaccagaaatattccctcccagaaaaacaattgttgaaagaacagagggaaatagatgaattaataagtgtctgcgaagcgcttcgcgattcgaagcaatgtccttcttgcaaaatggctatctcaaagactgaaggatgcaacaagatgatctgtaggaactgcgggaaattcttctgttaccgttgtaaccaggcaattcgtggatatgaacatttttgggatggaaattgcgtgctatttgaacaccagaatcaagtgcaaatatatggacggcttgaggagtccgatgatgaagaacattttgatgatgaagatctagaggagacagagcctgaactggtatggggttgtccttgtccagtgtgtggtcggtggaatggaaagcttgacacaaacaatcatatattgtgcatgggttgccgaggccactattgcgcgttatgccggaggagggtaatgaagagctccgaacactatggaccaagaggttgccaacaacacacggatccgtagtgattcccaatcttgtacagtacagaatctcctttatacatagcattttgccacttccagtgttggcatcgacttgttgagttgtttcccaaaacgagaggcttctcgtggtagggccaatgtgaatttgcaattggaagggtccattgcatttatctaggatcgttgatgtcaacaacagatggttggccatgtaatgaacagggcattttattgaaaatgaccgtgcagattgaagattcagttcgtttatgacgtagccataagcgactactacgtatttcagtctgaaccctgggttttcttgcattctatatttcgagcaccgatagcctgcagcaggttttgaatattgtcgctctctctcgtccagtctctactccctaccttcagtcttcagtcttggcgacacgtgacatgtgccatctagttttgtattggttgttgataaatagtttgtgagatattaaagtcaatgtaatatatgtatcgcttatttttatgtaat

SEQ ID NO: 51143 - DNA, 696 bp, Zea Mays
tggtaatggttggcggaaccaccggccgtttatcgtcggcaacgcctgctgctgaattgcttgacacaaacaatcatatattgtgcatgggttgccgaggccactattgcgcgttatgccggaggagggtaatgaagagctccgaacactatggaccaagaggttgccaacaacacacggatccgtagtgattcccaatcttgtacagtacagaatctcctttatacatagcattttgccacttccagtgttggcatcgacttgttgagttgtttcccaaaacgagaggcttctcgtggtagggccaatgtgaatttgcaattggaagggtccattgcatttatctaggatcgttgatgtcaacaacagatggttggccatgtaatgaacagggcattttattgaaaatgaccgtgcagattgaagattcagttcgtttatgacgtagccataagcgactactacgtatttcagtctgaaccctgggttttcttgcattctatatttcgagcaccgatagcctgcagcaggttttgaatattgtcgctctctctcgtccagtctctactccctaccttcagtcttcagtcttggcgacacgtgacatgtgccatctagttttgtattggttgttgataaatagtttgtgagatattaaagtcaatgtaatatatgtatcgcttatttttatgtaat

SEQ ID NO: 51144 - DNA, 614 bp, Zea Mays
ctcgcgcgcattttgctcccggttaggttttcgtaggtggtcggagcaaggagtgacatggctatgtctgggaagtgggaaatgggaacacatgctcctgggccgtaacctaatcatggtcggtcagcccattttctcatagaagcccagtggcctcccctctcatcctttcgctttggaccccggtccccggcggcttcgaaacccgctcgtggcagtgggcgaggcgagcacggcggcggaatgatggcgaagggcggtgctggcagcgggatgatctgggcgacggcggaggatcttgcgcggcgccggccggtggttctgtccctgtatcggcaggtccttcgggcgctaaactcgccggcgctgccgctggggcacgcggcgcggctggcaaagaaggcggaatgccgagccatcttcgtcttcggtgccgaggagaggtcgctccacaacatccgggacctcgtcgaggctgcgcgccacacgcttggcctcctcaaccgcggccgcctcccgtagtgagaagacagaggcttagaagactgggcagacgccatcacccaagtccacccctttggcagtaggacacttggcaagagggcagtgctctc

SEQ ID NO: 51145 - DNA, 2079 bp, Zea Mays
aagcaagccgagatcgttgggccgcccagggcaagagaagcgtcggggttttggctcctgttcaaaatccgcagctcgccgttggacaagtgaggaaaggagagagaaagagaaagagagagagagagacggtcagccatggcggcgaaggcaagggtctcgctgacggctgtgctcgccgccgcggcgtgggcgtgcttatctgtcgtggccgcctccgcattcgacgtcccgaccgtggccttcgaggaggggttctcgccgctgttcggcgacggcaacctcgtccgctcctccgacgacaggagcgtccgcctcctgctcgaccgccggtccggttccgggttcatttcttcggactactacctccatggcttcttcagcgcgtccatcaagctgcccaaggactacacggccggcgtcgtcgtcgccttctacgtgagtgttcgttctctatcgacgctgaaatattttgattccaactcggaacactcctgtccaaaggcaagggaccctttttgtttaccatatttagcgtattcccgccgccgctctttcgaaccgttggttcgtgcttggtcacatggcgtgtcaacacggattcagcatttcagcaaccgccggcgagtcatagcaagagcagtagagggtgctcctgcgcccatgccctgcgccgcagagcaggctacagcgcgtcccacatgggctgcttggactttggagcccagaaaggctgcgccgcctggccccgggaataaatgttccctcttcaggcattcaccccccttgatgattgattattagacgcaccaaaacatagttaatgctactgaattgatagcacccccgtgtttggttaaatttctagtgctactattcacgcgcctctacgccagtgatcgcagtgaatgaatgaatgaatgaatgatgttccagtggtacatggaatatcatccaactgctctgtggttgttcgaggttgcaagcttcagagattccaactaacacatgatgaagttttgaattgccgtgacttttccttacgactctactcaatagagttccccttttcatgctgcagctgtctaacggggacgtgtacgagaagacgcacgacgagctggatttcgagttcctgggaagccggtggggcgggcagtggcgcgtgcagaccaacgtctacggcaatggcagcactagccgcggccgggaggagcgctacctcctccccttcgaccccaccgtcgaggcccacagctactccatcctctgggctcccacccacatcatcttctacgtcgacgacacgccgatccgggaggtgatccggcacccggacatgggcggcgacttcccggcgaagccgatggcggtgtacgccaccatctgggacggctccgcgtgggccacggacgggggcaagtacaaggtcaactacaagtacgcgccgttcgcgtccgacttctcggagctggccgtcgtcggctcccgcgccgacccggtgctccgcgtcccgcgccgggacggcgccgcccaccaggacctcctcgcgctcatgacggccgactacgccgtcgtgacgccgcggaagcgcgcggccatgcgcgcgttcagggcgcggcagatgacgtacacggtgtgctacgacgccgtgcggtacgcggacgggctggcgtgtcaagcagctgacatccttcaaaataatataaatgccagggtctgtcgcgaaagctattggcacaatggttagggatgatggtcgattggtccggtaacgtagtaggtcgattcgttttttatttttatattttttggcgacccatatgcaggctgtaaagctaggtgtagggacggagtactagcagggattaatgcgttatgattctttgattccttgggtggcagctaataaaatgctcattataagtattgtgcaattattgctaatagtattatatgatccaatcattaacataatcagcaaacatgtatgtgagtcatatgaaagctaatacgtcacggcctcacgggtccttctaattcacatgaccatgatcgtgaatcttggttacctatgag

SEQ ID NO: 51146 - DNA, 3649 bp, Zea Mays
cgacgacctgcaaccacaactacccccatccaccggaaaagaaaagaaaaaaaaaagtgcagtccgaacccacattctaataatccgcacattagctgtggcgcggcggttggatcagcgaggcccgaacgccatccgcgtccggcagtacagatcaaggagaccggttctcttgagctggggactgcaaaggatacgtggcttcagtcattgtgctctggatttttagatcaagggaccaatgcctccaggataatggcggggaaggacggagtttctctgaaatctgtgtcatacggggcaaggctgcgcaggagttgtgatgcatcactgagagaggcagggtccatgagagacccattcttgaaacacagagtaaagaaatttgatctatctagcctagattggattgatgagattccagattgccctgtattttctccatcaacccaggagtttgaggatcctctggtttatctcagcaaaattgcccctgtggctgcaaaatatggtatatgcaagatcatttcacctgtctctgcttcagtacctgcgggcactgtactaatgaaggaactaggtgggattaagtttacgaccagagttcagcctctccgtcttgctgaatggaccaaggatgacaagtttgccttctttatgagtggaagaaagtacacatttcgggagttcgagaagatggcaaataaagaatttgtacggagatactctagtgctgcttgtcttccatcaaggtatatggaagaggagttttggcatgaaatagcttttggcaagatggagtctgttgagtatgcatgtgatatcgatggtagcgcattttcttcttcttctcatgaccaacttgggagaagcaaatggaacttgaagagattctcacggttgccgaactctacgctgcgtcttctcagagctgcagttccaggaataacagatccaatgctgtatattgggatgctctttagtatgtttgcctggcatgtggaagatcattacctgtacagtattaactatcaccactgtggagcccccaaaacatggtatggtattccaggaagtgctgcttctgattttgagaaagtggtacgtgagcatgtatatgatcacgaaattttatcaggtgaaggggaaagtgcagcatttgatgttctgttgggaaagactacaatcttcccacctaatattttactggatcatcatgttccagtctatagagccatacagaaacctggagagtttgttgtaacgtttccccgagcttatcattctggtttcagccatggtttcaattgtggtgaggcagtaaattttgctacgggcgaatggtttcctctaggagcagttgccagtcaacattatgcacttcttaagaggataccagtattaccttatgaggagcttctttgtaaagaagcaacattttgtgctaatgagttttccttgtttgaacacggaaatgtaacattaactggaggcacacatatacagagctatatgaagggtccctttgtgcagttgatgcggttccaacaccgtgttcgttggttgcttgtgaaaatgggtgcccgtacatgctataaagcagacattgatgccacagttctctgtgggatatgcaaacgtgactgctatgtagctcacattatgtgtaactgcagagcagatgcaatttgcctttgtcatgaggaagagattagtaagtgttcttgcaactgcgaccgtgttgtttttgtgaggaaagacatctttgaattggaggaaatatcaaagaagtttgaggaaattggaatactggatgaagtaggaaaacaaatgtctcaaaatgatggctataacatgcatccttacttgtccaatggcattgaccacaatgctaaatactttccatactgcaagatcctaattgatacatcccctgaacttcgtaccttttcagaggtagatgttcttggatatgatctgaataagccatatcctacattatcaacaataacttctgcacatggaccccatgagtattctacacaaagtgatgagtgtactagttctaagcaaagaacatactctagctcatgtccagagaatggaacgcttagtgtttatcctttatgtacatctgatcaagcattctcaactgacaaattggctgctcaggatactgatgattctgactgtgaggtatttagagttaagagacgatctagcatagttatggagaaaagatgttcagaagatctaacaataactttaactgagaatcaggtactgttacttttgtgattttgattagtttaactgctccatttaagagtggatgtcacggcagtatatttgtagccaagaatttttaaacttcgacaaataatgactagattggtcatgtgatgttaaatgtcgtgctaagggaggctctagccggacccatgttttccctccttaataaaatgacacgcaaatctcctgcgtagttcgagaaaaaaaggaaagcatggtttgagggagcatgctttaagacggttaaagaaagcctgttcagatgacagacaagagaacgcaactgaatcacattgccttgacttcatttctggaaatacagataatttcatcaatcgaagcaaacaaaaaatgaatgtagatcagctagatgcaaaaaatgtggaagatgaagttgctttcggccagaaatctatcggttgcagttacctgtctccatctgtagatcttgggccgaaacgcttgaaaattcgtggcccatccttcccaagcactgtttctgaagtggaaatatcttataggttccaggaggacattgacttggctagtcagcatactcaatgaagtatgctgctcttggtgctaactgctaacatcaatcgtaacttctggaagatgaaagctcttttttcattggatggttcagaactgattctatctacaggtctccaatggaggcactgttatggctggattttatgattctattgccaggtcataggcgatttttctgatgatccgtagctgcacatcacttatttcctttctttgtaggttttccactgtgaataggttagtctactacttttaacaatttggttcattctttttccaccacagatacacctgtacctagaatgctttaatagatcctcatacgaaatggacattgtacattttttttaacaagtcagtcttttgctcattataatctggaaccatttgcaattcttattcttgttcagttgttggcaccggtacatttgtcctcagatgtgttgataactttgatatgttaataaatcgtttgatgctgacaggaattcacttccactgactgtcatgttgcatatgcaacaaagtagatgctttgtgataatgttgaagcgcatgcaaatgctcgaatcaatcatgttctatagaaagtggatacaacagaaggaataaaggagcaacttcttgctgttagatcctggtctactgaaatctgtcacataagatttactttctcttttaagttcaggatataatatttggttagacaattattttaatttgatcatatgtctggttggttagcaaagtaggcaatttgatttgtcccctaagtagcttctatttgtagaatgaattcgtc

SEQ ID NO: 51147 - DNA, 3066 bp, Zea Mays
accacaactacccccatccaccggaaaagaaaagaaaaaaaaaagtgcagtccgaacccacattctaataatccgcacattagctgtggcgcggcggttggatcagcgaggcccgaacgccatccgcgtccggcagtacagatcaaggagaccggttctcttgagctggggactgcaaaggatacgtggcttcagtcattgtgctctggatttttagatcaagggaccaatgcctccaggataatggcggggaaggacggagtttctctgaaatctgtgtcatacggggcaaggctgcgcaggagttgtgatgcatcactgagagaggcagggtccatgagagacccattcttgaaacacagagtaaagaaatttgatctatctagcctagattggattgatgagattccagattgccctgtattttctccatcaacccaggagtttgaggatcctctggtttatctcagcaaaattgcccctgtggctgcaaaatatggtatatgcaagatcatttcacctgtctctgcttcagtacctgcgggcactgtactaatgaaggaactaggtgggattaagtttacgaccagagttcagcctctccgtcttgctgaatggaccaaggatgacaagtttgccttctttatgagtggaagaaagtacacatttcgggagttcgagaagatggcaaataaagaatttgtacggagatactctagtgctgcttgtcttccatcaaggtatatggaagaggagttttggcatgaaatagcttttggcaagatggagtctgttgagtatgcatgtgatatcgatggtagcgcattttcttcttcttctcatgaccaacttgggagaagcaaatggaacttgaagagattctcacggttgccgaactctacgctgcgtcttctcagagctgcagttccaggaataacagatccaatgctgtatattgggatgctctttagtatgtttgcctggcatgtggaagatcattacctgtacagtattaactatcaccactgtggagcccccaaaacatggtgaaggggaaagtgcagcatttgatgttctgttgggaaagactacaatcttcccacctaatattttactggatcatcatgttccagtctatagagccatacagaaacctggagagtttgttgtaacgtttccccgagcttatcattctggtttcagccatggtttcaattgtggtgaggcagtaaattttgctacgggcgaatggtttcctctaggagcagttgccagtcaacattatgcacttcttaagaggataccagtattaccttatgaggagcttctttgtaaagaagcaacattttgtgctaatgagttttccttgtttgaacacggaaatgtaacattaactggaggcacacatatacagagctatatgaagggtccctttgtgcagttgatgcggttccaacaccgtgttcgttggttgcttgtgaaaatgggtgcccgtacatgctataaagcagacattgatgccacagttctctgtgggatatgcaaacgtgactgctatgtagctcacattatgtgtaactgcagagcagatgcaatttgcctttgtcatgaggaagagattagtaagtgttcttgcaactgcgaccgtgttgtttttgtgaggaaagacatctttgaattggaggaaatatcaaagaagtttgaggaaattggaatactggatgaagtaggaaaacaaatgtctcaaaatgatggctataacatgcatccttacttgtccaatggcattgaccacaatgctaaatactttccatactgcaagatcctaattgatacatcccctgaacttcgtaccttttcagaggtagatgttcttggatatgatctgaataagccatatcctacattatcaacaataacttctgcacatggaccccatgagtattctacacaaagtgatgagtgtactagttctaagcaaagaacatactctagctcatgtccagagaatggaacgcttagtgtttatcctttatgtacatctgatcaagcattctcaactgacaaattggctgctcaggatactgatgattctgactgtgaggtatttagagttaagagacgatctagcatagttatggagaaaagatgttcagaagatctaacaataactttaactgagaatcaggctttaagacggttaaagaaagcctgttcagatgacagacaagagaacgcaactgaatcacattgccttgacttcatttctggaaatacagataatttcatcaatcgaagcaaacaaaaaatgaatgtagatcagctagatgcaaaaaatgtggaagatgaagttgctttcggccagaaatctatcggttgcagttacctgtctccatctgtagatcttgggccgaaacgcttgaaaattcgtggcccatccttcccaagcactgtttctgaagtggaaatatcttataggttccaggaggacattgacttggctagtcagcatactcaatgaagtatgctgctcttggtgctaactgctaacatcaatcgtaacttctggaagatgaaagctcttttttcattggatggttcagaactgattctatctacaggtctccaatggaggcactgttatggctggattttatgattctattgccaggtcataggcgatttttctgatgatccgtagctgcacatcacttatttcctttctttgtaggttttccactgtgaataggaattcacttccactgactgtcatgttgcatatgcaacaaagtagatgctttgtgataatgttgaagcgcatgcaaatgctcgaatcaatcatgttctatagaaagtggatacaacagaaggaataaaggagcaacttcttgctgttagatcctggtctactgaaatctgtcacataagatttactttctcttttaagttcaggatataatatttggttagacaattattttaatttgatcatatgtctggttggttagcaaagtaggcaatttgatttgtcccctaagtagcttctatttgtagaatgaattcgtc

SEQ ID NO: 51148 - DNA, 3314 bp, Zea Mays
accacaactacccccatccaccggaaaagaaaagaaaaaaaaaagtgcagtccgaacccacattctaataatccgcacattagctgtggcgcggcggttggatcagcgaggcccgaacgccatccgcgtccggcagtacagatcaaggagaccggttctcttgagctggggactgcaaaggatacgtggcttcagtcattgtgctctggatttttagatcaagggaccaatgcctccaggataatggcggggaaggacggagtttctctgaaatctgtgtcatacggggcaaggctgcgcaggagttgtgatgcatcactgagagaggcagggtccatgagagacccattcttgaaacacagagtaaagaaatttgatctatctagcctagattggattgatgagattccagattgccctgtattttctccatcaacccaggagtttgaggatcctctggtttatctcagcaaaattgcccctgtggctgcaaaatatggtatatgcaagatcatttcacctgtctctgcttcagtacctgcgggcactgtactaatgaaggaactaggtgggattaagtttacgaccagagttcagcctctccgtcttgctgaatggaccaaggatgacaagtttgccttctttatgagtggaagaaagtacacatttcgggagttcgagaagatggcaaataaagaatttgtacggagatactctagtgctgcttgtcttccatcaaggtatatggaagaggagttttggcatgaaatagcttttggcaagatggagtctgttgagtatgcatgtgatatcgatggtagcgcattttcttcttcttctcatgaccaacttgggagaagcaaatggaacttgaagagattctcacggttgccgaactctacgctgcgtcttctcagagctgcagttccaggaataacagatccaatgctgtatattgggatgctctttagtatgtttgcctggcatgtggaagatcattacctgtacagtattaactatcaccactgtggagcccccaaaacatggtgaaggggaaagtgcagcatttgatgttctgttgggaaagactacaatcttcccacctaatattttactggatcatcatgttccagtctatagagccatacagaaacctggagagtttgttgtaacgtttccccgagcttatcattctggtttcagccatggtttcaattgtggtgaggcagtaaattttgctacgggcgaatggtttcctctaggagcagttgccagtcaacattatgcacttcttaagaggataccagtattaccttatgaggagcttctttgtaaagaagcaacattttgtgctaatgagttttccttgtttgaacacggaaatgtaacattaactggaggcacacatatacagagctatatgaagggtccctttgtgcagttgatgcggttccaacaccgtgttcgttggttgcttgtgaaaatgggtgcccgtacatgctataaagcagacattgatgccacagttctctgtgggatatgcaaacgtgactgctatgtagctcacattatgtgtaactgcagagcagatgcaatttgcctttgtcatgaggaagagattagtaagtgttcttgcaactgcgaccgtgttgtttttgtgaggaaagacatctttgaattggaggaaatatcaaagaagtttgaggaaattggaatactggatgaagtaggaaaacaaatgtctcaaaatgatggctataacatgcatccttacttgtccaatggcattgaccacaatgctaaatactttccatactgcaagatcctaattgatacatcccctgaacttcgtaccttttcagaggtagatgttcttggatatgatctgaataagccatatcctacattatcaacaataacttctgcacatggaccccatgagtattctacacaaagtgatgagtgtactagttctaagcaaagaacatactctagctcatgtccagagaatggaacgcttagtgtttatcctttatgtacatctgatcaagcattctcaactgacaaattggctgctcaggatactgatgattctgactgtgaggtatttagagttaagagacgatctagcatagttatggagaaaagatgttcagaagatctaacaataactttaactgagaatcaggctttaagacggttaaagaaagcctgttcagatgacagacaagagaacgcaactgaatcacattgccttgacttcatttctggaaatacagataatttcatcaatcgaagcaaacaaaaaatgaatgtagatcagctagatgcaaaaaatgtggaagatgaagttgctttcggccagaaatctatcggttgcagttacctgtctccatctgtagatcttgggccgaaacgcttgaaaattcgtggcccatccttcccaagcactgtttctgaagtggaaatatcttataggttccaggaggacattgacttggctagtcagcatactcaatgaagtatgctgctcttggtgctaactgctaacatcaatcgtaacttctggaagatgaaagctcttttttcattggatggttcagaactgattctatctacaggtctccaatggaggcactgttatggctggattttatgattctattgccaggtcataggcgatttttctgatgatccgtagctgcacatcacttatttcctttctttgtaggttttccactgtgaataggttagtctactacttttaacaatttggttcattctttttccaccacagatacacctgtacctagaatgctttaatagatcctcatacgaaatggacattgtacattttttttaacaagtcagtcttttgctcattataatctggaaccatttgcaattcttattcttgttcagttgttggcaccggtacatttgtcctcagatgtgttgataactttgatatgttaataaatcgtttgatgctgacaggaattcacttccactgactgtcatgttgcatatgcaacaaagtagatgctttgtgataatgttgaagcgcatgcaaatgctcgaatcaatcatgttctatagaaagtggatacaacagaaggaataaaggagcaacttcttgctgttagatcctggtctactgaaatctgtcacataagatttactttctcttttaagttcaggatataatatttggttagacaattattttaatttgatcatatgtctggttggttagcaaagtaggcaatttgatttgtcccctaagtagcttctatttgtagaatgaattcgtc

SEQ ID NO: 51149 - DNA, 3364 bp, Zea Mays
agcgaggcccgaacgccatccgcgtccggcagtacagatcaaggagaccggttctcttgagctggggactgcaaaggatacgtggcttcagtcattgtgctctggatttttagatcaagggaccaatgcctccaggataatggcggggaaggacggagtttctctgaaatctgtgtcatacggggcaaggctgcgcaggagttgtgatgcatcactgagagaggcagggtccatgagagacccattcttgaaacacagagtaaagaaatttgatctatctagcctagattggattgatgagattccagattgccctgtattttctccatcaacccaggagtttgaggatcctctggtttatctcagcaaaattgcccctgtggctgcaaaatatggtatatgcaagatcatttcacctgtctctgcttcagtacctgcgggcactgtactaatgaaggaactaggtgggattaagtttacgaccagagttcagcctctccgtcttgctgaatggaccaaggatgacaagtttgccttctttatgagtggaagaaagtacacatttcgggagttcgagaagatggcaaataaagaatttgtacggagatactctagtgctgcttgtcttccatcaaggtatatggaagaggagttttggcatgaaatagcttttggcaagatggagtctgttgagtatgcatgtgatatcgatggtagcgcattttcttcttcttctcatgaccaacttgggagaagcaaatggaacttgaagagattctcacggttgccgaactctacgctgcgtcttctcagagctgcagttccaatccaatgctgtatattgggatgctctttagtatgtttgcctggcatgtggaagatcattacctgtacagtattaactatcaccactgtggagcccccaaaacatggtatggtattccaggaagtgctgcttctgattttgagaaagtggtacgtgagcatgtatatgatcacgaaattttatcaggtgaaggggaaagtgcagcatttgatgttctgttgggaaagactacaatcttcccacctaatattttactggatcatcatgttccagtctatagagccatacagaaacctggagagtttgttgtaacgtttccccgagcttatcattctggtttcagccatggtttcaattgtggtgaggcagtaaattttgctacgggcgaatggtttcctctaggagcagttgccagtcaacattatgcacttcttaagaggataccagtattaccttatgaggagcttctttgtaaagaagcaacattttgtgctaatgagttttccttgtttgaacacggaaatgtaacattaactggaggcacacatatacagagctatatgaagggtccctttgtgcagttgatgcggttccaacaccgtgttcgttggttgcttgtgaaaatgggtgcccgtacatgctataaagcagacattgatgccacagttctctgtgggatatgcaaacgtgactgctatgtagctcacattatgtgtaactgcagagcagatgcaatttgcctttgtcatgaggaagagattagtaagtgttcttgcaactgcgaccgtgttgtttttgtgaggaaagacatctttgaattggaggaaatatcaaagaagtttgaggaaattggaatactggatgaagtaggaaaacaaatgtctcaaaatgatggctataacatgcatccttacttgtccaatggcattgaccacaatgctaaatactttccatactgcaagatcctaattgatacatcccctgaacttcgtaccttttcagaggtagatgttcttggatatgatctgaataagccatatcctacattatcaacaataacttctgcacatggaccccatgagtattctacacaaagtgatgtatgatgcttaccttctctacttctgtttttctgtgtattatttgggcgaattaaaaattttatgttaactttatttttgcaggagtgtactagttctaagcaaagaacatactctagctcatgtccagagaatggaacgcttagtgtttatcctttatgtacatctgatcaagcattctcaactgacaaattggctgctcaggatactgatgattctgactgtgaggtatttagagttaagagacgatctagcatagttatggagaaaagatgttcagaagatctaacaataactttaactgagaatcaggctttaagacggttaaagaaagcctgttcagatgacagacaagagaacgcaactgaatcacattgccttgacttcatttctggaaatacagataatttcatcaatcgaagcaaacaaaaaatgaatgtagatcagctagatgcaaaaaatgtggaagatgaagttgctttcggccagaaatctatcggttgcagttacctgtctccatctgtagatcttgggccgaaacgcttgaaaattcgtggcccatccttcccaagcactgtttctgaagtggaaatatcttataggttccaggaggacattgacttggctagtcagcatactcaatgaagtatgctgctcttggtgctaactgctaacatcaatcgtaacttctggaagatgaaagctcttttttcattggatggttcagaactgattctatctacaggtctccaatggaggcactgttatggctggattttatgattctattgccaggtcataggcgatttttctgatgatccgtagctgcacatcacttatttcctttctttgtaggttttccactgtgaataggttagtctactacttttaacaatttggttcattctttttccaccacagatacacctgtacctagaatgctttaatagatcctcatacgaaatggacattgtacattttttttaacaagtcagtcttttgctcattataatctggaaccatttgcaattcttattcttgttcagttgttggcaccggtacatttgtcctcagatgtgttgataactttgatatgttaataaatcgtttgatgctgacaggaattcacttccactgactgtcatgttgcatatgcaacaaagtagatgctttgtgataatgttgaagcgcatgcaaatgctcgaatcaatcatgttctatagaaagtggatacaacagaaggaataaaggagcaacttcttgctgttagatcctggtctactgaaatctgtcacataagatttactttctcttttaagttcaggatataatatttggttagacaattattttaatttgatcatatgtctggttggttagcaaagtaggcaatttgatttgtcccctaagtagcttctatttgtagaatgaattcgtc

SEQ ID NO: 51150 - DNA, 3723 bp, Zea Mays
cttttttcccttcctctcctttcatcctccgcctctttttcctcctcctgccgctcgccggagcaccgccgcgggcgctccctccttcgccttggtttggttccgacgcctacgcgggatccgtagtctgcgccgttccggagttctggagccacctccgtgcgctcgggagcgcggcgttaccggagcaggggcgggcgcggatcggagcgcgctggggacgccggtagcggccgcctcaggggaatgtgggtccccgtttgaggaggcctcgggccgggaggccgcgccgagatgatacgatcaaggagaccggttctcttgagctggggactgcaaaggatacgtggcttcagtcattgtgctctggatttttagatcaagggaccaatgcctccaggataatggcggggaaggacggagtttctctgaaatctgtgtcatacggggcaaggctgcgcaggagttgtgatgcatcactgagagaggcagggtccatgagagacccattcttgaaacacagagtaaagaaatttgatctatctagcctagattggattgatgagattccagattgccctgtattttctccatcaacccaggagtttgaggatcctctggtttatctcagcaaaattgcccctgtggctgcaaaatatggtatatgcaagatcatttcacctgtctctgcttcagtacctgcgggcactgtactaatgaaggaactaggtgggattaagtttacgaccagagttcagcctctccgtcttgctgaatggaccaaggatgacaagtttgccttctttatgagtggaagaaagtacacatttcgggagttcgagaagatggcaaataaagaatttgtacggagatactctagtgctgcttgtcttccatcaaggtatatggaagaggagttttggcatgaaatagcttttggcaagatggagtctgttgagtatgcatgtgatatcgatggtagcgcattttcttcttcttctcatgaccaacttgggagaagcaaatggaacttgaagagattctcacggttgccgaactctacgctgcgtcttctcagagctgcagttccaggaataacagatccaatgctgtatattgggatgctctttagtatgtttgcctggcatgtggaagatcattacctgtacagtattaactatcaccactgtggagcccccaaaacatggtatggtattccaggaagtgctgcttctgattttgagaaagtggtacgtgagcatgtatatgatcacgaaattttatcaggtgaaggggaaagtgcagcatttgatgttctgttgggaaagactacaatcttcccacctaatattttactggatcatcatgttccagtctatagagccatacagaaacctggagagtttgttgtaacgtttccccgagcttatcattctggtttcagccatggtttcaattgtggtgaggcagtaaattttgctacgggcgaatggtttcctctaggagcagttgccagtcaacattatgcacttcttaagaggataccagtattaccttatgaggagcttctttgtaaagaagcaacattttgtgctaatgagttttccttgtttgaacacggaaatgtaacattaactggaggcacacatatacagagctatatgaagggtccctttgtgcagttgatgcggttccaacaccgtgttcgttggttgcttgtgaaaatgggtgcccgtacatgctataaagcagacattgatgccacagttctctgtgggatatgcaaacgtgactgctatgtagctcacattatgtgtaactgcagagcagatgcaatttgcctttgtcatggtaaggtcgttttgcacttattacagattacagatattgctttatttatgatcatcttgtttacttgtttaccttgttttgaagaggaagagattagtaagtgttcttgcaactgcgaccgtgttgtttttgtgaggaaagacatctttgaattggaggaaatatcaaagaagtttgaggaaattggaatactggatgaagtaggaaaacaaatgtctcaaaatgatggctataacatgcatccttacttgtccaatggcattgaccacaatgctaaatactttccatactgcaagatcctaattgatacatcccctgaacttcgtaccttttcagaggtagatgttcttggatatgatctgaataagccatatcctacattatcaacaataacttctgcacatggaccccatgagtattctacacaaagtgatgtatgatgcttaccttctctacttctgtttttctgtgtattatttgggcgaattaaaaattttatgttaactttatttttgcaggagtgtactagttctaagcaaagaacatactctagctcatgtccagagaatggaacgcttagtgtttatcctttatgtacatctgatcaagcattctcaactgacaaattggctgctcaggatactgatgattctgactgtgaggtatttagagttaagagacgatctagcatagttatggagaaaagatgttcagaagatctaacaataactttaactgagaatcaggctttaagacggttaaagaaagcctgttcagatgacagacaagagaacgcaactgaatcacattgccttgacttcatttctggaaatacagataatttcatcaatcgaagcaaacaaaaaatgaatgtagatcagctagatgcaaaaaatgtggaagatgaagttgctttcggccagaaatctatcggttgcagttacctgtctccatctgtagatcttgggccgaaacgcttgaaaattcgtggcccatccttcccaagcactgtttctgaagtggaaatatcttataggttccaggaggacattgacttggctagtcagcatactcaatgaagtatgctgctcttggtgctaactgctaacatcaatcgtaacttctggaagatgaaagctcttttttcattggatggttcagaactgattctatctacaggtctccaatggaggcactgttatggctggattttatgattctattgccaggtcataggcgatttttctgatgatccgtagctgcacatcacttatttcctttctttgtaggttttccactgtgaataggttagtctactacttttaacaatttggttcattctttttccaccacagatacacctgtacctagaatgctttaatagatcctcatacgaaatggacattgtacattttttttaacaagtcagtcttttgctcattataatctggaaccatttgcaattcttattcttgttcagttgttggcaccggtacatttgtcctcagatgtgttgataactttgatatgttaataaatcgtttgatgctgacaggaattcacttccactgactgtcatgttgcatatgcaacaaagtagatgctttgtgataatgttgaagcgcatgcaaatgctcgaatcaatcatgttctatagaaagtggatacaacagaaggaataaaggagcaacttcttgctgttagatcctggtctactgaaatctgtcacataagatttactttctcttttaagttcaggatataatatttggttagacaattattttaatttgatcatatgtctggttggttagcaaagtaggcaatttgatttgtcccctaagtagcttctatttgtagaatgaattcgtc

SEQ ID NO: 51151 - DNA, 1194 bp, Zea Mays
catgggcctactgatgggcacaaacacgggctggccttctggttgcggatgggcgtctgcagctgtgctgttcctttttcctctggtgagacttcgcgattcgtgaatgcgcctttccgttccaagagaaggaagagaagccgcagcctccgcgagggcgagacagctcggcggcgtggttcggggatgggcaagggcgccgaactgtgggacgactccgcgctggtggacgccttcgaccgcgccatgttcagcatgaaagaaatgcattgcaagagcaagcgagcaacgccaagcgaggatgggaagaccgaacttgctgctgctactgcagaagaggagccaattactgctggagcagcggatgtgtgcggagaggaagatgccaactgtgacagcacacactgtgatctgtcagagttacaacaacagccctatgaagacagacagacaattgagcatgctcctcttcaagaaactgatccaggcaaagagacacatgtttcagaggctaagacgctctccaccgatgcttctactaatgctggtggaaattggagctcaagccagcaaactgggcagtacaatgaattgctgagacaatactatgaacttgaggagaagagtcggaacattcttgagcaactccaacaaacaaactattcaaattatcaagcatcaggatatgcttctacggcccaacagcagcaagttcctgtctatagtgccacagtaccagatccttactcttccaccactcaatcctcatgctgcaattggaacgttcccctggtatctgtctcctgctgttcagcaggccaaccaagtggaggctctgcttgtacgccacctactgctggctgcagcgtatcattgacttgtgatcaatgcccaggtgcaactactgcataccctagtgtttcaaacttcatgcaggtcccaacgatggtatctaccaatgatgatcaagttgataaggctgcaatgatgactgctgaagctgcctttaattttatgagaagtacgatatctggacagcctagcacacaaggaagcaaatctgatactggaaaggaggaaagcacaaatatgggcatgaacccaaatcttgacagtgatcttgctgctctcttaaattcatggtatgctgctgggttctacacttgcagcatcatgaatctgaaatgtctgttc

SEQ ID NO: 51152 - DNA, 1341 bp, Zea Mays
catgggcctactgatgggcacaaacacgggctggccttctggttgcggatgggcgtctgcagctgtgctgttcctttttcctctggtgagacttcgcgattcgtgaatgcgcctttccgttccaagagaaggaagagaagccgcagcctccgcgagggcgagacagctcggcggcgtggttcggggatgggcaagggcgccgaactgtgggacgactccgcgctggtggacgccttcgaccgcgccatgttcagcatgaaagaaatgcattgcaagagcaagcgagcaacgccaagcgaggatgggaagaccgaacttgctgctgctactgcagaagaggagccaattactgctggagcagcggatgtgtgcggagaggaagatgccaactgtgacagcacacactgtgatctgtcagagttacaacaacagccctatgaagacagacagacaattgagcatgctcctcttcaagaaactgatccaggcaaagagacacatgtttcagaggctaagacgctctccaccgatgcttctactaatgctggtggaaattggagctcaagccagcaaactgggcagtacaatgaattgctgagacaatactatgaacttgaggagaagagtcggaacattcttgagcaactccaacaaacaaactattcaaattatcaagcatcaggatatgcttctacggcccaacagcagcaagttcctgtctatagtgccacagtaccagatccttactcttccaccactcaatcctcatgctgcaattggaacgttcccctggtatctgtctcctgctgttcagcaggccaaccaagtggaggctctgcttgtacgccacctactgctggctgcagcgtatcattgacttgtgatcaatgcccaggtgcaactactgcataccctagtgtttcaaacttcatgcaggtcccaacgatggtatctaccaatgatgatcaagttgataaggctgcaatgatgactgctgaagctgcctttaattttatgagaagtacgatatctggacagcctagcacacaaggaagcaaatctgatactggaaaggaggaaagcacaaatatgggcatgaacccaaatcttgacagtgatcttgctgctctcttaaattcatggtatgctgctgggttctacacttgcaggtacctcatgctgcaatctacaaagaattccagaccgtagtgtagtaggccatggccgtcttgagatagatgtccgagaagaagcaggttgaagcatcgctgggtgccttcatgctggtttcggcaggataacatttgtgctaacacgagtagattcgcttattcccgttcc

SEQ ID NO: 51153 - DNA, 1608 bp, Zea Mays
ctagaagcaataaccggggtggcagaaaagaggccgcaactgcaaggcaccgcaggagagaagaagatcaccagcaacaccaagcaactactcgtacgcggaaagagaaacccagaagccggtcttgttggattattccgttcgtcagttccgtccggagcggcggagcaaaaatgagtgacaacctgatggacaaggttagcgcctttggtgagcgcttgaagatcaccgggacagaagtcagcaaaaagatgactgccggaatgagctccatgagtttcaagatgaaggagttgttccaggggcagactccagctgacaagattgttgagggtgccacctcagaggatctggacgggcctgactggaactcaaacttggagatttgcgacatgatcaacacagagaaggttgacagtgtggaactcatccgtgggatcaagaagaggatcatgctgaaggatgcgagggtccagtacctctccttggtcctgcttgagaccattgtcaagaactgtgacaaggccttctcggaagttgcggccgagcgggttcttgatgagatggtcaggttgattgatgatcctcaaaccgtggttaataacaggaacaaggcccttatgctcattgaagcatggggggagtctggtgatgaactccgttatctgccagtctatgaggaaacatacaagagcttgaaatcaagaggagtgcggtttcctggacgtgacaatgagagcttggctcctatatttactcccgcgcgatcagttgctgaagctgatgttgatgcaagcttgccccagcaggtgttcgaggacgtccatgttcatacatatactgctgaagaaacaaaagaagcatttgatgtagctcgtaacagcgtagaacttctttcaactgttctttcctcttctcctgagcaggatgctttgcaggatgacttgacaaccactcttgtgcaacaatgctaccaatctcagcacactatccagatgattattgagaccgttggagacaatgaagctgtgctctttgaggccttgagcgtgaacgatgagatccagaaagtattatcgaagtacgaggagatgaagcagcccagggcctccgagcatgcagaacatgtaccagttgtcataccgattgctgcggagcatgaagatttgaatgctgttggcaatgaagacgcccttgtcagaaaaccagctgccgcgagagcaacgtcaggtggagatgatgacatccttgatgatctcgacgagatgatatttggcaagaagggaggtagcagctcccaggaaggtccgaaaaagccagatccgaagaaggatgacctgatcagcttttaattacctttccataatcgcagccagtacttgctattgtctggtgctgtacccactcggtagattgaagatttttattcgcatacgattcataccggtttgttcagttaagtcgctacactttgtcaatcttgtttcatggctgggtcccatgaccatgaatgtattgtattggatggtggattatgcgagacggcgggaaagtgtccaatcctgtgaactgtgatactatgaggacaactgtgacggcacacttggg

SEQ ID NO: 51154 - DNA, 1612 bp, Zea Mays
aaccggggtggcagaaaagaggccgcaactgcaaggcaccgcaggagagaagaagatcaccagcaacaccaagcaactactcgtacgcggaaagagaaacccagaagccggtcttgttggattattccgttcgtcagttccgtccggagcggcggaggctctgttggtggtgcaaaaatgagtgacaacctgatggacaaggttagcgcctttggtgagcgcttgaagatcaccgggacagaagtcagcaaaaagatgactgccggaatgagctccatgagtttcaagatgaaggagttgttccaggggcagactccagctgacaagattgttgagggtgccacctcagaggatctggacgggcctgactggaactcaaacttggagatttgcgacatgatcaacacagagaaggttgacagtgtggaactcatccgtgggatcaagaagaggatcatgctgaaggatgcgagggtccagtacctctccttggtcctgcttgagaccattgtcaagaactgtgacaaggccttctcggaagttgcggccgagcgggttcttgatgagatggtcaggttgattgatgatcctcaaaccgtggttaataacaggaacaaggcccttatgctcattgaagcatggggggagtctggtgatgaactccgttatctgccagtctatgaggaaacatacaagagcttgaaatcaagaggagtgcggtttcctggacgtgacaatgagagcttggctcctatatttactcccgcgcgatcagttgctgaagctgatgttgatgcaagcttgccccagcaggtgttcgaggacgtccatgttcatacatatactgctgaagaaacaaaagaagcatttgatgtagctcgtaacagcgtagaacttctttcaactgttctttcctcttctcctgagcaggatgctttgcaggatgacttgacaaccactcttgtgcaacaatgctaccaatctcagcacactatccagatgattattgagaccgttggagacaatgaagctgtgctctttgaggccttgagcgtgaacgatgagatccagaaagtattatcgaagtacgaggagatgaagcagcccagggcctccgagcatgcagaacatgtaccagttgtcataccgattgctgcggagcatgaagatttgaatgctgttggcaatgaagacgcccttgtcagaaaaccagctgccgcgagagcaacgtcaggtggagatgatgacatccttgatgatctcgacgagatgatatttggcaagaagggaggtagcagctcccaggaaggtccgaaaaagccagatccgaagaaggatgacctgatcagcttttaattacctttccataatcgcagccagtacttgctattgtctggtgctgtacccactcggtagattgaagatttttattcgcatacgattcataccggtttgttcagttaagtcgctacactttgtcaatcttgtttcatggctgggtcccatgaccatgaatgtattgtattggatggtggattatgcgagacggcgggaaagtgtccaatcctgtgaactgtgatactatgaggacaactgtgacggcacacttggg

SEQ ID NO: 51155 - DNA, 1534 bp, Zea Mays
gtttgctttgcggatttgctaattgaaactatgtagacgctcgaacaaaaatgagtgacaacctgatggacaaggttagcgcctttggtgagcgcttgaagatcaccgggacagaagtcagcaaaaagatgactgccggaatgagctccatgagtttcaagatgaaggagttgttccaggggcagactccagctgacaagattgttgagggtgccacctcagaggatctggacgggcctgactggaactcaaacttggagatttgcgacatgatcaacacagagaaggttgacagtgtggaactcatccgtgggatcaagaagaggatcatgctgaaggatgcgagggtccagtacctctccttggtcctgcttgagaccattgtcaagaactgtgacaaggccttctcggaagttgcggccgagcgggttcttgatgagatggtcaggttgattgatgatcctcaaaccgtggttaataacaggaacaaggcccttatgctcattgaagcatggggggagtctggtgatgaactccgttatctgccagtctatgaggaaacatacaagagcttgaaatcaagaggagtgcggtttcctggacgtgacaatgagagcttggctcctatatttactcccgcgcgatcagttgctgaagctgatgttgatgcaagcttgccccagcaggtgttcgaggacgtccatgttcatacatatactgctgaagaaacaaaagaagcatttgatgtagctcgtaacagcgtagaacttctttcaactgttctttcctcttctcctgagcaggatgctttgcaggatgacttgacaaccactcttgtgcaacaatgctaccaatctcagcacactatccagatgattattgagaccgttggagacaatgaagctgtgctctttgaggccttgagcgtgaacgatgagatccagaaagtattatcgaagtacgaggagatgaagcagcccagggcctccgagcatgcagaacatgtaccagttgtcataccgattgctgcggagcatgaagatttgaatgctgttggcaatgaagacgcccttgtcagaaaaccagctgccgcgagagcaacgtcaggtggagatgatgacatccttgatgatctcgacgagatgatatttggcaagaagggaggtagcagctcccaggaaggtccgaaaaagccagatccgaagaaggatgacctgatcagcttttaattacctttccataatcgcagccagtacttgctattgtctggtgctgtacccactcggtagattgaagatttttattcgcatacgattcataccggtttgttcagttaagtcgctacactttgtcaatcttgtttcatggctgggtcccatgaccatgaatgtattgtattggatggtggattatgcgagacggcgggaaagtgtccaatgtgggtgaatctttattcttcgctacagtagccattttttttaaactcatatcttatgcttcggctaatcaagtagatctcttataatgccgcata

SEQ ID NO: 51156 - DNA, 2591 bp, Zea Mays
acaaacactcgcatctcctaccgcggttttgatcgagaggacggccagccagccagccttaaaccctacccgcccaaacccacacgactcacgaccatggccgccgccgccgccgctaaggcagcggccgcggccgtctccgcgggggccgcctttgtgctctcctccgagcgggcccacgccgacgggggcggctccaccttccgcttccccggcttctactcctccgccccctccccggccccggccccggcccctgcccccgccgcgccgccgcctcaggagtccaatgccccggaggaggcgccgaaggtttcgactcagcaccctcgcactagtgcggcgggcttcgatcccgcgccgctggagcgtggggtggaggcgattaacaagctcaagcaggcgtcggaccccaaaaagctgttcgagtttatgaagaagcaggaggagactcaccagcaggaaatagctgcgaagaaactcgagttgcagaaggcactggccgagatcgagcttgagcaaaaacgggtggattttgaagaaaggaaaaaacttgatcaacaacgagctaaaattaagtcgcagatggctcaatacgaggatgagctaaaaaggaagcgactgcaggctgaacatgaggcgcagaggttaaggaaccaggagcttgtgaagatgcaagaggaatctgggattaggctagagcagatcaggcgggcgactgaggagcaaatccaggaacaacggagacagacagagagacatagggctgatctagagcaggcgaccatttcaaagaaagccatggcagaggcggaggggagaatactagtaacaaggcaaactgaagatgtgaagagacgattgattttggaggagataaatgctgacagagagaagtggatccaagtgataaatacaacatttgagcatataggaggtggtttgcgaacgatattaaccgaccaaaataagctagtggtagcagttggaggggtaacagcacttgctgcagggatatacacaacaagttgctgaattaaactgctgctgtaccaatgcatttatttcaaatgatgcatgaggaatctgcacaaatgaacataagctttctgttgatttttttggagggagggtgcaagagtagtctggggctatgttgatcgtatcctgggtcagccatcactgataagggagtcatcacgtgggaaatatccctggtctggtttcctctcacgtgctacaagtaccctgactagcaaactgaagaatggaagcaacctagggaaggacagaaatgggtttggtgatgttattctaaatccttctctccagaagagagtgaagcagcttgctaatgccacggccaatacaaaacttcatcaagctcctttcaggaacatgcttttctatgggcctcctggcacagggaaaaccatggcagcacgagaacttgctcgcaattctggattagattatgcactaatgactggtggagatgttgcaccattgggatcacaagcagtcaccaagattcatcagttgtttgactgggcgaagaaatctaacaggggtttgcttctcttcatagatgaagcagatgctttcttgtgcgaacggaacaaaacttacatgagtgaagctcaaaggagtgccctgaatgctctcctcttccgcacaggtgaccaatccaaggacattgtccttgcacttgccaccaacagacccggtgatcttgactctgctgttgctgaccgtattgatgaggtcctggaatttcccctgcctggggaagatgagcgattcaagctcctgaagctatatctggacaagtacataatcaaagctggtgacaaacatgagaagagctggctccagttcttccgtcgccagccccagaagattgaggtgaaaggcatcactgatgacctgatccgggaggcggcatccaggacccagggcttctctggaagagagatagcgaagatgatggcaagcgtccaggccgctgtctatgggagcaaggactgcgagctcaccccaggcctgttccgtgaggttgtggactacaaggtcgctgagcacaagcagcggagaagattagccggtgaggagccaaagcaggatgcctagtttaccaatttttttgattcacccccattttgccgtgggatgtactgtgtttcccccccgggatagattgcttcatcgggcaggcgttttgcatgccccgtgttattcttttgttccatttgccttaccaggttggtctaaggtggtaggcgatggtaacttttttggtataagagatgagggttgcatgtggcatgtgatggaaactttggcgacaggtcacacacacacccagcaagctggccccgttttgatgcattatactgtttggtcagtcttctatcttcttactgatgctcgtcataaaatagtctgatttactgacaataatcgacagtgagccagtggctataatggtgttggcattgttttgcagctcttgtagatgtgtcgtacctactgatgctcgtcacaataagttagaacctttaaataattttagttaaaaaaacaaatataaa

SEQ ID NO: 51157 - DNA, 2011 bp, Zea Mays
cttggctgtctgcaacacagatgttggtgtgcaatgagcaaaaacgggtggattttgaagaaaggaaaaaacttgatcaacaacgagctaaaattaagtcgcagatggctcaatacgaggatgagctaaaaaggaagcgactgcaggctgaacatgaggcgcagaggttaaggaaccaggagcttgtgaagatgcaagaggaatctgggattaggctagagcagatcaggcgggcgactgaggagcaaatccaggaacaacggagacagacagagagacatagggctgatctagagcaggcgaccatttcaaagaaagccatggcagaggcggaggggagaatactagtaacaaggcaaactgaagatgtgaagagacgattgattttggaggagataaatgctgacagagagaagtggatccaagtgataaatacaacatttgagcatataggaggtggtttgcgaacgatattaaccgaccaaaataagctagtggtagcagttggaggggtaacagcacttgctgcagggatatacacaacaagggagggtgcaagagtagtctggggctatgttgatcgtatcctgggtcagccatcactgataagggagtcatcacgtgggaaatatccctggtctggtttcctctcacgtgctacaagtaccctgactagcaaactgaagaatggaagcaacctagggaaggacagaaatgggtttggtgatgttattctaaatccttctctccagaagagagtgaagcagcttgctaatgccacggccaatacaaaacttcatcaagctcctttcaggaacatgcttttctatgggcctcctggcacagggaaaaccatggcagcacgagaacttgctcgcaattctggattagattatgcactaatgactggtggagatgttgcaccattgggatcacaagcagtcaccaagattcatcagttgtttgactgggcgaagaaatctaacaggggtttgcttctcttcatagatgaagcagatgctttcttgtgcgaacggaacaaaacttacatgagtgaagctcaaaggagtgccctgaatgctctcctcttccgcacaggtgaccaatccaaggacattgtccttgcacttgccaccaacagacccggtgatcttgactctgctgttgctgaccgtattgatgaggtcctggaatttcccctgcctggggaagatgagcgattcaagctcctgaagctatatctggacaagtacataatcaaagctggtgacaaacatgagaagagctggctccagttcttccgtcgccagccccagaagattgaggtgaaaggcatcactgatgacctgatccgggaggcggcatccaggacccagggcttctctggaagagagatagcgaagatgatggcaagcgtccaggccgctgtctatgggagcaaggactgcgagctcaccccaggcctgttccgtgaggttgtggactacaaggtcgctgagcacaagcagcggagaagattagccggtgaggagccaaagcaggatgcctagtttaccaatttttttgattcacccccattttgccgtgggatgtactgtgtttcccccccgggatagattgcttcatcgggcaggcgttttgcatgccccgtgttattcttttgttccatttgccttaccaggttggtctaaggtggtaggcgatggtaacttttttggtataagagatgagggttgcatgtggcatgtgatggaaactttggcgacaggtcacacacacacccagcaagctggccccgttttgatgcattatactgtttggtcagtcttctatcttcttactgatgctcgtcataaaatagtctgatttactgacaataatcgacagtgagccagtggctataatggtgttggcattgttttgcagctcttgtagatgtgtcgtacctactgatgctcgtcacaataagttagaacctttaaataattttagttaaaaaaacaaatataaa

SEQ ID NO: 51158 - DNA, 1505 bp, Zea Mays
ggaaatgtagatgatagattttttttttcagaggagagtgtagagtactcaaaaccggaagcgactccggtagtcggtctcggtcagtccactccactccactccactccaccacgcctgacccgcccactctaccttcttccctcttcagtctcctcgcgccaacgaccacatcccaccgaacaccgatcaaggtaaacctgttcgctgctccgccagaagccgaggtcgagctgttcacggcagcgagcatgcaccacgatcccaaccccttcgacgagggcgccgacgagaaccccttctcgaatggaggcggaggagcgcgtggcggaggcgtcaagccgcagtacgggttccggccgacggagcccgcggggttcggcggcggcaggggcgatgcgaccaccgacatccctctggacaccatgaacgattcgaagggcaaggcgaaggagctgtctcagtgggagtcagatctcaggaggagggagtcggatatcaggaggagggaggaagctctcaagagcgctggggtgcccatggaggacaagaactggccgcctttcttcccaatcatccaccatgatattgccaatgagataccagcaaacgctcagaagttgcagtatcttgcgtttgcgagctggcttggtattgtgctttgcctcttttggaattttattgctgtcatagtctgttggatcagagggggagattctaaactatttttcctggctaccatctatggtatgcttggcatccctttgtcctacttgatgtggtatagacctctgtaccgagcaatgagaactgacagtgctttcagctttggatggtttttcctttgttacctgctccatattggtttttgcatatttgctgccattgctcctgcagttgtattccgtggaaaatcattaacgggtatactggcagcgatcgacaccttttctgatcatgcaatagttgggatcttttactttgtcggatttgccttgttttgcttggagacacttgtgagcatatgggttcttcagaaagtatacatgtacttcagagggcacaagtaggctatggaagcacttgcaatagtcaaccaactaccatctcatctgattgccatgtggttttgtatgttaggacaacgtatatttttccgtttgcattgtggagggtaagtacgactatatgtataattttcggtttgcatggtggagggtaaatacgactatattgtagcgtctctctcgactgatctgtttttaaccccaattctttgctcatatacaaattgtgctttgtatgcaagaaaataaacatgtaatatagaaataggttttttttaccgagaataagcaatagattaagggggtgtttgatttctagagactaatatttagtcccttcattttattcctttttagtgtataaattgctaaatatagaaactaaaataaagttttagtttctatatttggtaattttggaactaaaatagaataaaa

SEQ ID NO: 51159 - DNA, 1039 bp, Zea Mays
ttttttcagaggagagtgtagagtactcaaaaccggaagcgactccggtagtcggtctcggtcagtccactccactccactccactccaccacgcctgacccgcccactctaccttcttccctcttcagtctcctcgcgccaacgaccacatcccaccgaacaccgatcaaggtaaacctgttcgctgctccgccagaagccgaggtcgagctgttcacggcagcgagcatgcaccacgatcccaaccccttcgacgagggcgccgacgagaaccccttctcgaatggaggcggaggagcgcgtggcggaggcgtcaagccgcagtacgggttccggccgacggagcccgcggggttcggcggcggcaggggcgatgcgaccaccgacatccctctggacaccatgaacgattcgaagggcaaggcgaaggagctgtctcagtgggagtcagatctcaggaggagggagtcggatatcaggaggagggaggaagctctcaagagcgctggggtgcccatggaggacaagaactggccgcctttcttcccaatcatccaccatgatattgccaatgagataccagcaaacgctcagaagttgcagtatcttgcgtttgcgagctggcttggtattgtgctttgcctcttttggaattttattgctgtcatagtctgttggatcagagggggagattctaaactatttttcctggctaccatctatggtatgcttggcatccctttgtcctacttgatgtggtatagacctctgtaccgagcaatgagaactgacagtgctttcagctttggatggtttttcctttgttacctgctccatattggtttttgcatatttgctgccattgctcctgcagttgtattccgtggaaaatcattaacgggtatactggcagcgatcgacaccttttctgatcatgcaatagttgggatcttttactttgtcggatttgccttgttttgcttggagacacttgtgagcatatgggttcttcagatacatatgttgtaaaaaaataaa

SEQ ID NO: 51160 - DNA, 1369 bp, Zea Mays
ttttttcagaggagagtgtagagtactcaaaaccggaagcgactccggtagtcggtctcggtcagtccactccactccactccactccaccacgcctgacccgcccactctaccttcttccctcttcagtctcctcgcgccaacgaccacatcccaccgaacaccgatcaaggtaaacctgttcgctgctccgccagaagccgaggtcgagctgttcacggcagcgagcatgcaccacgatcccaaccccttcgacgagggcgccgacgagaaccccttctcgaatggaggcggaggagcgcgtggcggaggcgtcaagccgcagtacgggttccggccgacggagcccgcggggttcggcggcggcaggggcgatgcgaccaccgacatccctctggacaccatgaacgattcgaagggcaaggcgaaggagctgtctcagtgggagtcagatctcaggaggagggagtcggatatcaggaggagggaggaagctctcaagagcgctggggtgcccatggaggacaagaactggccgcctttcttcccaatcatccaccatgatattgccaatgagataccagcaaacgctcagaagttgcagtatcttgcgtttgcgagctggcttggtattgtgctttgcctcttttggaattttattgctgtcatagtctgttggatcagagggggagattctaaactatttttcctggctaccatctatggtatgcttggcatccctttgtcctacttgatgtggtatagacctctgtaccgagcaatgaggggtatactggcagcgatcgacaccttttctgatcatgcaatagttgggatcttttactttgtcggatttgccttgttttgcttggagacacttgtgagcatatgggttcttcagaaagtatacatgtacttcagagggcacaagtaggctatggaagcacttgcaatagtcaaccaactaccatctcatctgattgccatgtggttttgtatgttaggacaacgtatatttttccgtttgcattgtggagggtaagtacgactatatgtataattttcggtttgcatggtggagggtaaatacgactatattgtagcgtctctctcgactgatctgtttttaaccccaattctttgctcatatacaaattgtgctttgtatgcaagaaaataaacatgtaatatagaaataggttttttttaccgagaataagcaatagattaagggggtgtttgatttctagagactaatatttagtcccttcattttattcctttttagtgtataaattgctaaatatagaaactaaaataaagttttagtttctatatttggtaattttggaactaaaatagaataaaa

SEQ ID NO: 51161 - DNA, 880 bp, Zea Mays
caggaaccttcttcttcactggaccgatgcaagttgttccccaaatccactgtcgcgcgcccttgccgctcaatctccgctcacattcaccaagaagcacttctgtcccccccaccgccccctcaaaaccccctgttggcgctgcatccacgttcacgtcgcttgaggaggtgagcactcggatctagctaggtgccgcaagcgagaccatgccatgttccatctccacgcacttttctcgtgagcacgctctgccatcccgcctcctcctagtaacgcgttgctcaaggttactggatctggtgagtcaccgttcagagttgggttcctgttcctggggcgcttcttcttacgttcgcaggtggagcgtccgtggaggaggcggcggggtattgatggaagtggtacccttgatggatagcaagggaagaaaacttgacggttaatcctcaaagatggtggagtggctctatcttggagacttcgaagatggagaatcttggaagaacaatcaaaaggatggaaacacctttccacagtggtagcgccagaacagccgtcgacggcttcaagctcctacgtgtgtttccggcgtttggttgttgcgtctgtaccctgctggactcagccgacgggatacctaggacctaaatggatgttctgagagttgtagtcggtgggctgctgtagactcgtagccggcgggctgctgtgagactcgtggacttatttgggcaaaactgatttgtaactcacgtgtgtatggatctggtcgatgtgggattttttgggcaaaatatatttcaacgtgacatgtatgggtctagacatatatggatctagacattatattatttattatatttattcttcatcgttt

SEQ ID NO: 51162 - DNA, 2078 bp, Zea Mays
cctccctctcctcctgctctaccccgcccttctctctctcctctcttctgtcctctttctctcgtgtcctagtaaagaaaagacagtttgattgcacagctagcccaccgctcatatcatccgcctcccctcgccccccctctctctctctctctcactcacaaacaaacaaacaaacaagcctggatcgagcgaattcagccgagcttcagaaacccttgcaagctcgtagcaacttctctcaaccttattcggctttcttctagctatataacgaccctaaattagtctgcttcattcggttcttgcgaattgccaagaccgaaagaacagcttattactcttctgttagaaagactcgaagaggccggccgagatagactatcagctagctagagggagctaactacctacctagctagccatgtgtgactacttcctgcaaaggatggatcagggcgaccaccaccaccaccaccaggccggagacctcacggacgtcgtccgagccggcggcgcgatgcatcaggcagctgtcgcggagctcccctccgcggacacggggtggcagctcccggccgagccagcagctggagcatgcctcttcccgccaccccagccctcgtcgtcggactgcgacggcttcgcggacgcgttcgccggcctcccggacccatttgccagcgactttcgcacctcctcctcctccggcgtgggcctttgccctgccgacgacttcttcgacttcgaggcgcctgctgctgctgctgccggtggcggcgctcgaagaggcggaggcgtactggcgggcgcgcagatgcccgcgctgtcgccgagagagatacggccgtacccggtgacgatgggcggcgacaccgtgaagatcggcgcgccgacgatgatgcccgggctggccgttgggccgccctgctgtgcgttcgacgctgtcgccgggatgcagatgccgtcgccgcacgcgcacggtggcgggatcaagcgcaggaaaaaccaggcaaggaaggtggtctgcatcccagctcctgcaccatcatcggcaggaggaaggaccactggggaggttgttccttctgatctctgggcttggaggaagtatggacagaagcctatcaaaggatcaccctacccaagagggtactacagatgcagcagctctaaaggatgcccggcgcggaagcaggtggagcgcagccgaaccgacccaagcctgctcgtgatcacctacaactcggagcacaaccacccttggccgacgcagcgcaacgcgctcgccggctcaacacgctctcaccacgccaagagcggcaagaacagctcctcgcacagtctgcagaagccgaaccttaaagcggaaccggagcatcaccaagcctcggaggcggtccccagctacgccaccaccgcgaccgcagccacaaccacaagcaccaccaccacagcgaccacaagcaccaccagcaacagtactcctccggagacggtggctgcagtgaaagaggaggcgatggttgggtcggaagtggagaaaggaacagaccacgacgcttctgtcctgctggaccacggtgatctcatgcagcagatgttcagccagagctactacaggccgaagataccggaggccagcggcggccaccacgccgatgacttcttcgctgacctcgccgagctggagtcggatcccatgagcctcatcttcccaggcggtgatcctgggaagaagggaagaatgtccagcgagagcttgggcatgggcaccgacccattattcaacatgctagattggggtgccagtgccactgatgttgctgctacttctgcagggagttcatttgagcaagacgaagagtggttggcgtgacatcgtttagcttgcgccggcaacctcaagcatgcatatatgcacgcaacacgtaggtagacagcccaaccggtttgttgttgacaaataccttatggcagtgtgtctgctccgtgctcccctctctagctctcctagcgctacctcaagtgctcaacactacactaggataagatcatcaaaactttagaaagcagaa

SEQ ID NO: 51163 - DNA, 982 bp, Zea Mays
aaatccttgaggtcaactaggcctagtacatcaggcgcggatgtcttctggcccggcaatgagaaggaagcgccgccgtccgcatcgtttgacggggacggaatcgcagaagcgcgtgcccgctacgcgatgccatctctgcatcacaaccgctcgtgtttgcgcaaatggctcagatgtgttctcaccgcattatcgagaaacttctattttcgtcacaaggctattccgttccgagagccaaaaactccactgctttcatcaactccggcgacttggagaagacgaagttccagaatccgatcggaagtttggtgctcgcgccttgacggattgatttcggtgcgccgatggggcaggcgttccgcaagctgttcgattccttcttcggcaccagcgagatgagggttgtgatgcttggtctggatgctgccggtaaaaccaccatattgtacaagctgcatatcggggaggttttgtcgactgttcccacgattggtttcaacgtcgagaaagttcaatacaagaatgtgatgtttactgtgtgggatgttggtggccaagaaaagttgaggcccttgtggaggcactacttcaacaatactgatggcttgatctacgtagttgattcgttggatcgggagagaattggaaaagccaaagctgaatttcaggcaataatcaaagatcctttgatgcttaacagtgtaatactggtacttgccaataagcaagatatgtttttattgaagaatactatgaagataaatctgcatctcactgcattgcaaccagtttctgttctcccagtgttcggttaaccttgtactcccagtgttcggtcagaatggttcagtcagaccttgtactgtattgatttaactcccagtgtttattttattttatgtctggacgtgattgtgcttctccggcatccccaatttagggtgagtgatgcatgagaaaagcattctctgccctt

SEQ ID NO: 51164 - DNA, 1912 bp, Zea Mays
aaatccttgaggtcaactaggcctagtacatcaggcgcggatgtcttctggcccggcaatgagaaggaagcgccgccgtccgcatcgtttgacggggacggaatcgcagaagcgcgtgcccgctacgcgatgccatctctgcatcacaaccgctcgtgtttgcgcaaatggctcagatgtgttctcaccgcattatcgagaaacttctattttcgtcacaaggctattccgttccgagagccaaaaactccactgctttcatcaactccggcgacttggagaagacgaagttccagaatccgatcggaagtttggtgctcgcgccttgacggattgatttcggtgcgccgatggggcaggcgttccgcaagctgttcgattccttcttcggcaccagcgagatgagggttgtgatgcttggtctggatgctgccggtaaaaccaccatattgtacaagctgcatatcggggaggttttgtcgactgttcccacgattggtttcaacgtcgagaaagttcaatacaagaatgtgatgtttactgtgtgggatgttggtggccaagaaaagttgaggcccttgtggaggcactacttcaacaatactgatggcttggttaatatcgagcaattctgttgcaggcaataatcaaagatcctttgatgcttaacagtgtaatactggtacttgccaataagcaagatatgaaaggggcaatgacaccaatggaggtgtgtgagggtcttggcctctacgatttgaagaaccgcatctggcacatccaaggttcttgtgcgctcaaaggtgatggcctttatgagggcttggactggctggcaagcacactgaaggaattgcaagcttcaggtcgcctaccttctggagggacatcgttgttctaagtagcaagcctgcctgtaagatccttcggctgatagcagtaataatggatcaagagcgttttttttgtcatggatacaaactcatccctcgggatttcttgtcagtgatctaacctatgatattgatcttgtaaattctgttactagttcatacaaagctaaccggcggatgcatgttacatatgagaattgaggagtcaacttccacatgctattattgtaagcatttctgtaaactgaagttggcaaacacaaattatcccaacatattggttgccattagatctatcttatggccattcatcaggattgagtttgttgatgctgatggaatgtgaggtattccgaaggaagaaaataacatgaatcctcattgtttccacaatgtgctcccgtaggtgcatttgcttagaaccatgcttcaatgggaggagcaagttcgccgtggcacatctttgacagagaaaaatctcggtgcaagcacctgcacaaaaccaatcctgcgtgaggtggccataatattctggcctaatggcaggattataagaatgggcactgatagcacagctgctgacgctgctagaagaatgggcgttgaagtgaagctgctttgggctaatggccaactagtgctgccccaaacagagcttaaggttggggatatagttgaagtgagggtacagatgcaagcaccagtttcaagtaaaccttctcagggttattgatcatattggttcctcagttcttgccagatcttggcaatgcaacagactgaaggatcgtagacatagccacataggaacccaaacctcaattgtacagtccatttgtcgaaatgaatcgaagaaagaagaattattaggtgcagtaattgttgtctcaaacaggagttcgctgtgtacataagcaactgcaagtagaagctgtctgtccagctgtgcttttccttgtccatagttacagtggtaatgcaaatttcggtaagtaaatctgcagtaaagtttagttagg

SEQ ID NO: 51165 - DNA, 2708 bp, Zea Mays
atgacccttgacccgagctgagctgagcagcgttcaaacattcaaaccctagacgaggccccttgcaacggtcggatccattcccatataatatccctccgcccccgacctcctcagcatcccatttttgctctattcgccacccacaaatccactgcagccagcgcatcaggagaagaaggtaagagacgaggggggagatggaggcggcggccatggatttccacacgctctcgcgccgggagctccaggcgctgtgcaagcgcaacggcctccgcgccaacatgaccaacgccgccatggccgaggcgctccaggggctaacctcggtcgacgggatcgacgaaatcggcaccagtctctgtctcccgacgccaggacggtcggcgatgaagtcggcggcgaagatggtggccgtggccgtcgaggagcagcagcacggtagcccgctcccccgcggccgccgcgtatcggtgaaaccaccagaggccatccggatggaggttgaagagggggaggacgagatgaaggagatcgtgaagactcccggcgtggcgctgcgcagcactcgccgcggcactcgggccactcccgcgccgcttcctactccggtggcggcgtgcagtacgcgcgcaacagcggggaggaccgccgctcgtaagacgcgcgacgtggcgccgaccccagccacccggaggagccagaggacagcgtctcgcaaggccgcgggggctgttgaggtggaccgacgcgccgaagatgtatccgaggaaaagacgtcggatatgacgatagctttggatcaggaagctgaggtgttagcggccgcatcaaaggaggagaaggttcagcaagacgaaaagaaagatgtgaaatgtgatgacccaaaggaggaggacaaggtgcagcaagaggaaccaaaagatgttgcctcagatgtgaaaattgatgacccagagcaggaggaagttgccaataaagatgaggaatcggaggagggcgacgaagatgtttcggttaagagctgcaatgatcctaaggtggatgaagtggttgttgtcataggggaacaatcaacaaagtcccatgatgggattgtgaaagagcaggaacctatcagtgttgagaaatctgctcacttgacggtcatggaggattcaacaatcctaggtgtcattgaggacttggctgaattgtcacctgcaagggagatgcctgatgagatcattcctgttactgaagataatgaagtggccatcaatgaggagaccatcaaggaagatgattttgctgacgctattcagactgatcctactccaaaggagattaatctaactgctgcgggggaagataagatcattgaaggcaaagaaggtgctgatgataagatgccacaggctgctgaaactagtgaacatgatgaggacactgaatttaaagaaggggcagctgatgaggtgctgcaggctgagctggcagacaatgaaacaagtgatggtgaagatgaccgtactgaagtgagagaaggggctgctgctaagacgttgcagggtgaactgacagacgatgagactagtgaagatgacctccatgaagatgaagaatgggcttcagatgatgaggaaactgcctctagtgacgagagcgatgaaggtactgagtccaatgaagggagttacattgctgatgcagtgcagatgttgcagggaactgggatagtggaagtggccgacgaagatgcctctactgaagatgatttcagtggcgacctaccaccagagtttgacaatatcatgatattccgtgatgctgaaactgatagtgacagtgttcctccagcgctcgaggaaaaccaggctgttgcatttgcaaccaaagctgcagagtccctaggtgattctgccatgaatgcagagcattatgagggtcctgaggaggctgatgctactgaaaaaacaatgaaagtggttgaggacattgtgaagtccctggatgaatcctccttcaaggagggagaatcaaaggagacgcaaaagaagcagccgcaggattatgatatcatgagcctaataaagcttagaagcacgtacaagaaatgtcttattgcccgaaaggaggggaagaggcctcctctcgaggaggtggatgggaacgcctgcattgaccactgaacagaacaagctgtgtcagtcacaaaattttcgtgaggatggcagctgccacgacgggattgaatagaggaatgctctggttgtgaagtgataactaaggctaccttcaaggcttaatgatcaagggttaatgaaactgtggtttcagccaaccaacctgcaattcctgtggtttttgtccatgttgattaactagtacgaatgccaagttccttgaaagttatacaaatccgttaatgttcagatggcattcagcatgctccatgtgctgcatgccaacatatcattcggcaaattggcaatgcaaactagaattgctaacgcagagtgaattttctagccctgttcgtttttttttccgtggaacctgtttccctttgtatgtcatcgttgaatacaagcctttggacggcccagctcagatgctactcggcccagtttacgacggcctaactgcccaacttttttccaatttagttttgtgtttttttcacggtcctttacaatttcatttcaaaaaatggactccaacctcgg

SEQ ID NO: 51166 - DNA, 2611 bp, Zea Mays
atataatatccctccgcccccgacctcctcagcatcccatttttgctctattcgccacccacaaatccactgcagccagcgcatcaggagaagaaggtaagagacgaggggggagatggaggcggcggccatggatttccacacgctctcgcgccgggagctccaggcgctgtgcaagcgcaacggcctccgcgccaacatgaccaacgccgccatggccgaggcgctccaggggctaacctcggtcgacgggatcgacgaaatcggcaccagtctctgtctcccgacgccaggacggtcggcgatgaagtcggcggcgaagatggtggccgtggccgtcgaggagcagcagcacggtagcccgctcccccgcggccgccgcgtatcggtgaaaccaccagaggccatccggatggaggttgaagagggggaggacgagatgaaggagatcgtgaagactcccggcgtggcgctgcgcagcactcgccgcggcactcgggccactcccgcgccgcttcctactccggtggcggcgtgcagtacgcgcgcaacagcggggaggaccgccgctcgtaagacgcgcgacgtggcgccgaccccagccacccggaggagccagaggacagcgtctcgcaaggccgcgggggctgttgaggtggaccgacgcgccgaagatgtatccgaggaaaagacgtcggatatgacgatagctttggatcaggaagctgaggtgttagcggccgcatcaaaggaggagaaggttcagcaagacgaaaagaaagatgtgaaatgtgatgacccaaaggaggaggacaaggtgcagcaagaggaaccaaaagatgtgaaaattgatgacccagagcaggaggaagttgccaataaagatgaggaatcggaggagggcgacgaagatgtttcggttaagagctgcaatgatcctaaggtggatgaagtggttgttgtcataggggaacaatcaacaaagtcccatgatgggattgtgaaagagcaggaacctatcagtgttgagaaatctgctcacttgacggtcatggaggattcaacaatcctaggtgtcattgaggacttggctgaattgtcacctgcaagggagatgcctgatgagatcattcctgttactgaagataatgaagtggccatcaatgaggagaccatcaaggaagatgattttgctgacgctattcagactgatcctactccaaaggagattaatctaactgctgcgggggaagataagatcattgaaggcaaagaaggtgctgatgataagatgccacaggctgctgaaactagtgaacatgatgaggacactgaatttaaagaaggggcagctgatgaggtgctgcaggctgagctggcagacaatgaaacaagtgatggtgaagatgaccgtactgaagtgagagaaggggctgctgctaagacgttgcagggtgaactgacagacgatgagactagtgaagatgacctccatgaagatgaagaatgggcttcagatgatgaggaaactgcctctagtgacgagagcgatgaaggtactgagtccaatgaagggagttacattgctgatgcagtgcagatgttgcagggaactgggatagtggaagtggccgacgaagatgcctctactgaagatgatttcagtggcgacctaccaccagagtttgacaatatcatgatattccgtgatgctgaaactgatagtgacagtgttcctccagcgctcgaggaaaaccaggctgttgcatttgcaaccaaagctgcagagtccctaggtgattctgccatgaatgcagagcattatgagggtcctgaggaggctgatgctactgaaaaaacaatgaaagtggttgaggacattgtgaagtccctggatgaatcctccttcaaggagggagaatcaaaggagacgcaaaagaagcagccgcaggattatgatatcatgagcctaataaagcttagaagcacgtacaagaaatgtcttattgcccgaaaggaggggaagaggcctcctctcgaggaggtggatgggaacgcctgcattgaccactgaacagaacaagctgtgtcagtcacaaaattttcgtgaggatggcagctgccacgacgggattgaatagaggaatgctctggttgtgaagtgataactaaggctaccttcaaggcttaatgatcaagggttaatgaaactgtggtttcagccaaccaacctgcaattcctgtggtttttgtccatgttgattaactagtacgaatgccaagttccttgaaagttatacaaatccgttaatgttcagatggcattcagcatgctccatgtgctgcatgccaacatatcattcggcaaattggcaatgcaaactagaattgctaacgcagagtgaattttctagccctgttcgtttttttttccgtggaacctgtttccctttgtatgtcatcgttgaatacaagcctttggacggcccagctcagatgctactcggcccagtttacgacggcctaactgcccaacttttttccaatttagttttgtgtttttttcacggtcctttacaatttcatttcaaaaaatggactccaacctcgg

SEQ ID NO: 51167 - DNA, 1660 bp, Zea Mays
cgcgggagcacggtcccgacgagtcccgggcggcggtgacgacgcggcgcacagcagttgggcgtccttggcgtttgttttagttttgttccggccgggcttgccccccggcacaaggctccccgagattccacgaacacatgagtgagggtgaggtgaggtgagtacatgatgattatgatggcatggcgatgcccgatgcggatgcgctcgggcgacgctcctctctctctctctttctctcgctacatattcttcctctctctatctttgttctcctccgcccagctttcagacgcgacactcatcgcacattcccgtcaggccggtatccgcctcgggcttcgccgaaatcctacgctacctctctgatctctcccccggccccgagagcaccagattcacaacgcgcccgccgtgccgtgcggcagctgccttggcctagcctaggtgcgtgtgcctgcggaagctggttgctagctagttgctgctcgagctactatctgtttcgcgcggtgatcgacaatccggcagcgggagcggagctaggagtacgagagacacaaggccacgcgcgcgatgaacatgttcgatgggatggagagggctgggtacggcggcggcgctgggccgatgggcggggtggtgctgtcgcgggaccccaagccgcggctgcggtggacgcccgacctgcacgagcgcttcgtcgaggccgtcaccaagctcggcggggcagacaaggcgacgcccaagtccgtgctgcggctgatgggaatgaaagggctcaccttgtaccacttgaagagtcacctccagaaatacaggcttggaaagcagaccaagaaagacacgggtttggacgccggcagaggggcattcgcggcgcagggcatcaatttctccacaccagtacctcctcctagcattccatctacggccagtgacaatacgggatgcgctgaagtaccagattgaagtccaaaggaaattgcacgagcagctcgaggttcagaagaagctgcagatgcggatcgaggcgcaaggcaaatacttgcagacgatactcgagaaggcccagagcaacctctcgtaccacgcgactggagccgcaaacctagaagcaaccaggtcgcagctgacggacttcaacctcgcgctctcaggcttcatggacaacgtgacccaggcgtgcgagcagaacaacggcgagctggtgaaagccatgtccgaggacggtctcagagcgaacaatctagactttcagccgtaccatggagttcatgacggggacgatgtcaagtgcgctacggacgaagggttgctacttctggacctgaacatcagaggcgggtacggtcatcggatttcgacggatctgaagatgaatcaacacatgcggtgaaaagttcagtagaaagaaaggcgaggacagtagtttaatcttgggtaacccatcaatctaagagaagaggtgcccttgtgtttgtgagaaattctttcggccatcttgattcctaacgatgcttctttatggtgatggtcagcgtattgcttatgtaaaatttggtgagaggctccgaataagggtaactaatcttatacaagatctttatatatacttggatttgtatggatctagggtacgaagtaaaagcatttg

SEQ ID NO: 51168 - DNA, 788 bp, Zea Mays
gtttgattatgtggattgaaatgaaggtacagtgcataactaggctctaggcgtctcatttcttttccccttgctgaacgtatttcagttgggcttgtttgtgcttatccataaatagagtcatatctattttaattgctgtctgtagtaggggacaaaaggaaatttgtgtgaggtatttggggtgaataactaagatctagagatatcaccctctgctggaaagaatatccagtatttacacctgttagagcttatccatagagatatttgtgtgctgcaattgaaagccgaccaagttcattgcttggactgggtttgtaagcctgagagaaattgggtgcatgaaagccacgtagtgaagtcttgcaatgctgtcaacctgagagcatctctccactgtattgtggctgactttggggctgcctgcccccatatataattgccctagggctaattctagtgaagtctcctccctgccttgagctctaacccagggaccactacagaggtgttgggatccttgtgttcctgctgagattaactctcctcagcccctgggtttgtcttgttccagaaccctgcatgccatcccctgggtggtgaccaccagcagcagtttgtccacctcgccgtgaccagaacacctagacgaggtcgtatttgaagaagtctactccagtgcctgctcctcaagtggatgaagccagctaacttggtattggatagagggatttagagccacttcactgcaacaaaggcaagccccggtgcatgcaaccccttcc

SEQ ID NO: 51169 - DNA, 2992 bp, Zea Mays
gttctttattactctgtctctgatggaaaatcgagattgagcagagcagagcagagcatatacattttttttgcatatgatgcatcgccgcagttggtaggcatcttcgctagctaccagaggcgtcgccatcacgcggagaagccttcccggcgataaatgcccatcacctcgctccaaatcgtcattaacaatgcattaggcagcgcgcgatctcaagccagccggcagcatcgacgccaactcctcttcccgagcaaacgccctgatgccaagttgccagtagcaggcggctccgtatagtagaaagagaagacgacgtgtgttttggcctccggaggagcaagccccccaaaaaaaacgagcagggagcggttaaaaagcaggcaaaaaaggggagacgccacgagcggaagacagacaggcaggcaagcgagaccaaggcgggggcggagcgcgagaggcgacgcgagaggcgagaagtggaggcggtgctgcggtggcatgccatggttataaaaagtaacggagcgcgacgagggtagaaagaggaaggcccgccgcttccccttcttcattcccgtcccacacacgccgccgccgccggtgcggctcgcttccgtcccccccggtccgcgcgggctgcctgcgggagcagggtggcagggcactccggcaaccacgtgggtggggaggcgacgacaccaccctatgctctgtcctcgcccgcaggcagtgaatttgggagcttgaagcattcatctgagacatggaaaaagtgatctgctgggcatatctccttcaacgcaagcagttctcgaaagaaactcttgattgctgtgtcttagctcgtgggaacactcctctctcctctctcgtgaactacacatagtgattatatgttcctctatgctcaacaacaagcaggctgatgcgatattttgctgaagttattatatttcagtctatgccagacatctacatggttgatatatttgctgtgttcagcttacatctgttgcggccctagttagctatttgtcttttgtgtactatctgaggcaagagattgatcagctaggacttggcgaacacttgcctgtgttggctgttcatctgaagggggaaatttgcacgagacacctcggatattacaacaatggatagattcaagttgattaaggaagttggcgatgggactttcgggagtgtatggcgtgctataaataaacagaatggtgaagttgttgctgttaagaaaatgaagaaaaagtattattcttttgaggaatgtatgggtttgcgtgaagtaaagtctttgcggcgcatgaatcatcctaacattgtgaagctcaaagaggttatccgagaaaatgatatattatacttcataatggaatacatggagtgtaatctctaccaacttatgaaggataaggtcaagcctttctcggagtctgaagtccgcaactggtgctttcagatatttcaggctcttgcttacatgcatcagaggggctactttcatcgtgacctcaaacctgagaatctgttggttagcaaagatgtcataaagctagcagactttggtcttgcaagggaagtttcatctttgccgccatatacagaatatgtctcaactcgctggtatcgggcaccagaagtattgctccagtcatctgcttatgattctgcagttgatatgtgggcaatgggtgccataatggctgagttgttgacactccatcctctctttcctggaactagtgaagctgatgagattcacaagatatgcaatgtcatcggtagtccagatgagcaatcttggcctcaaggattgtcacttgcagaagcaatgaagtatcagttcccacagatcaaaggcagtcaactggccgaggtgatgacaacagccagtagcgatgcaattgacctcatctcatcactatgctcatgggatcctagcaagagaccaaaggccgcagaagtcctccagcataccttttttcagggttgtacatgtgttccactccctgtccgtccaaaagcttcatcacttcctagaacacctccatgtgttggatcaaaaggaaattcagagaacagtgtggctagaagattctcaactggaactctatctacaatgaaatctcatagcaatgcatccgcaaaattaaatggtttatctaagactggtgtacaaagaaaacttaatttggatcgtcagccatcccaaaagggtatgaagccaaccgagactagcaataaactaactacgaatcgggtaccagctcggaatagcccagggaatcctgtacttaggcattcacggagcttgcctgaaactggccgaggagcaatacagaaggtctcatcaattacagagaaactatcccaaatgtctgtgacctctagaacacggagcgctgtgaagcctgctgcccccatgatgaaggccggacatggcaagtcggactttcttgggaagtctgacgatatccctccagcaaagaggctgacaagaaaattggtcagctaaatgagggtatgtggagtgaaaattcgatcagctgcaggaggggtgttgtgtatagtgtgcagaaaccagtgtgcccgaagaggatagtcagcctgagcgtttgcccatcgatggttgtgcggatttgccatcaccacagtttcgctgcgtcgagacatattagaatgggtttgcaaattcctttgtgaagtgctagagcctgcatcaagccttccccacttccgggcggttgatctgcttttttcctgcgaaaagcttgcccccatgttttaataaacatgattgtgctattaatttggtttggtttgccttgcaatgttatcttgcaccaatatcgctgtcacaaactgtatgcacatttaacagcttgtaaatccttgagcccaacaagggatggacatttcacatttggtttgaatgcacatttaacgcagtgaggtgccaatttggcgc

SEQ ID NO: 51170 - DNA, 2857 bp, Zea Mays
cccatcacctcgctccaaatcgtcattaacaatgcattaggcagcgcgcgatctcaagccagccggcagcatcgacgccaactcctcttcccgagcaaacgccctgatgccaagttgccagtagcaggcggctccgtatagtagaaagagaagacgacgtgtgttttggcctccggaggagcaagccccccaaaaaaaacgagcagggagcggttaaaaagcaggcaaaaaaggggagacgccacgagcggaagacagacaggcaggcaagcgagaccaaggcgggggcggagcgcgagaggcgacgcgagaggcgagaagtggaggcggtgctgcggtggcatgccatggttataaaaagtaacggagcgcgacgagggtagaaagaggaaggcccgccgcttccccttcttcattcccgtcccacacacgccgccgccgccggtgcggctcgcttccgtcccccccggtccgcgcgggctgcctgcgggagcagggtggcagggcactccggcaaccacgtgggtggggaggcgacgacaccaccctatgctctgtcctcgcccgcaggcagcagtgaatttgggagcttgaagcattcatctgagacatggaaaaagtgatctgctgggcatatctccttcaacgcaagcagttctcgaaagaaactcttgattgctgtgtcttagctcgtgggaacactcctctctcctctctcgtgaactacacatagtgattatatgttcctctatgctcaacaacaagcaggctgatgcgatattttgctgaagttattatatttcagtctatgccagacatctacatgtagatggtgctcatataagtgggggttgatatatttgctgtgttcagcttacatctgttgcggccctagttagctatttgtcttttgtgtactatctgaggcaagagattgatcagctaggacttggcgaacacttgcctgtgttggctgttcatctgaagggggaaatttgcacgagacacctcggatattacaacaatggatagattcaagttgattaaggaagttggcgatgggactttcgggagtgtatggcgtgctataaataaacagaatggtgaagttgttgctgttaagaaaatgaagaaaaagtattattcttttgaggaatgtatgggtttgcgtgaagtaaagtctttgcggcgcatgaatcatcctaacattgtgaagctcaaagaggttatccgagaaaatgatatattatacttcataatggaatacatggagtgtaatctctaccaacttatgaaggataaggtcaagcctttctcggagtctgaagtccgcaactggtgctttcagatatttcaggctcttgcttacatgcatcagaggggctactttcatcgtgacctcaaacctgagaatctgttggttagcaaagatgtcataaagctagcagactttggtcttgcaagggaagtttcatctttgccgccatatacagaatatgtctcaactcgctggtatcgggcaccagaagtattgctccagtcatctgcttatgattctgcagttgatatgtgggcaatgggtgccataatggctgagttgttgacactccatcctctctttcctggaactagtgaagctgatgagattcacaagatatgcaatgtcatcggtagtccagatgagcaatcttggcctcaaggattgtcacttgcagaagcaatgaagtatcagttcccacagatcaaaggcagtcaactggccgaggtgatgacaacagccagtagcgatgcaattgacctcatctcatcactatgctcatgggatcctagcaagagaccaaaggccgcagaagtcctccagcataccttttttcagggttgtacatgtgttccactccctgtccgtccaaaagcttcatcacttcctagaacacctccatgtgttggatcaaaaggaaattcagagaacagtgtggctagaagattctcaactggaactctatctacaatgaaatctcatagcaatgcatccgcaaaattaaatggtttatctaagactggtgtacaaagaaaacttaatttggatcgtcagccatcccaaaagggtatgaagccaaccgagactagcaataaactaactacgaatcgggtaccagctcggaatagcccagggaatcctgtacttaggcattcacggagcttgcctgaaactggccgaggagcaatacagaaggtctcatcaattacagagaaactatcccaaatgtctgtgacctctagaacacggagcgctgtgaagcctgctgcccccatgatgaaggccggacatggcaagtcggactttcttgggaagtctgacgatatccctccagcaaagaggctgacaagaaaattggtcagctaaatgagggtatgtggagtgaaaattcgatcagctgcaggaggggtgttgtgtatagtgtgcagaaaccagtgtgcccgaagaggatagtcagcctgagcgtttgcccatcgatggttgtgcggatttgccatcaccacagtttcgctgcgtcgagacatattagaatgggtttgcaaattcctttgtgaagtgctagagcctgcatcaagccttccccacttccgggcggttgatctgcttttttcctgcgaaaagcttgcccccatgttttaataaacatgattgtgctattaatttggtttggtttgccttgcaatgttatcttgcaccaatatcgctgtcacaaactgtatgcacatttaacagcttgtaaatccttgagcccaacaagggatggacatttcacatttggtttgaatgcacatttaacgcagtgaggtgccaatttggcgc

SEQ ID NO: 51171 - DNA, 2835 bp, Zea Mays
cacctcgctccaaatcgtcattaacaatgcattaggcagcgcgcgatctcaagccagccggcagcatcgacgccaactcctcttcccgagcaaacgccctgatgccaagttgccagtagcaggcggctccgtatagtagaaagagaagacgacgtgtgttttggcctccggaggagcaagccccccaaaaaaaacgagcagggagcggttaaaaagcaggcaaaaaaggggagacgccacgagcggaagacagacaggcaggcaagcgagaccaaggcgggggcggagcgcgagaggcgacgcgagaggcgagaagtggaggcggtgctgcggtggcatgccatggttataaaaagtaacggagcgcgacgagggtagaaagaggaaggcccgccgcttccccttcttcattcccgtcccacacacgccgccgccgccggtgcggctcgcttccgtcccccccggtccgcgcgggctgcctgcgggagcagggtggcagggcactccggcaaccacgtgggtggggaggcgacgacaccaccctatgctctgtcctcgcccgcaggattgcagcagcagtgaatttgggagcttgaagcattcatctgagacatggaaaaagtgatctgctgggcatatctccttcaacgcaagcagttctcgaaagaaactcttgattgctgtgtcttagctcgtgggaacactcctctctcctctctcgtgaactacacatagtgattatatgttcctctatgctcaacaacaagcaggctgatgcgatattttgctgaagttattatatttcagtctatgccagacatctacatggttgatatatttgctgtgttcagcttacatctgttgcggccctagttagctatttgtcttttgtgtactatctgaggcaagagattgatcagctaggacttggcgaacacttgcctgtgttggctgttcatctgaagggggaaatttgcacgagacacctcggatattacaacaatggatagattcaagttgattaaggaagttggcgatgggactttcgggagtgtatggcgtgctataaataaacagaatggtgaagttgttgctgttaagaaaatgaagaaaaagtattattcttttgaggaatgtatgggtttgcgtgaagtaaagtctttgcggcgcatgaatcatcctaacattgtgaagctcaaagaggttatccgagaaaatgatatattatacttcataatggaatacatggagtgtaatctctaccaacttatgaaggataaggtcaagcctttctcggagtctgaagtccgcaactggtgctttcagatatttcaggctcttgcttacatgcatcagaggggctactttcatcgtgacctcaaacctgagaatctgttggttagcaaagatgtcataaagctagcagactttggtcttgcaagggaagtttcatctttgccgccatatacagaatatgtctcaactcgctggtatcgggcaccagaagtattgctccagtcatctgcttatgattctgcagttgatatgtgggcaatgggtgccataatggctgagttgttgacactccatcctctctttcctggaactagtgaagctgatgagattcacaagatatgcaatgtcatcggtagtccagatgagcaatcttggcctcaaggattgtcacttgcagaagcaatgaagtatcagttcccacagatcaaaggcagtcaactggccgaggtgatgacaacagccagtagcgatgcaattgacctcatctcatcactatgctcatgggatcctagcaagagaccaaaggccgcagaagtcctccagcataccttttttcagggttgtacatgtgttccactccctgtccgtccaaaagcttcatcacttcctagaacacctccatgtgttggatcaaaaggaaattcagagaacagtgtggctagaagattctcaactggaactctatctacaatgaaatctcatagcaatgcatccgcaaaattaaatggtttatctaagactggtgtacaaagaaaacttaatttggatcgtcagccatcccaaaagggtatgaagccaaccgagactagcaataaactaactacgaatcgggtaccagctcggaatagcccagggaatcctgtacttaggcattcacggagcttgcctgaaactggccgaggagcaatacagaaggtctcatcaattacagagaaactatcccaaatgtctgtgacctctagaacacggagcgctgtgaagcctgctgcccccatgatgaaggccggacatggcaagtcggactttcttgggaagtctgacgatatccctccagcaaagaggctgacaagaaaattggtcagctaaatgagggtatgtggagtgaaaattcgatcagctgcaggaggggtgttgtgtatagtgtgcagaaaccagtgtgcccgaagaggatagtcagcctgagcgtttgcccatcgatggttgtgcggatttgccatcaccacagtttcgctgcgtcgagacatattagaatgggtttgcaaattcctttgtgaagtgctagagcctgcatcaagccttccccacttccgggcggttgatctgcttttttcctgcgaaaagcttgcccccatgttttaataaacatgattgtgctattaatttggtttggtttgccttgcaatgttatcttgcaccaatatcgctgtcacaaactgtatgcacatttaacagcttgtaaatccttgagcccaacaagggatggacatttcacatttggtttgaatgcacatttaacgcagtgaggtgccaatttggcgc

SEQ ID NO: 51172 - DNA, 2814 bp, Zea Mays
gcgcgatctcaagccagccggcagcatcgacgccaactcctcttcccgagcaaacgccctgatgccaagttgccagtagcaggcggctccgtatagtagaaagagaagacgacgtgtgttttggcctccggaggagcaagccccccaaaaaaaacgagcagggagcggttaaaaagcaggcaaaaaaggggagacgccacgagcggaagacagacaggcaggcaagcgagaccaaggcgggggcggagcgcgagaggcgacgcgagaggcgagaagtggaggcggtgctgcggtggcatgccatggttataaaaagtaacggagcgcgacgagggtagaaagaggaaggcccgccgcttccccttcttcattcccgtcccacacacgccgccgccgccggtgcggctcgcttccgtcccccccggtccgcgcgggctgcctgcgggagcagggtggcagggcactccggcaaccacgtgggtggggaggcgacgacaccaccctatgctctgtcctcgcccgcaggattgcagcagcagtgaatttgggagcttgaagcattcatctgagacatggaaaaagtgatctgctgggcatatctccttcaacgcaagcagttctcgaaagaaactcttgattgctgtgtcttagctcgtgggaacactcctctctcctctctcgtgaactacacatagtgattatatgttcctctatgctcaacaacaagcaggctgatgcgatattttgctgaagttattatatttcagtctatgccagacatctacatgtagatggtgctcatataagtgggggttgatatatttgctgtgttcagcttacatctgttgcggccctagttagctatttgtcttttgtgtactatctgaggcaagagattgatcagctaggacttggcgaacacttgcctgtgttggctgttcatctgaagggggaaatttgcacgagacacctcggatattacaacaatggatagattcaagttgattaaggaagttggcgatgggactttcgggagtgtatggcgtgctataaataaacagaatggtgaagttgttgctgttaagaaaatgaagaaaaagtattattcttttgaggaatgtatgggtttgcgtgaagtaaagtctttgcggcgcatgaatcatcctaacattgtgaagctcaaagaggttatccgagaaaatgatatattatacttcataatggaatacatggagtgtaatctctaccaacttatgaaggataaggtcaagcctttctcggagtctgaagtccgcaactggtgctttcagatatttcaggctcttgcttacatgcatcagaggggctactttcatcgtgacctcaaacctgagaatctgttggttagcaaagatgtcataaagctagcagactttggtcttgcaagggaagtttcatctttgccgccatatacagaatatgtctcaactcgctggtatcgggcaccagaagtattgctccagtcatctgcttatgattctgcagttgatatgtgggcaatgggtgccataatggctgagttgttgacactccatcctctctttcctggaactagctgatgagattcacaagatatgcaatgtcatcggtagtccagatgagcaatcttggcctcaaggattgtcacttgcagaagcaatgaagtatcagttcccacagatcaaaggcagtcaactggccgaggtgatgacaacagccagtagcgatgcaattgacctcatctcatcactatgctcatgggatcctagcaagagaccaaaggccgcagaagtcctccagcataccttttttcagggttgtacatgtgttccactccctgtccgtccaaaagcttcatcacttcctagaacacctccatgtgttggatcaaaaggaaattcagagaacagtgtggctagaagattctcaactggaactctatctacaatgaaatctcatagcaatgcatccgcaaaattaaatggtttatctaagactggtgtacaaagaaaacttaatttggatcgtcagccatcccaaaagggtatgaagccaaccgagactagcaataaactaactacgaatcgggtaccagctcggaatagcccagggaatcctgtacttaggcattcacggagcttgcctgaaactggccgaggagcaatacagaaggtctcatcaattacagagaaactatcccaaatgtctgtgacctctagaacacggagcgctgtgaagcctgctgcccccatgatgaaggccggacatggcaagtcggactttcttgggaagtctgacgatatccctccagcaaagaggctgacaagaaaattggtcagctaaatgagggtatgtggagtgaaaattcgatcagctgcaggaggggtgttgtgtatagtgtgcagaaaccagtgtgcccgaagaggatagtcagcctgagcgtttgcccatcgatggttgtgcggatttgccatcaccacagtttcgctgcgtcgagacatattagaatgggtttgcaaattcctttgtgaagtgctagagcctgcatcaagccttccccacttccgggcggttgatctgcttttttcctgcgaaaagcttgcccccatgttttaataaacatgattgtgctattaatttggtttggtttgccttgcaatgttatcttgcaccaatatcgctgtcacaaactgtatgcacatttaacagcttgtaaatccttgagcccaacaagggatggacatttcacatttggtttgaatgcacatttaacgcagtgaggtgccaatttggcgc

SEQ ID NO: 51173 - DNA, 2751 bp, Zea Mays
aagttgccagtagcaggcggctccgtatagtagaaagagaagacgacgtgtgttttggcctccggaggagcaagccccccaaaaaaaacgagcagggagcggttaaaaagcaggcaaaaaaggggagacgccacgagcggaagacagacaggcaggcaagcgagaccaaggcgggggcggagcgcgagaggcgacgcgagaggcgagaagtggaggcggtgctgcggtggcatgccatggttataaaaagtaacggagcgcgacgagggtagaaagaggaaggcccgccgcttccccttcttcattcccgtcccacacacgccgccgccgccggtgcggctcgcttccgtcccccccggtccgcgcgggctgcctgcgggagcagggtggcagggcactccggcaaccacgtgggtggggaggcgacgacaccaccctatgctctgtcctcgcccgcagggtaagcagcagtgaatttgggagcttgaagcattcatctgagacatggaaaaagtgatctgctgggcatatctccttcaacgcaagcagttctcgaaagaaactcttgattgctgtgtcttagctcgtgggaacactcctctctcctctctcgtgaactacacatagtgattatatgttcctctatgctcaacaacaagcaggctgatgcgatattttgctgaagttattatatttcagtctatgccagacatctacatgtagatggtgctcatataagtgggggttgatatatttgctgtgttcagcttacatctgttgcggccctagttagctatttgtcttttgtgtactatctgaggcaagagattgatcagctaggacttggcgaacacttgcctgtgttggctgttcatctgaagggggaaatttgcacgagacacctcggatattacaacaatggatagattcaagttgattaaggaagttggcgatgggactttcgggagtgtatggcgtgctataaataaacagaatggtgaagttgttgctgttaagaaaatgaagaaaaagtattattcttttgaggaatgtatgggtttgcgtgaagtaaagtctttgcggcgcatgaatcatcctaacattgtgaagctcaaagaggttatccgagaaaatgatatattatacttcataatggaatacatggagtgtaatctctaccaacttatgaaggataaggtcaagcctttctcggagtctgaagtccgcaactggtgctttcagatatttcaggctcttgcttacatgcatcagaggggctactttcatcgtgacctcaaacctgagaatctgttggttagcaaagatgtcataaagctagcagactttggtcttgcaagggaagtttcatctttgccgccatatacagaatatgtctcaactcgctggtatcgggcaccagaagtattgctccagtcatctgcttatgattctgcagttgatatgtgggcaatgggtgccataatggctgagttgttgacactccatcctctctttcctggaactagtgaagctgatgagattcacaagatatgcaatgtcatcggtagtccagatgagcaatcttggcctcaaggattgtcacttgcagaagcaatgaagtatcagttcccacagatcaaaggcagtcaactggccgaggtgatgacaacagccagtagcgatgcaattgacctcatctcatcactatgctcatgggatcctagcaagagaccaaaggccgcagaagtcctccagcataccttttttcagggttgtacatgtgttccactccctgtccgtccaaaagcttcatcacttcctagaacacctccatgtgttggatcaaaaggaaattcagagaacagtgtggctagaagattctcaactggaactctatctacaatgaaatctcatagcaatgcatccgcaaaattaaatggtttatctaagactggtgtacaaagaaaacttaatttggatcgtcagccatcccaaaagggtatgaagccaaccgagactagcaataaactaactacgaatcgggtaccagctcggaatagcccagggaatcctgtacttaggcattcacggagcttgcctgaaactggccgaggagcaatacagaaggtctcatcaattacagagaaactatcccaaatgtctgtgacctctagaacacggagcgctgtgaagcctgctgcccccatgatgaaggccggacatggcaagtcggactttcttgggaagtctgacgatatccctccagcaaagaggctgacaagaaaattggtcagctaaatgagggtatgtggagtgaaaattcgatcagctgcaggaggggtgttgtgtatagtgtgcagaaaccagtgtgcccgaagaggatagtcagcctgagcgtttgcccatcgatggttgtgcggatttgccatcaccacagtttcgctgcgtcgagacatattagaatgggtttgcaaattcctttgtgaagtgctagagcctgcatcaagccttccccacttccgggcggttgatctgcttttttcctgcgaaaagcttgcccccatgttttaataaacatgattgtgctattaatttggtttggtttgccttgcaatgttatcttgcaccaatatcgctgtcacaaactgtatgcacatttaacagcttgtaaatccttgagcccaacaagggatggacatttcacatttggtttgaatgcacatttaacgcagtgaggtgccaatttggcgc

SEQ ID NO: 51174 - DNA, 2753 bp, Zea Mays
aagttgccagtagcaggcggctccgtatagtagaaagagaagacgacgtgtgttttggcctccggaggagcaagccccccaaaaaaaacgagcagggagcggttaaaaagcaggcaaaaaaggggagacgccacgagcggaagacagacaggcaggcaagcgagaccaaggcgggggcggagcgcgagaggcgacgcgagaggcgagaagtggaggcggtgctgcggtggcatgccatggttataaaaagtaacggagcgcgacgagggtagaaagaggaaggcccgccgcttccccttcttcattcccgtcccacacacgccgccgccgccggtgcggctcgcttccgtcccccccggtccgcgcgggctgcctgcgggagcagggtggcagggcactccggcaaccacgtgggtggggaggcgacgacaccaccctatgctctgtcctcgcccgcagggtaagattgcagcagcagtgaatttgggagcttgaagcattcatctgagacatggaaaaagtgatctgctgggcatatctccttcaacgcaagcagttctcgaaagaaactcttgattgctgtgtcttagctcgtgggaacactcctctctcctctctcgtgaactacacatagtgattatatgttcctctatgctcaacaacaagcaggctgatgcgatattttgctgaagttattatatttcagtctatgccagacatctacatgtagatggtgctcatataagtgggggttgatatatttgctgtgttcagcttacatctgttgcggccctagttagctatttgtcttttgtgtactatctgaggcaagagattgatcagctaggacttggcgaacacttgcctgtgttggctgttcatctgaagggggaaatttgcacgagacacctcggatattacaacaatggatagattcaagttgattaaggaagttggcgatgggactttcgggagtgtatggcgtgctataaataaacagaatggtgaagttgttgctgttaagaaaatgaagaaaaagtattattcttttgaggaatgtatgggtttgcgtgaagtaaagtctttgcggcgcatgaatcatcctaacattgtgaagctcaaagaggttatccgagaaaatgatatattatacttcataatggaatacatggagtgtaatctctaccaacttatgaaggataaggtcaagcctttctcggagtctgaagtccgcaactggtgctttcagatatttcaggctcttgcttacatgcatcagaggggctactttcatcgtgacctcaaacctgagaatctgttggttagcaaagatgtcataaagctagcagactttggtcttgcaagggaagtttcatctttgccgccatatacagaatatgtctcaactcgctggtatcgggcaccagaagtattgctccagtcatctgcttatgattctgcagttgatatgtgggcaatgggtgccataatggctgagttgttgacactccatcctctctttcctggaactagctgatgagattcacaagatatgcaatgtcatcggtagtccagatgagcaatcttggcctcaaggattgtcacttgcagaagcaatgaagtatcagttcccacagatcaaaggcagtcaactggccgaggtgatgacaacagccagtagcgatgcaattgacctcatctcatcactatgctcatgggatcctagcaagagaccaaaggccgcagaagtcctccagcataccttttttcagggttgtacatgtgttccactccctgtccgtccaaaagcttcatcacttcctagaacacctccatgtgttggatcaaaaggaaattcagagaacagtgtggctagaagattctcaactggaactctatctacaatgaaatctcatagcaatgcatccgcaaaattaaatggtttatctaagactggtgtacaaagaaaacttaatttggatcgtcagccatcccaaaagggtatgaagccaaccgagactagcaataaactaactacgaatcgggtaccagctcggaatagcccagggaatcctgtacttaggcattcacggagcttgcctgaaactggccgaggagcaatacagaaggtctcatcaattacagagaaactatcccaaatgtctgtgacctctagaacacggagcgctgtgaagcctgctgcccccatgatgaaggccggacatggcaagtcggactttcttgggaagtctgacgatatccctccagcaaagaggctgacaagaaaattggtcagctaaatgagggtatgtggagtgaaaattcgatcagctgcaggaggggtgttgtgtatagtgtgcagaaaccagtgtgcccgaagaggatagtcagcctgagcgtttgcccatcgatggttgtgcggatttgccatcaccacagtttcgctgcgtcgagacatattagaatgggtttgcaaattcctttgtgaagtgctagagcctgcatcaagccttccccacttccgggcggttgatctgcttttttcctgcgaaaagcttgcccccatgttttaataaacatgattgtgctattaatttggtttggtttgccttgcaatgttatcttgcaccaatatcgctgtcacaaactgtatgcacatttaacagcttgtaaatccttgagcccaacaagggatggacatttcacatttggtttgaatgcacatttaacgcagtgaggtgccaatttggcgc

SEQ ID NO: 51175 - DNA, 2315 bp, Zea Mays
aatggctcttacgtgatgctgtgttttgtgattgcagcagcagtgaatttgggagcttgaagcattcatctgagacatggaaaaagtgatctgctgggcatatctccttcaacgcaagcagttctcgaaagaaactcttgattgctgtgtcttagctcgtgggaacactcctctctcctctctcgtgaactacacatagtgattatatgttcctctatgctcaacaacaagcaggctgatgcgatattttgctgaagttattatatttcagtctatgccagacatctacatgtagatggtgctcatataagtgggggttgatatatttgctgtgttcagcttacatctgttgcggccctagttagctatttgtcttttgtgtactatctgaggcaagagattgatcagctaggacttggcgaacacttgcctgtgttggctgttcatctgaagggggaaatttgcacgagacacctcggatattacaacaatggatagattcaagttgattaaggaagttggcgatgggactttcgggagtgtatggcgtgctataaataaacagaatggttgctgttaagaaaatgaagaaaaagtattattcttttgaggaatgtatgggtttgcgtgaagtaaagtctttgcggcgcatgaatcatcctaacattgtgaagctcaaagaggttatccgagaaaatgatatattatacttcataatggaatacatggagtgtaatctctaccaacttatgaaggataaggtcaagcctttctcggagtctgaagtccgcaactggtgctttcagatatttcaggctcttgcttacatgcatcagaggggctactttcatcgtgacctcaaacctgagaatctgttggttagcaaagatgtcataaagctagcagactttggtcttgcaagggaagtttcatctttgccgccatatacagaatatgtctcaactcgctggtatcgggcaccagaagtattgctccagtcatctgcttatgattctgcagttgatatgtgggcaatgggtgccataatggctgagttgttgacactccatcctctctttcctggaactagtgaagctgatgagattcacaagatatgcaatgtcatcggtagtccagatgagcaatcttggcctcaaggattgtcacttgcagaagcaatgaagtatcagttcccacagatcaaaggcagtcaactggccgaggtgatgacaacagccagtagcgatgcaattgacctcatctcatcactatgctcatgggatcctagcaagagaccaaaggccgcagaagtcctccagcataccttttttcagggttgtacatgtgttccactccctgtccgtccaaaagcttcatcacttcctagaacacctccatgtgttggatcaaaaggaaattcagagaacagtgtggctagaagattctcaactggaactctatctacaatgaaatctcatagcaatgcatccgcaaaattaaatggtttatctaagactggtgtacaaagaaaacttaatttggatcgtcagccatcccaaaagggtatgaagccaaccgagactagcaataaactaactacgaatcgggtaccagctcggaatagcccagggaatcctgtacttaggcattcacggagcttgcctgaaactggccgaggagcaatacagaaggtctcatcaattacagagaaactatcccaaatgtctgtgacctctagaacacggagcgctgtgaagcctgctgcccccatgatgaaggccggacatggcaagtcggactttcttgggaagtctgacgatatccctccagcaaagaggctgacaagaaaattggtcagctaaatgagggtatgtggagtgaaaattcgatcagctgcaggaggggtgttgtgtatagtgtgcagaaaccagtgtgcccgaagaggatagtcagcctgagcgtttgcccatcgatggttgtgcggatttgccatcaccacagtttcgctgcgtcgagacatattagaatgggtttgcaaattcctttgtgaagtgctagagcctgcatcaagccttccccacttccgggcggttgatctgcttttttcctgcgaaaagcttgcccccatgttttaataaacatgattgtgctattaatttggtttggtttgccttgcaatgttatcttgcaccaatatcgctgtcacaaactgtatgcacatttaacagcttgtaaatccttgagcccaacaagggatggacatttcacatttggtttgaatgcacatttaacgcagtgaggtgccaatttggcgc

SEQ ID NO: 51176 - DNA, 2327 bp, Zea Mays
cttacgtgatgctgtgttttgtgattgcagcagcagtgaatttgggagcttgaagcattcatctgagacatggaaaaagtgatctgctgggcatatctccttcaacgcaagcagttctcgaaagaaactcttgattgctgtgtcttagctcgtgggaacactcctctctcctctctcgtgaactacacatagtgattatatgttcctctatgctcaacaacaagcaggctgatgcgatattttgctgaagttattatatttcagtctatgccagacatctacatcttcttttcaggtagatggtgctcatataagtgggggttgatatatttgctgtgttcagcttacatctgttgcggccctagttagctatttgtcttttgtgtactatctgaggcaagagattgatcagctaggacttggcgaacacttgcctgtgttggctgttcatctgaagggggaaatttgcacgagacacctcggatattacaacaatggatagattcaagttgattaaggaagttggcgatgggactttcgggagtgtatggcgtgctataaataaacagaatggtgaagttgttgctgttaagaaaatgaagaaaaagtattattcttttgaggaatgtatgggtttgcgtgaagtaaagtctttgcggcgcatgaatcatcctaacattgtgaagctcaaagaggttatccgagaaaatgatatattatacttcataatggaatacatggagtgtaatctctaccaacttatgaaggataaggtcaagcctttctcggagtctgaagtccgcaactggtgctttcagatatttcaggctcttgcttacatgcatcagaggggctactttcatcgtgacctcaaacctgagaatctgttggttagcaaagatgtcataaagctagcagactttggtcttgcaagggaagtttcatctttgccgccatatacagaatatgtctcaactcgctggtatcgggcaccagaagtattgctccagtcatctgcttatgattctgcagttgatatgtgggcaatgggtgccataatggctgagttgttgacactccatcctctctttcctggaactagtgaagctgatgagattcacaagatatgcaatgtcatcggtagtccagatgagcaatcttggcctcaaggattgtcacttgcagaagcaatgaagtatcagttcccacagatcaaaggcagtcaactggccgaggtgatgacaacagccagtagcgatgcaattgacctcatctcatcactatgctcatgggatcctagcaagagaccaaaggccgcagaagtcctccagcataccttttttcagggttgtacatgtgttccactccctgtccgtccaaaagcttcatcacttcctagaacacctccatgtgttggatcaaaaggaaattcagagaacagtgtggctagaagattctcaactggaactctatctacaatgaaatctcatagcaatgcatccgcaaaattaaatggtttatctaagactggtgtacaaagaaaacttaatttggatcgtcagccatcccaaaagggtatgaagccaaccgagactagcaataaactaactacgaatcgggtaccagctcggaatagcccagggaatcctgtacttaggcattcacggagcttgcctgaaactggccgaggagcaatacagaaggtctcatcaattacagagaaactatcccaaatgtctgtgacctctagaacacggagcgctgtgaagcctgctgcccccatgatgaaggccggacatggcaagtcggactttcttgggaagtctgacgatatccctccagcaaagaggctgacaagaaaattggtcagctaaatgagggtatgtggagtgaaaattcgatcagctgcaggaggggtgttgtgtatagtgtgcagaaaccagtgtgcccgaagaggatagtcagcctgagcgtttgcccatcgatggttgtgcggatttgccatcaccacagtttcgctgcgtcgagacatattagaatgggtttgcaaattcctttgtgaagtgctagagcctgcatcaagccttccccacttccgggcggttgatctgcttttttcctgcgaaaagcttgcccccatgttttaataaacatgattgtgctattaatttggtttggtttgccttgcaatgttatcttgcaccaatatcgctgtcacaaactgtatgcacatttaacagcttgtaaatccttgagcccaacaagggatggacatttcacatttggtttgaatgcacatttaacgcagtgaggtgccaatttggcgc

SEQ ID NO: 51177 - DNA, 1029 bp, Zea Mays
atgccgctcctcgaaatcctccatgcccccgcgcctgaaattcctccttcccctcccagaaccttccatagacgctacgtcgtgatcccctccaccggccattcaaccatctgcttccaactcctcggcgtccaggttgtccacaagcacaagcagggggcccttccatacatggctcgccccgcagaggcaggggggccttccaacgatggagcacctcgccccgcacaggcagggggcccttccatccatgagagcacgcaagcagctctcccccttcctccgcgcaaggcagtccactcggattatccgcaaatcgtgcctgccccacggcgcccttccatctacggtgaaatcctctccctccgcgccagctcggcagatccgcaaaccgcgtctgcaaccacggcgcacttccatccacggttcgttcctcctccaccacaacttctccccctgcgccccatcgctggaggcgcgatcctatcctcgaaatcctctccctccgagccagatctttgttcccatccatgccgacgcgcccgcgctgcgcattttgtgctgaaatccttccccgccctaaatgtcgtcgatggaagtccgaagggagcacagagtagaggtgaaattcatgcctggaggaccgccgaggagccagtcgtggagccgcgcccgaggaggaccgccaagggcgggcggccgggcacgcgccgcgccgggatgcacgggtgctggggccagaccgcacccgcccctgcgccggatccgaggccgaggtcgcgcccttgcccggaggcagagcagttcgctgctcgtgcccacgcggaggagcaactgggaaaacttcgtgaagaaaatgggtctcttaaaagaagcttggagagctgtaaggcagtttcagccaattctaatggcactttggaaagatcacctagagtgcaaaggaatgcagttcaagaaaattcattaaatctcaccaagcagaatggatatggtggtggttcttctcacagtacccaggcaaatggt

SEQ ID NO: 51178 - DNA, 1370 bp, Zea Mays
ccttgaatagtttgattaaaaactagtattgtacaatttttcataacggagatagcacgaaactaggatttttcatttcacattttcagcaaattcacacggccacgtggggcatggatattcaagggacaaggggcaccacgttgtccatttccctgccggcacctctactttatcactaggctacgaaacagtgccgcggtgcgcgcacacacagccaccacagcccagacccctcgcctcggcctcttttaaatatcgcgcatcccggcgccgcaaatggctcacgcggcgctgctccattgctcccagtcctccaggagcctcgcagcctgccgccgcggcagccactaccgcgccccttcgcacgtcccgcgccactcccgccgtctccgacgcgccgtcgtcagcctgcgtccgatggcctcgtcgacggctcaggcccccgcgacggcgccgccgggtctgaaggagggcatcgcggggctgtacgacgagtcgtcggggctgtgggagaacatctggggcgaccacatgcaccacggcttctacgactcgagcgaggccgcctccatggccgatcaccgccgcgcccagatccgcatgatcgaggaggcgctcgccttcgccggtgtcccagcctcagatgatccagagaagacaccaaaaacaatagtcgatgtcggatgtggcattggtggtagctcaaggtacttggcgaagaaatacggagcgcagtgcactgggatcacgttgagccctgttcaagccgagagaggaaatgctctcgctgcagcgcaggggttgtcggatcaggttactctgcaagttgctgatgctctggagcaaccgtttcctgacgggcagttcgatctggtgtggtccatggagagtggcgagcacctcccggactggtgctcaccttcagactatgtgaacattgccaagtcactgtctctcgaggatatcaagacagctgactggtcggagaacgtggccccgttttggcccgccgtgataaaatcagcgctaacatggaagggcttcacctctctgctgacgaccggatggaagacgatcagaggcgcgatggtgatgccgctaatgatccagggctacaagaaggggctcatcaaattcaccatcatcacctgtcgcaagcctggagccgcgtaggaggaggccaaggagcacaagttactagcacaggcacaggagtgccaagtgcaataatgtagatccgtggcaccatcgccgtctactcatctatactgcaccaaaatcaacattctcctaggacatgttaaataattttctgccactcgtcgagatatttcaaattcactgttccacacgcttccgttactgtc

SEQ ID NO: 51179 - DNA, 656 bp, Zea Mays
aacaaatgcaacgattgcactccaatgctgcaattacaatgcaatgaccggggtgagctagcacgcgtggcggctcctggagggacaataatcatcgtgacatggtgccataggaacctggatccatccgaaacctcgctaaagcccgatgaactgagcctcctgaggaggatatgcgacgcgtactacctcccggactggtgctcaccttcagactatgtgaacattgccaagtcactgtctctcgaggatatcaagacagctgactggtcggagaacgtggccccgttttggcccgccgtgataaaatcagcgctaacatggaagggcttcacctctctgctgacgaccggatggaagacgatcagaggcgcgatggtgatgccgctaatgatccagggctacaagaaggggctcatcaaattcaccatcatcacctgtcgcaagcctggagccgcgtaggaggaggccaaggagcacaagttactagcacaggcacaggagtgccaagtgcaataatgtagatccgtggcaccatcgccgtctactcatctatactgcaccaaaatcaacattctcctaggacatgttaaataattttctgccactcgtcgagatatttcaaattcactgttccacacgcttccgttactgtc

SEQ ID NO: 51180 - DNA, 1814 bp, Zea Mays
tgtagtgcagagatctactcccagtcccgggaaccagcttccagtgcctcatgtaccgatcatcggcaagggagtgctagaggaggagagcactgatgtgctggtgtcactgatgagggccttctccaaggaaggagatattaaagaaactgaggcaacatggcattggcttcttcggagtggttgtgagcttcctgcccaagcttatatctgccgaatggagctttatgcacgcactggtgagccaatgaaatccctagaaatgttcaaggaaatgaagaaccggaacatccctcctaatgttgcatcatatcataagattattgagataatgacaaaagctagagagatagagattgcagaaaaactcatggatgagtttgttgaaagtgatatgaaacatctgatgccagcctttcttgacttgatgtatttgtatctggatctggatatgcatgagaaactggaacatactttcaccaaatgccttggccgatgccgtccaaatagaatattatacaccatttatatggaatcacttgtgaggattgggaatgtctcgaaggccgaggagatctttgatgagatgcataaaaatgggatgataggtactaatgctaagtctgccaacatcctgctcagaggctatcttttggcagagaactatcagaaagctgagagcatttatgagttaatgtgtaaaaaaaagtacgatataccagtggaatctttggagaaacttcagagtggcctcctcagtagtaagaaagttgtcaagccaccaaaacctgtgagcatgaagttggatgaagagcagcgtgagattctgattggcttgctccttggaggcactcagatagaatctcatgcacagaaaggggtctacatcgtcaattttaagttccaggaagattctcatgctcactcagctctaagggtgcatattcacgaacgtttcttcgaatggctgccttcagcatgcagatcactgaatagggagagcgagatcccttatcgattttcaaccatacctcatgcacatttcggtttctttgcagatcagttctttcagaaaggccagcctgttctcccaaaacttgtccacaggtggctttccccacgggttctggcatattggttcatgtctgggggcgtcagactgcaatcgggtgatattgttcttaaggtcagtggcggggacactggtggtgttgagagaattgtgaagtccttgcaagcacaacaatctttagcatgtaaagtgaagaggaaagggagattcttttggataggtttccagggatgtaatgccgactctttctggaaaatagtcgaaacttatgtactggacagttttgctagttccaccgaggaaagccacaatgtaggttctgatggcttgcaagactatacatattatgagagtgatacgcagaggcatggtagagaaagtgaggagtgaggatagactttgttcacaagttgtctacattactttcctactaacacctgtcgcccagattgatctatcacctttccagctgatcgtctgtggttgcagtattgtactatagacagtcgtgagcagagagagatatgagtagcttggtggattcccttgttattgtacctggatttgcacagatgttcagtttttgctgcccattagtttgttgggttccatgatttccagctgaagatgcgtcatctccagaagagtcagttacgattacgacagcgtattctagtatgccactttgcaacctagaacttaacaattgacctgcagtcagctaacattatttccatgtaaa

SEQ ID NO: 51181 - DNA, 970 bp, Zea Mays
catccagtacaagacaacgagatgattcctacgcctcagttcagctgattaaatcaaacttatttcattcacagaagtccagagcgcattgttcacctgttattctataagctgattacattgttttcaaatggattaggggtcagcaaagaatttgccgccttcatgcacttcgacgttacctccaggaacgtgctttttcccccagaacgaggtgaaacagatacagacacctctgttcatcctcaacgcagcatatgattcatggcaggtaaggaacattttggtgccaggagtagctgaccctcatggaaaatggcatagctgtaagcatgatatagaccagtgctctgcatcgcagctacgggattcaggggtgattttctgaaggaagtggcagaactagggaactccgactcgagagggttgttcataaactcatgcttcgtgcactgccagtctgagatacaggagctatggttctcatctgactcccccgtgctcggaaacacaacagtagcaaacgctgttggcgactggttcttcgaccgcagctccttccagaagatagactgcccatacccttgtgactcgacctgtcacaatcggatctacgatgactcatcacaagcatagcaattacagtggcctcacttcgtgccggcggctttaactcggttgctaccggaaagtgagcgtgcatcttccgacggtacatggcatggtttatctggatggatgaatcgataatcataaattcttaaaaacacaataaatattctagaatttttatgttgtgcaaccgtgacttattttctctttgtattagtcatctatttatatacatcttgatactaaaaaataaaaagaaataaagaaagacatgcttacgataacttttcaaatcgagttcaatgctatctctattaaacaataggatttaagattacatgtcttactcacatttcat

SEQ ID NO: 51182 - DNA, 1071 bp, Zea Mays
catccagtacaagacaacgagatgattcctacgcctcagttcagctgattaaatcaaacttatttcattcacagaagtccagagcgcattgttcacctgttattctataagctgattacattgttttcaaatggattaggggtcagcaaagaatttgccgccttcatgcacttcgacgttacctccaggaacgtgctttttcccccagaacgaggtgaaacagatacagacacctctgttcatcctcaacgcagcatatgattcatggcaggtaaggaacattttggtgccaggagtagctgaccctcatggaaaatggcatagctgtaagcatgatatagaccagtgctctgcatcgcagctacgggggtgattttctgaaggaagtggcagaactagggaactccgactcgagagggttgttcataaactcatgcttcgtgcactgccagtctgagatacaggagctatggttctcatctgactcccccgtgctcggaaacacaacagtagcaaacgctgttggcgactggttcttcgaccgcagctccttccagaagatagactgcccatacccttgtgactcgacctgtcacaatcggatctacgatgactcatcacaagcatagcaattacagtggcctcacttcgtactgccattcaccatgttattacatttgacgcttccagcattgctaacagtagggcaatgcgttgatagccattgattttttttttctttttacgaataagatcaggtgccggcggctttaactcggttgctaccggaaagtgagcgtgcatcttccgacggtacatggcatggtttatctggatggatgaatcgataatcataaattcttaaaaacacaataaatattctagaatttttatgttgtgcaaccgtgacttattttctctttgtattagtcatctatttatatacatcttgatactaaaaaataaaaagaaataaagaaagacatgcttacgataacttttcaaatcgagttcaatgctatctctattaaacaataggatttaagattacatgtcttactcacatttcat

SEQ ID NO: 51183 - DNA, 1026 bp, Zea Mays
agacaacgagatgattcctacgcctcagttcagctgattaaatcaaacttatttcattcacagaagtccagagcgcattgttcacctgttattctataagctgattacattgttttcaaatggattaggggtcagcaaagaatttgccgccttcatgcacttcgacgttacctccaggaacgtgctttttcccccagaacgaggtgaaacagatacagacacctctgttcatcctcaacgcagcatatgattcatggcaggtaaggaacattttggtgccaggagtagctgaccctcatggaaaatggcatagctgattcaggggtgattttctgaaggaagtggcagaactagggaactccgactcgagagggttgttcataaactcatgcttcgtgcactgccagtctgagatacaggagctatggttctcatctgactcccccgtgctcggaaacacaacagtagcaaacgctgttggcgactggttcttcgaccgcagctccttccagaagatagactgcccatacccttgtgactcgacctgtcacaatcggatctacgatgactcatcacaagcatagcaattacagtggcctcacttcgtactgccattcaccatgttattacatttgacgcttccagcattgctaacagtagggcaatgcgttgatagccattgattttttttttctttttacgaataagatcaggtgccggcggctttaactcggttgctaccggaaagtgagcgtgcatcttccgacggtacatggcatggtttatctggatggatgaatcgataatcataaattcttaaaaacacaataaatattctagaatttttatgttgtgcaaccgtgacttattttctctttgtattagtcatctatttatatacatcttgatactaaaaaataaaaagaaataaagaaagacatgcttacgataacttttcaaatcgagttcaatgctatctctattaaacaataggatttaagattacatgtcttactcacatttcat

SEQ ID NO: 51184 - DNA, 817 bp, Zea Mays
cgaggagttccgtaactgtaaggaacattttggtgccaggagtagctgaccctcatggaaaatggcatagctgtaagcatgatatagaccagtgctctgcatcgcagctacgggggtgattttctgaaggaagtggcagaactagggaactccgactcgagagggttgttcataaactcatgcttcgtgcactgccagtctgagatacaggagctatggttctcatctgactcccccgtgctcggaaacacaacagtagcaaacgctgttggcgactggttcttcgaccgcagctccttccagaagatagactgcccatacccttgtgactcgacctgtcacaatcggatctacgatgactcatcacaagcatagcaattacagtggcctcacttcgtactgccattcaccatgttattacatttgacgcttccagcattgctaacagtagggcaatgcgttgatagccattgattttttttttctttttacgaataagatcaggtgccggcggctttaactcggttgctaccggaaagtgagcgtgcatcttccgacggtacatggcatggtttatctggatggatgaatcgataatcataaattcttaaaaacacaataaatattctagaatttttatgttgtgcaaccgtgacttattttctctttgtattagtcatctatttatatacatcttgatactaaaaaataaaaagaaataaagaaagacatgcttacgataacttttcaaatcgagttcaatgctatctctattaaacaataggatttaagattacatgtcttactcacatttcat

SEQ ID NO: 51185 - DNA, 814 bp, Zea Mays
aatatgggtaaggaacattttggtgccaggagtagctgaccctcatggaaaatggcatagctgtaagcatgatatagaccagtgctctgcatcgcagctacgggattcaggggtgattttctgaaggaagtggcagaactagggaactccgactcgagagggttgttcataaactcatgcttcgtgcactgccagtctgagatacaggagctatggttctcatctgactcccccgtgctcggaaacacaacagtagcaaacgctgttggcgactggttcttcgaccgcagctccttccagaagatagactgcccatacccttgtgactcgacctgtcacaatcggatctacgatgactcatcacaagcatagcaattacagtggcctcacttcgtactgccattcaccatgttattacatttgacgcttccagcattgctaacagtagggcaatgcgttgatagccattgattttttttttctttttacgaataagatcaggtgccggcggctttaactcggttgctaccggaaagtgagcgtgcatcttccgacggtacatggcatggtttatctggatggatgaatcgataatcataaattcttaaaaacacaataaatattctagaatttttatgttgtgcaaccgtgacttattttctctttgtattagtcatctatttatatacatcttgatactaaaaaataaaaagaaataaagaaagacatgcttacgataacttttcaaatcgagttcaatgctatctctattaaacaataggatttaagattacatgtcttactcacatttcat

SEQ ID NO: 51186 - DNA, 1395 bp, Zea Mays
ttcgtccagctccagccactcgatcagcatgccgggatccgaattcggagcctctccttttaccgattccctcttcttcttcctccagtccccgcacccctctccccgccttcgattacgccacgataaaatagctaaactactagcatgcgagtgggcgtgtccatgtgattgttcagcgtccaggcagcagagcagacagcccgcgcgcggaattgaattactagtcggattaggtgggcaaccacggagttgagcgcgcgatggagaaggggagcagcgggccgtcctgccgcgccgccatctgtggcatcgtcgtgctcctctgcgccgtcgccttctcctgctccctcgccgcggaattccgcaaggtcaaggagaaggacatgaagctggacggcagcctctgctcgctgcccaggagctccgcgttcgagctgggcgtcgccgccatcgccttcctcttcgtggcgcagctcgtgggcaccacggcggcggtgagcaccgcgtgcgccgccgagcccaagaagaggcagagctccgccgcccgagggcgcgtcgcgttcgtcgccctcctggccctctcatggctgagcttcgcggtggccgtggtcctgctggcgacggccgcgagcatgaaccacgggcagcggtacgggcgcgggtggctggacggcgactgctacgtcgccaggagcggcgtgttcggcggcgcggcggccctggtcgtcgtcacggcgctcatcaccctcggcctcaccttcgcgaccgaatcggccgcgggggccatggcgacaacgcccgcgtcgtcaccggcgacgcgcgcgaggatacgtgtcgacgcggcgtcggcggacgcggaacaaccgggcgggcgatccaggcaatgaggcaagcaggcaggcaggctggcagtggcaggggcgcggcgcggggcgggccaaccggaggcggcgggtgagcggcaacgctcgttccggctgcaaaaggccacgcccgcgtggacaacggaaagtggcaggcgctcgccgccggacccgacgggtgggaccgcgggggggcggatggattatggatataccgctggttggttggatatttagcagccgcgacagagggtacatacattaccgtttactgtcctcttactgacacgatcgtctaacatgtaaatgacgctaagcgatcattgcaaaaaaaaaaattgcaaagataaaccatacggaaattaccactttgttacagctgagtgttgagtgtttgtgtgcatgtgcaccaacctggtgctagtggtggtggggaatgggcatgttcagcctggcgccttgattggatgacctggacactgtactgtgattggtgacaataatactacattgaaaatttgaaatgatc

SEQ ID NO: 51187 - DNA, 1416 bp, Zea Mays
ccgggatccgaattcggagcctctccttttaccgattccctcttcttcttcctccagtccccgcacccctctccccgccttcgattacgccacgataaaatagctaaactactagcatgcgagtgggcgtgtccatgtgattgttcagcgtccagagataggttcagatgacacgagcaattatttttcgctaagacgtcgagataggcagcagagcagacagcccgcgcgcggaattgaattactagtcggattaggtgggcaaccacggagttgagcgcgcgatggagaaggggagcagcgggccgtcctgccgcgccgccatctgtggcatcgtcgtgctcctctgcgccgtcgccttctcctgctccctcgccgcggaattccgcaaggtcaaggagaaggacatgaagctggacggcagcctctgctcgctgcccaggagctccgcgttcgagctgggcgtcgccgccatcgccttcctcttcgtggcgcagctcgtgggcaccacggcggcggtgagcaccgcgtgcgccgccgagcccaagaagaggcagagctccgccgcccgagggcgcgtcgcgttcgtcgccctcctggccctctcatggctgagcttcgcggtggccgtggtcctgctggcgacggccgcgagcatgaaccacgggcagcggtacgggcgcgggtggctggacggcgactgctacgtcgccaggagcggcgtgttcggcggcgcggcggccctggtcgtcgtcacggcgctcatcaccctcggcctcaccttcgcgaccgaatcggccgcgggggccatggcgacaacgcccgcgtcgtcaccggcgacgcgcgcgaggatacgtgtcgacgcggcgtcggcggacgcggaacaaccgggcgggcgatccaggcaatgaggcaagcaggcaggcaggctggcagtggcaggggcgcggcgcggggcgggccaaccggaggcggcgggtgagcggcaacgctcgttccggctgcaaaaggccacgcccgcgtggacaacggaaagtggcaggcgctcgccgccggacccgacgggtgggaccgcgggggggcggatggattatggatataccgctggttggttggatatttagcagccgcgacagagggtacatacattaccgtttactgtcctcttactgacacgatcgtctaacatgtaaatgacgctaagcgatcattgcaaaaaaaaaaattgcaaagataaaccatacggaaattaccactttgttacagctgagtgttgagtgtttgtgtgcatgtgcaccaacctggtgctagtggtggtggggaatgggcatgttcagcctggcgccttgattggatgacctggacactgtactgtgattggtgacaataatactacattgaaaatttgaaatgatc

SEQ ID NO: 51188 - DNA, 1313 bp, Zea Mays
cgggatccgaattcggagcctctccttttaccgattccctcttcttcttcctccagtccccgcacccctctccccgccttcgattacgccacgataaaatagctaaactactagcatgcgagtgggcgtgtccatgtgattgttcagcgtccaggtgggcaaccacggagttgagcgcgcgatggagaaggggagcagcgggccgtcctgccgcgccgccatctgtggcatcgtcgtgctcctctgcgccgtcgccttctcctgctccctcgccgcggaattccgcaaggtcaaggagaaggacatgaagctggacggcagcctctgctcgctgcccaggagctccgcgttcgagctgggcgtcgccgccatcgccttcctcttcgtggcgcagctcgtgggcaccacggcggcggtgagcaccgcgtgcgccgccgagcccaagaagaggcagagctccgccgcccgagggcgcgtcgcgttcgtcgccctcctggccctctcatggctgagcttcgcggtggccgtggtcctgctggcgacggccgcgagcatgaaccacgggcagcggtacgggcgcgggtggctggacggcgactgctacgtcgccaggagcggcgtgttcggcggcgcggcggccctggtcgtcgtcacggcgctcatcaccctcggcctcaccttcgcgaccgaatcggccgcgggggccatggcgacaacgcccgcgtcgtcaccggcgacgcgcgcgaggatacgtgtcgacgcggcgtcggcggacgcggaacaaccgggcgggcgatccaggcaatgaggcaagcaggcaggcaggctggcagtggcaggggcgcggcgcggggcgggccaaccggaggcggcgggtgagcggcaacgctcgttccggctgcaaaaggccacgcccgcgtggacaacggaaagtggcaggcgctcgccgccggacccgacgggtgggaccgcgggggggcggatggattatggatataccgctggttggttggatatttagcagccgcgacagagggtacatacattaccgtttactgtcctcttactgacacgatcgtctaacatgtaaatgacgctaagcgatcattgcaaaaaaaaaaattgcaaagataaaccatacggaaattaccactttgttacagctgagtgttgagtgtttgtgtgcatgtgcaccaacctggtgctagtggtggtggggaatgggcatgttcagcctggcgccttgattggatgacctggacactgtactgtgattggtgacaataatactacattgaaaatttgaaatgatc

SEQ ID NO: 51189 - DNA, 1945 bp, Zea Mays
cacgagaattgaagtgggcggcggttcggcaaagggcaagggacggcgaccgcccaccggaggcggagacagatcgagatcggcgggggatggcggcgcgggaacgggacggtgaagggaggcgggcgcacttgacgatggttggcgtgcagctcgtctacgccgggtaccacgtcatcgctaagcaggcgctcaatgttggggtcaaccgcgtcgtcttctgcgtcttccgggacctcctcgccctctccgtcctcgcgccgctcgccttcttccagcaccgcatctcgtccgtgcaggcgcgtccgccgcctctcacccggcgcctcgtcggctcattcttccttctcgggctcactggcgtctttgggaaccagctgctgttcttgcttggcctcagctacactaaccccacctacgcggccgccattcagccgtctattcctgccttcaccttcatcctagcccttatcatggggaccgaaacggtgagcttgatctcaaacgagggcagagccaagataggtggcacagtcgtttgtgtgctgggagccgttctcatggtgctctatagaggcccagctgtgtttggtagcagcgagcttgagcttgatgtttatagtcatggtgttatagctgacatgacacagcctgagcctgccggacctctaatatctttgttcatggcctttgggctggaaaactggcacattggagtgctgtgcttgatagggaactgtctatgctccaattttggtgaaatatccttcaagtctgtcactgactgcatactcatacttctttggagtggttttaatggtcatttctggggtttttgcaacaaacgataaacacgattggagtttgactcaatccgaggttgctgctgttgtatatgctggtgtcatggcatctgctcttaattatgtcctattgacatggtccaacaaaatactgggacctgctatggtagcactttatagccctcttcagccagtggtctctgctctattgtctatgatttttctgggaagcccaatttaccttggaagtatttttggaggacttctaatcatcttcggtttataccttgtgacctgggcacgccacagagaaaaactggcaagtattggagtaccttatgtaacatgtgtatcggagtcactcgatggtccttctcatgttgcaaagactgtgcccttcatatctctttcaaggctgtgggatgtgccacatgagtcttgagaacttggaggtgtttgatctatacaacctttaggtacccctcttactaaaactatggatacagaaaacacacataaaaaagggaaatgccacagaaaataatattgatttatcttgtaaaattgtagtctgcccttctaggagcagttgggttagtcactagagagatttgacaggctaggtttatgtccgttggttttgtgagacttaacaactctgatgttgttggacggacctgacaccaaacgcaatgtgagctccactggggaaccgaagaaaaacagcatgcatattctgttaattcccacgtatacagacataaatttgtagctatacaccgacatcgattcaaagagcagtaactctgcatatctgttagtgcctgcggcttgtataatattgtccacattttgcaccatgtttctattttttttaataatggatagaaatgtggctcttaggtcaacggacgctattagatcaaaaataaaatctcaaaatacggtattttggcaaagagggagtatgtcgaacgcctcgtcggttgcgttatgaggttgttgtccagactgcaccgtgcacagccgacaatggcagtggtggacccataaaatctttgtgatttcatatactttttactcatgaaccctttctttgggttctgctacatttgcaatataagatagttcgtattcgtgaa

SEQ ID NO: 51190 - DNA, 1367 bp, Zea Mays
cacgagaattgaagtgggcggcggttcggcaaagggcaagggacggcgaccgcccaccggaggcggagacagatcgagatcggcgggggatggcggcgcgggaacgggacggtgaagggaggcgggcgcacttgacgatggttggcgtgcagctcgtctacgccgggctccaattttggtgaaatatccttcaagtctgtcactgactgcatactcatacttctttggagtggttttaatggtcatttctggggtttttgcaacaaacgataaacacgattggagtttgactcaatccgaggttgctgctgttgtatatgctggtgtcatggcatctgctcttaattatgtcctattgacatggtccaacaaaatactgggacctgctatggtagcactttatagccctcttcagccagtggtctctgctctattgtctatgatttttctgggaagcccaatttaccttggaagtatttttggaggacttctaatcatcttcggtttataccttgtgacctgggcacgccacagagaaaaactggcaagtattggagtaccttatgtaacatgtgtatcggagtcactcgatggtccttctcatgttgcaaagactgtgcccttcatatctctttcaaggctgtgggatgtgccacatgagtcttgagaacttggaggtgtttgatctatacaacctttaggtacccctcttactaaaactatggatacagaaaacacacataaaaaagggaaatgccacagaaaataatattgatttatcttgtaaaattgtagtctgcccttctaggagcagttgggttagtcactagagagatttgacaggctaggtttatgtccgttggttttgtgagacttaacaactctgatgttgttggacggacctgacaccaaacgcaatgtgagctccactggggaaccgaagaaaaacagcatgcatattctgttaattcccacgtatacagacataaatttgtagctatacaccgacatcgattcaaagagcagtaactctgcatatctgttagtgcctgcggcttgtataatattgtccacattttgcaccatgtttctattttttttaataatggatagaaatgtggctcttaggtcaacggacgctattagatcaaaaataaaatctcaaaatacggtattttggcaaagagggagtatgtcgaacgcctcgtcggttgcgttatgaggttgttgtccagactgcaccgtgcacagccgacaatggcagtggtggacccataaaatctttgtgatttcatatactttttactcatgaaccctttctttgggttctgctacatttgcaatataagatagttcgtattcgtgaa

SEQ ID NO: 51191 - DNA, 1331 bp, Zea Mays
cacaagaccaacaccaaccacctcatgcttgccttttgcttgtcgtgccctccgtcctcacagcttctcctccagtcatcccggtcccggccgcggccattttctatcccgtcaaccacatcagggcaacctgccaaacaccgcgattgcgcaatccgtccaaaccccgtcaacttcctgattccctctcccggagccatcgagatgctctcttcctccgttagttcagctaccgccgcgctgtctcgcgggtcgccgccgctccaagaagcatgccccgcctattgcttccatctccatcgcctcgcccctgtctgaacgactcggtgcgccgtccaccactctccaaatatcggttcttcctgcccaggactcggaggcggccaagtccgcggcttggcgtgcgaatggcagagatgaccaaggttgggagcgccggggaaccggccgaggttggggtttccatggagagtgacccgattgtgggaggggaggcgccgtcccgcccggggtgggaagcgagccggtgggcgcccgtggaggctgcgctgaatcggatgtgtactactggcttgggacaaattatctgaccatgattcttgggcctgcaactctgtcggtggctgcctatctgtcttggctacgggtgtctcggcgccttcatacactaaaccaggtcatggcgggagctgttgtaggatctgtcgtcggtgctctatggtttgtgctctggcattcgcttgtgcaggaggcttttgcttcttctctgctggtcaggattgcagtcgttcttggatcatcagcattttgtgttggctttgtcatctacatgattcgtcactggctcaaggatgagtaatgtacttcttagccgcaatgggagatcgactgataggcacggtgcgtttggatgagtgaatccgttccaattgttatcagaatcgcttgaaatggtgtcaaatgggttgtgagtggagcgattcacgagtgaaaccatttttaattaaaattcaatctagtagttaaatgatttcacgaagtgattctagttcgtgatcagaaacatttcaagaatttagatccaaaatgtttctatacccatcatggtgcaaagacctctaaacgcacatttgatttctgttgtgaattagacctttttatttaacactgaaggaaagttaaagcatggattcttgtggtaccgaataatcggccacttggtttccttttttttagaaaccttggtttccttttctattcactcttattttgcacaaattttagtgccttttagttagtagtgtatgactgaacagtcaacaatatttgct

SEQ ID NO: 51192 - DNA, 1520 bp, Zea Mays
cacaagaccaacaccaaccacctcatgcttgccttttgcttgtcgtgccctccgtcctcacagcttctcctccagtcatcccggtcccggccgcggccattttctatcccgtcaaccacatcagggcaacctgccaaacaccgcgattgcgcaatccgtccaaaccccgtcaacttcctgattccctctcccggagccatcgagatgctctcttcctccgttagttcagctaccgccgcgctgtctcgcgggtcgccgccgctccaagaagcatgccccgcctattgcttccatctccatcgcctcgcccctgtctgaacgactcggtgcgccgtccaccactctccaaatatcggttcttcctgcccaggactcggaggcggccaagtccgcggcttggcgtgcgaatggcagagatgaccaaggttgggagcgccggggaaccggccgaggttggggtttccatggagagtgacccgattgtgggaggggaggcgccgtcccgcccggggtgggaagcgagccggtgggcgcccgtggaggctgcgctgaatcggatgctatttggaagcgtgatgctgaaattatgtggtttttgctgggtgcggttggcaactctctgctttcgatggttcttaaaaagatgctaaaccatgaaagacccgcaccagctttgcggtctggccctgggatgccatcgtcccatgcacagtccatattctatgctgcgaccatcctggctctttcattgtactactggcttgggacaaattatctgaccatgattcttgggcctgcaactctgtcggtggctgcctatctgtcttggctacgggtgtctcggcgccttcatacactaaaccaggtcatggcgggagctgttgtaggatctgtcgtcggtgctctatggtttgtgctctggcattcgcttgtgcaggaggcttttgcttcttctctgctggtcaggattgcagtcgttcttggatcatcagcattttgtgttggctttgtcatctacatgattcgtcactggctcaaggatgagtaatgtacttcttagccgcaatgggagatcgactgataggcacggtgcgtttggatgagtgaatccgttccaattgttatcagaatcgcttgaaatggtgtcaaatgggttgtgagtggagcgattcacgagtgaaaccatttttaattaaaattcaatctagtagttaaatgatttcacgaagtgattctagttcgtgatcagaaacatttcaagaatttagatccaaaatgtttctatacccatcatggtgcaaagacctctaaacgcacatttgatttctgttgtgaattagacctttttatttaacactgaaggaaagttaaagcatggattcttgtggtaccgaataatcggccacttggtttccttttttttagaaaccttggtttccttttctattcactcttattttgcacaaattttagtgccttttagttagtagtgtatgactgaacagtcaacaatatttgct

SEQ ID NO: 51193 - DNA, 1393 bp, Zea Mays
gtgccctccgtcctcacagcttctcctccagtcatcccggtcccggccgcggccattttctatcccgtcaaccacatcagggcaacctgccaaacaccgcgattgcgcaatccgtccaaaccccgtcaacttcctgattccctctcccggagccatcgagatgctctcttcctccgttagttcagctaccgccgcgctgtctcgcgggtcgccgccgctccaagaagcatgccccgcctattgcttccatctccatcgcctcgcccctgtctgaacgactcggtgcgccgtccaccactctccaaatatcggttcttcctgcccaggactcggaggcggccaagtccgcggcttggcgtgcgaatggcagagatgaccaaggttgggagcgccggggaaccggccgaggttggggtttccatggagagtgacccgattgtgggaggggaggcgccgtcccgcccggggtgggaagcgagccggtgggcgcccgtggaggctgcgctgaatcggatgatgctaaaccatgaaagacccgcaccagctttgcggtctggccctgggatgccatcgtcccatgcacagtccatattctatgctgcgaccatcctggctctttcattgtactactggcttgggacaaattatctgaccatgattcttgggcctgcaactctgtcggtggctgcctatctgtcttggctacgggtgtctcggcgccttcatacactaaaccaggtcatggcgggagctgttgtaggatctgtcgtcggtgctctatggtttgtgctctggcattcgcttgtgcaggaggcttttgcttcttctctgctggtcaggattgcagtcgttcttggatcatcagcattttgtgttggctttgtcatctacatgattcgtcactggctcaaggatgagtaatgtacttcttagccgcaatgggagatcgactgataggcacggtgcgtttggatgagtgaatccgttccaattgttatcagaatcgcttgaaatggtgtcaaatgggttgtgagtggagcgattcacgagtgaaaccatttttaattaaaattcaatctagtagttaaatgatttcacgaagtgattctagttcgtgatcagaaacatttcaagaatttagatccaaaatgtttctatacccatcatggtgcaaagacctctaaacgcacatttgatttctgttgtgaattagacctttttatttaacactgaaggaaagttaaagcatggattcttgtggtaccgaataatcggccacttggtttccttttttttagaaaccttggtttccttttctattcactcttattttgcacaaattttagtgccttttagttagtagtgtatgactgaacagtcaacaatatttgct

SEQ ID NO: 51194 - DNA, 733 bp, Zea Mays
gtgtttcttggaagctacaagcctccaacatgttcatcttggctacgggtgtctcggcgccttcatacactaaaccaggtcatggcgggagctgttgtaggatctgtcgtcggtgctctatggtttgtgctctggcattcgcttgtgcaggaggcttttgcttcttctctgctggtcaggattgcagtcgttcttggatcatcagcattttgtgttggctttgtcatctacatgattcgtcactggctcaaggatgagtaatgtacttcttagccgcaatgggagatcgactgataggcacggtgcgtttggatgagtgaatccgttccaattgttatcagaatcgcttgaaatggtgtcaaatgggttgtgagtggagcgattcacgagtgaaaccatttttaattaaaattcaatctagtagttaaatgatttcacgaagtgattctagttcgtgatcagaaacatttcaagaatttagatccaaaatgtttctatacccatcatggtgcaaagacctctaaacgcacatttgatttctgttgtgaattagacctttttatttaacactgaaggaaagttaaagcatggattcttgtggtaccgaataatcggccacttggtttccttttttttagaaaccttggtttccttttctattcactcttattttgcacaaattttagtgccttttagttagtagtgtatgactgaacagtcaacaatatttgct

SEQ ID NO: 51195 - DNA, 1086 bp, Zea Mays
caaaaattaaaatctctcgtaccaaaaaaaaaaaaaatcgtgctcggcacacgcaggcggctctcagcgacggaggggcagacgccagacgggcagtcccagctcgctacatcaacatgaggctcaataaggtggaagtgaaccttataaggctgttggaggctgctccacggcagcaaaatcaggctaaacttgtctattatgtaaccacagcgcgggagctgttggagcagctaggagctgagacaacaccagaagggatatcaagcatttcaaaagctaagctttctgagtattcagaaaagattgaagcacttgcttccaggcttgctgcttcagtgcctgaaaatgaaaagccgattattgaaagcaaagatgaaatctcttatgaagaagcaaagccagaaagtccaatatctttatcatcaggactgcgaaggagatcaacagcccatgctgtggttggaacaagccatcaggaaaataaagaagatatcggagcaccgataaaattggatgcagaagctcaggctcacattgagaagcataggaagctccaagaagatttgactgatgaaatggtcgagttagcacgtcaactgaaggaaagtagcctaatgatgaaccaatccgtgcaggagacagagaagatccttgattctaccgagagggccgtggagcacagcctggcaagcacaggccacgcaacctcgcgagctgcggaggtctactcgctggcttccaagactacgtgcttccagtggctgctaatgtttgtgatgacctgcatgtttgtaatggtggttctgctgataaggatcacttgaatgatgaggctgtagcaggcactcaaatcgtagtcacccttgtctttgtttcatgggaattctttgtggtcaggtcatggtatttttccgagcaagtgtccccaaccaaacaagcctgctgtatgagagagaaactggaacagctgcctgtacagaggcttggtggtcgctgttttattggtcaggcctgagagactcccgtcggagacagaaaccggcggtcggcgttgcctcagcgtggttttcacgcagggtgatt

SEQ ID NO: 51196 - DNA, 1049 bp, Zea Mays
ctctcgtaccaaaaaaaaaaaaaatcgtgctcggcacacgcaggcggctctcagcgacggaggggcagacgccagacgggcagtcccagctcgctacatcaacatgaggctcaataaggtggaagtgaaccttataaggctgttggaggctgctccacggcagcaaaatcaggctaaacttgtctattatgtaaccacagcgcgggagctgttggagcagctaggagctgagacaacaccagaagggatatcaagcatttcaaaagctaagctttctgagtattcagaaaagattgaagcacttgcttccaggcttgctgcttcagtgcctgaaaatgaaaagccgattattgaaagcaaagatgaaatctcttatgaagaagcaaagccagaaagtccaatatctttatcatcaggactgcgaaggagatcaacccatcaggaaaataaagaagatatcggagcaccgataaaattggatgcagaagctcaggctcacattgagaagcataggaagctccaagaagatttgactgatgaaatggtcgagttagcacgtcaactgaaggaaagtagcctaatgatgaaccaatccgtgcaggagacagagaagatccttgattctaccgagagggccgtggagcacagcctggcaagcacaggccacgcaacctcgcgagctgcggaggtctactcgctggcttccaagactacgtgcttccagtggctgctaatgtttgtgatgacctgcatgtttgtaatggtggttctgctgataaggatcacttgaatgatgaggctgtagcaggcactcaaatcgtagtcacccttgtctttgtttcatgggaattctttgtggtcaggtcatggtatttttccgagcaagtgtccccaaccaaacaagcctgctgtatgagagagaaactggaacagctgcctgtacagaggcttggtggtcgctgttttattggtcaggcctgagagactcccgtcggagacagaaaccggcggtcggcgttgcctcagcgtggttttcacgcagggtgatt

SEQ ID NO: 51197 - DNA, 1662 bp, Zea Mays
ctctcgtaccaaaaaaaaaaaaaatcgtgctcggcacacgcaggcggctctcagcgacggaggggcagacgccagacgggcagtcccaggttcggcgtcgtcgtcagcggctccccctcctgccagtcgcctcgcgccttcgcctccggtcctccgcacacctgctggctgccggcgactctgcgtgcgcgcctcccgcttcccttccgcctccgctggaccgtcgactgcgccctgcgccagcggccgctgctccaccaaggcggtcgcgccgctttgggaacgcttatgccccaaactgaagcgttacccgcttagcgctgaagcgtgcgcttagtgcagccttttggaaccctggatctgccagtacctgtactgggtccgctcttgcgcgaaccctactgtttggctattcgtatccagaattccagatctgatataattactacggtaatgtatacatttgtatttttggcaaatgtatacatgtgtttttactacgggactgatttggtggacagggtgatccatggggagtaatccccttgctatttgctatacaccaaatcagccctaacttcgtttttttttcttccaaactttattggctatacatttgtacacccatgaactaactttacttaatccgcctgtgaacacgcaatgctcctcgtcaagctcgctacatcaacatgaggctcaataaggtggaagtgaaccttataaggctgttggaggctgctccacggcagcaaaatcaggctaaacttgtctattatgtaaccacagcgcgggagctgttggagcagctaggagctgagacaacaccagaagggatatcaagcatttcaaaagctaagctttctgagtattcagaaaagattgaagcacttgcttccaggcttgctgcttcagtgcctgaaaatgaaaagccgattattgaaagcaaagatgaaatctcttatgaagaagcaaagccagaaagtccaatatctttatcatcaggactgcgaaggagatcaacagcccatgctgtggttggaacaagccatcaggaaaataaagaagatatcggagcaccgataaaattggatgcagaagctcaggctcacattgagaagcataggaagctccaagaagatttgactgatgaaatggtcgagttagcacgtcaactgaaggaaagtagcctaatgatgaaccaatccgtgcaggagacagagaagatccttgattctaccgagagggccgtggagcacagcctggcaagcacaggccacgcaacctcgcgagctgcggaggtctactcgctggcttccaagactacgtgcttccagtggctgctaatgtttgtgatgacctgcatgtttgtaatggtggttctgctgataaggatcacttgaatgatgaggctgtagcaggcactcaaatcgtagtcacccttgtctttgtttcatgggaattctttgtggtcaggtcatggtatttttccgagcaagtgtccccaaccaaacaagcctgctgtatgagagagaaactggaacagctgcctgtacagaggcttggtggtcgctgttttattggtcaggcctgagagactcccgtcggagacagaaaccggcggtcggcgttgcctcagcgtggttttcacgcagggtgatt

SEQ ID NO: 51198 - DNA, 1168 bp, Zea Mays
ctctcgtaccaaaaaaaaaaaaaatcgtgctcggcacacgcaggcggctctcagcgacggaggggcagacgccagacgggcagtcccaggttcggcgtcgtcgtcagcggctccccctcctgccagtcgcctcgcgccttcgcctccggtcctccgcacacctgctggctgccggcgactctgcctcgctacatcaacatgaggctcaataaggtggaagtgaaccttataaggctgttggaggctgctccacggcagcaaaatcaggctaaacttgtctattatgtaaccacagcgcgggagctgttggagcagctaggagctgagacaacaccagaagggatatcaagcatttcaaaagctaagctttctgagtattcagaaaagattgaagcacttgcttccaggcttgctgcttcagtgcctgaaaatgaaaagccgattattgaaagcaaagatgaaatctcttatgaagaagcaaagccagaaagtccaatatctttatcatcaggactgcgaaggagatcaacagcccatgctgtggttggaacaagccatcaggaaaataaagaagatatcggagcaccgataaaattggatgcagaagctcaggctcacattgagaagcataggaagctccaagaagatttgactgatgaaatggtcgagttagcacgtcaactgaaggaaagtagcctaatgatgaaccaatccgtgcaggagacagagaagatccttgattctaccgagagggccgtggagcacagcctggcaagcacaggccacgcaacctcgcgagctgcggaggtctactcgctggcttccaagactacgtgcttccagtggctgctaatgtttgtgatgacctgcatgtttgtaatggtggttctgctgataaggatcacttgaatgatgaggctgtagcaggcactcaaatcgtagtcacccttgtctttgtttcatgggaattctttgtggtcaggtcatggtatttttccgagcaagtgtccccaaccaaacaagcctgctgtatgagagagaaactggaacagctgcctgtacagaggcttggtggtcgctgttttattggtcaggcctgagagactcccgtcggagacagaaaccggcggtcggcgttgcctcagcgtggttttcacgcagggtgatt

SEQ ID NO: 51199 - DNA, 1097 bp, Zea Mays
ataatccacttttatgcattttgcatcaatgtaaaatcctgaaacctgtgcagggagtattagttgccagttaagagtacattctgataagccttttgcattttgctgctatttcgatttgtctgatactggcattgggttttaatattttgttaggtctttatgacttaacattctgaagagtgacaaaatgctcccaaaatgataagaatgaggatctagggctttaagtgctccacgaacctatcctccagaaaaatcattcttctgccatgaaagcatttcaaaagctaagctttctgagtattcagaaaagattgaagcacttgcttccaggcttgctgcttcagtgcctgaaaatgaaaagccgattattgaaagcaaagatgaaatctcttatgaagaagcaaagccagaaagtccaatatctttatcatcaggactgcgaaggagatcaacagcccatgctgtggttggaacaagccatcaggaaaataaagaagatatcggagcaccgataaaattggatgcagaagctcaggctcacattgagaagcataggaagctccaagaagatttgactgatgaaatggtcgagttagcacgtcaactgaaggaaagtagcctaatgatgaaccaatccgtgcaggagacagagaagatccttgattctaccgagagggccgtggagcacagcctggcaagcacaggccacgcaacctcgcgagctgcggaggtctactcgctggcttccaagactacgtgcttccagtggctgctaatgtttgtgatgacctgcatgtttgtaatggtggttctgctgataaggatcacttgaatgatgaggctgtagcaggcactcaaatcgtagtcacccttgtctttgtttcatgggaattctttgtggtcaggtcatggtatttttccgagcaagtgtccccaaccaaacaagcctgctgtatgagagagaaactggaacagctgcctgtacagaggcttggtggtcgctgttttattggtcaggcctgagagactcccgtcggagacagaaaccggcggtcggcgttgcctcagcgtggttttcacgcagggtgatt

SEQ ID NO: 51200 - DNA, 2271 bp, Zea Mays
ggaaagagaacaaaagtgccccaccccacaccgtgcttaaaaaatttatataaatcgcccaaacttttctcggacccttttatccttcgccctaacacagaccaggaggacacaggcccacagaattcacaagaggggaagtatagagagagggaggagcggcaccggagcctggaggggagatttcgtttggcgcactagggagtggagagcgatagagttggaaggtggaatcagaaatccacggcgaatacagggagtaggggggatctggagctcctgaggagtagtagtaggtaggagctgtaattgtaacggttggcatagggggatcctctcgatctgttcttgagctggaagactcccatcttttgagccgcggagctggagaaacttggatctcgaggccctccaagagaaaccgtttctcgctgctaccctcctgcattgctgcctctcccccctcacacccgacctgccacaaggagaagggtggaatctctgctcgccttctccactaatcggctcagaatctgggttccttgacctgttcttgggagcgccgtgcctcaaatctttaggggggaaaaaggtcgattttttttttgtgtgtgtgttgggtagatgcgggagtgatgtcgactactttatgagctgccccctcccctgctactttgggggtttagattcgctatagttatggcggatctcgccatggaccattaggagttccatttcgtcgaaggcgaaaggagcttgcccgtaagctgcaatgtctctcaagagcatcgttcgggagctgaaggagatgagggacggcatcgggagcatgtcgagacgcggcggcagcggctccgacggccgcgccgccggccacgcccgctcggggtcgcggcattcctggcctagcctgtgggcggagcagcaacagccgcagcggcagggccagggccagggcctgggtcaggaggggccgcggcatcagcaccaggggcggtgggcggacctgcctccggaactgctgctggatgtgatacagagggtggagtccagcgaggcgacgtggccggcgcggcgccaggtcgtggcgtgcgccgctgtttgccggtcgtggcgcgaggtcaccaaggatgtggtgaagacgctcgaggagtgcggcagaatcaccttccccatatcccttaagcagctatgaatgtggaaaacgacaagctattgcttgcagctcgtaaggtcaggcgtgccactcggacttctttcgtgatctcactggtctctgatgatttctctcgctccagtagcacctacgtcggcaagctgaagccgaacttcctcggcacaaagttcacgatattcgacagccagccgcctcccgacgctgttgcgctaccaaacaacagaccgagcaaaaggcagtcgaagcaagtgtcaccgagactgccactaggcaactacaacgtcgccacggtcacgtatgagctcaccgtcctgcgcaacagggggccaaggagaatgcagtgcaccatgcactcgataccagccgagtgcatccaggagggcgggaaggccccaacccctaccggcaccgtccagtcgcttgacgagccagtgcccaccttacctagtaccaccaaggggaaggaagtggctgtacaattttcttcgacgagcctcagcgccgatctgtctggaccggtttctgggaacgaagcgcctctagttctgaagaacaaagccccgcgctggcacgagcagctgcagtgctggtgcctcaacttccgggggcgtgtcaccgtcgcttcggtgaagaacttccagctcgtcgcgtcagttgacccttccctaaacgtccccgcagcggagcaggagaaggtgatcctccagttcgggaagatcgggaaggatatattcaccatggactaccggtacccactctcggcgttccaggccttcgcgatctgcctgaccagcttcgacaccaagccagcgtgcgaataactgaaggtagcataaaagctggggtgggtatgttcgtcctgggcgacgtgaatttcttgatcttgccacatcggagcctgtgcccaggcgaaatggtcgcttgtgatgggggtgtgaagatgagctatggcatttgtaccataggaacagatttgaacgacctggactgttatatgtatcgttgttgggatgcctggctgtgaaatatcactgccgcatcgtatcgataatggtcgttgtggctatcttgctcgctcgtttctgcgatcgttt

SEQ ID NO: 51201 - DNA, 1116 bp, Zea Mays
cacaactgtaaccagtaaactgtgtgagcgtccgctatgaatgtggaaaacgacaagctattgcttgcagctcgtaaggtcaggcgtgccactcggacttctttcgtgatctcactggtctctgatgatttctctcgctccagtagcacctacgtcggcaagctgaagccgaacttcctcggcacaaagttcacgatattcgacagccagccgcctcccgacgctgttgcgctaccaaacaacagaccgagcaaaaggcagtcgaagcaagtgtcaccgagactgccactaggcaactacaacgtcgccacggtcacgtatgagctcaccgtcctgcgcaacagggggccaaggagaatgcagtgcaccatgcactcgataccagccgagtgcatccaggagggcgggaaggccccaacccctaccggcaccgtccagtcgcttgacgagccagtgcccaccttacctagtaccaccaaggggaaggaagtggctgtacaattttcttcgacgagcctcagcgccgatctgtctggaccggtttctgggaacgaagcgcctctagttctgaagaacaaagccccgcgctggcacgagcagctgcagtgctggtgcctcaacttccgggggcgtgtcaccgtcgcttcggtgaagaacttccagctcgtcgcgtcagttgacccttccctaaacgtccccgcagcggagcaggagaaggtgatcctccagttcgggaagatcgggaaggatatattcaccatggactaccggtacccactctcggcgttccaggccttcgcgatctgcctgaccagcttcgacaccaagccagcgtgcgaataactgaaggtagcataaaagctggggtgggtatgttcgtcctgggcgacgtgaatttcttgatcttgccacatcggagcctgtgcccaggcgaaatggtcgcttgtgatgggggtgtgaagatgagctatggcatttgtaccataggaacagatttgaacgacctggactgttatatgtatcgttgttgggatgcctggctgtgaaatatcactgccgcatcgtatcgataatggtcgttgtggctatcttgctcgctcgtttctgcgatcgttt

SEQ ID NO: 51202 - DNA, 663 bp, Zea Mays
aggagattttggacttgcatactgaacccaacattctggaaggagaatgacgtcgtacccccgtgcgcatgtgtgcaaaatgagattgtgtatgataaaagtcgggagctcatggaggatttagcagtcgaggcattcaagacgttactggtccggaccaaggccagaattgttgaaggagacgctggaaaagttatttgccgagaagcagatcgactgaagcctgccgctgtcattcttggtacacgtggtagaggccttattcaaagtgtgttgcagggaagtgtcagtgagtattgcttccacaactgtaaagcagccccaattatcattgtgcctgggaaagaagctggtgaacagtctgtgctttgaaggaagatgagtaggagagttgttcctgttcgttgtactgtcagtttaggtgataaagtgttgtatattggtgctggtttgttgtgggaacatgtccttaagtgctttgctttgcttgtaatctgaagctctgaaccctctgtctggcttggttatgaaggaatgcttagaaaccgggagagtagcagacaaacatataacacaagaaatgtacttgtattgccattgctgacagaatacttcattagtacagttgatatgaataaagaatcttcagccacaagttttttt

SEQ ID NO: 51203 - DNA, 1048 bp, Zea Mays
actgaacccaacattctggaaggagaatgacgtcgtacccccgtgcgcatccggtgggaaaaattttttagaaatgcgcggcacacgacaggaattttgatccgccttcctatgttggccgggcgcaaactcgtaggataacgcctactatacggaaccccgtcgggaattaatgcgcccgtcctcgccagtcgccacgaccgcagcaatccgccgcccttggccgtgccccgtgctgccgtactcgtaatccgtgagggaaagcgtccgcgctccgggccccgccgccgatagttccttcaagggagcgacgagcgcgcggtcgatggagacggtggaggaggacgtggaggagtacagctggcgggaggtggtgctgccgcacctcgtccccgtggttcccggcgcgcaaccggagctcgagcgggagaccggggagcggcgccgcggcagggacctcctcgtcgccgtcgacttcggcccgaactccaagcacgcctttgactgggcgctcgggcacatcgcgcgcatggccgacacggtccacctcgtccatgccgtctccagtgtgcaaaatgagattgtgtatgataaaagtcgggagctcatggaggatttagcagtcgaggcattcaagacgttactggtccggaccaaggccagaattgttgaaggagacgctggaaaagttatttgccgagaagcagatcgactgaagcctgccgctgtcattcttggtacacgtggtagaggccttattcaaagtgtgttgcagggaagtgtcagtgagtattgcttccacaactgtaaagcagccccaattatcattgtgcctgggaaagaagctggtgaacagtctgtgctttgaaggaagatgagtaggagagttgttcctgttcgttgtactgtcagtttaggaatgcttagaaaccgggagagtagcagacaaacatataacacaagaaatgtacttgtattgccattgctgacagaatacttcattagtacagttgatatgaataaagaatcttcagccacaagttttttt

SEQ ID NO: 51204 - DNA, 2062 bp, Zea Mays
cgggccgcacatagttctgaagccccagtttgggaattaggattagagccccttgtgaatctcgacccattaccagacccacgcgtgcgctctcctgggccgaacaaaaccccggacggctaccgttcagtggccagcgtttcaacagtaatcagagtaatctctctgtgcctgcgacgacgactaggtgggttaccgccgtcgcgccgccgccgccgccgccgtcatactacaggtgcgaggccttcatcggtatcttaacaggcgacgaacaccaaccagtctgcactctacgatggcggcgcctccggccacggctcccgcggcctcccggtgtctctccggtgccaagtcgtgctgggctgctgagcggagctccagctcgtttgccgtctcggcgccttctactggcctccggcaaagtaggagccgcgtcctcagcgttcgtgccaaggttgccactggcgtgcagagagccagcactgtggatgatggagcgaaaaggccgtggaagctcagtgatgctcgtcttgtcctggaagatggttcagtgtggagggccaagtcttttggcgcatcaggaacacaagtcggtgaagttgttttcaacacatcactgacaggctatcaggagattttgacagatccaagctatgctggtcaatttgtcctgatgaccaatccccatattggtaacactggcgttaatcctgacgatgaagaatcaaaccaatgttttcttggtggccttatcataagaaatctaagcatatgtacttccaactggcgatgcaaagaaacacttgaagagtatctgactaagaggaacatcatgggaatatatgacgtggatacacgtgctataacacgaagattaagagaagacggcagtcttattggtgtcttgagtactgatcagtctcagacagacaatgagttgttggaaatggccaaaaagtggaaaattgttggagttgatttgattagtggtgtcacatgtgatgctccatatgaatggttggacaagactgactcagaatgggagttcaagagggatcagtcaagtgaaacttttcatgtggttgcctatgactttggtatcaaacataatattttgagacgattgacatcatatggatgcaaaataacagttgttccagcaaattggcctgcttcagaggtactcaatttgaagcctaatggtgttctttttagcaatggtcctggagatccagctgcagttccctatgctgtgaagacagtacaagacataattggaaaggttcctgttttcggcatctgtatgggccaccaattgattgggcaggcgcttggtgggaagacatttaaaatgaaatttggtcatcatggtgggaatcaccctgtctgtgatctccgtagtgggcgtgtagacataagtgcacagaaccataactacgcagttgacccagaatcacttccagaaggagcagaagtaactcacgtcaatctcaacgacaatagttgtgctggccttcagtacgccaagatgaagcttgtgtctctccagtaccatcctgagtcttccccaggtccgcatgattccgacacagccttcggtgagtttatagagctcatgaagagcaacagattgtgagggaggggagtactggcaaaggtcaacaattgtcttggtgctctctcgcagcaagctcaaaagaatttgtttcattttagtgtttttctttgggatgttcatgtacttgaattttgggtccagaggacatagcataagatgctctgcagctgtaccatgaattgaagtagtgaactggttgaatttcttgagaataacatgttatcaaattgcacggtacagtatactcagattatgctcgcgaatttctggccggcaagtaaagtggtgagcaccagtagactagttagtatagagataaaggatggccatgaaggctcgtcagtggatacttctgttgttccaagctaatcagatgtgcacaagcacaacgttgttgccagctttttaaatgactgatggaaaatcatccagcttttgttggcg

SEQ ID NO: 51205 - DNA, 1131 bp, Zea Mays
tgcacacttaagtacctatctccactgatggacctaaaaggagttgatttgattagtggtgtcacatgtgatgctccatatgaatggttggacaagactgactcagaatgggagttcaagagggatcagtcaagtgaaacttttcatgtggttgcctatgactttggtatcaaacataatattttgagacgattgacatcatatggatgcaaaataacagttgttccagcaaattggcctgcttcagaggtactcaatttgaagcctaatggtgttctttttagcaatggtcctggagatccagctgcagttccctatgctgtgaagacagtacaagacataattggaaaggttcctgttttcggcatctgtatgggccaccaattgattgggcaggcgcttggtgggaagacatttaaaatgaaatttggtcatcatggtgggaatcaccctgtctgtgatctccgtagtgggcgtgtagacataagtgcacagaaccataactacgcagttgacccagaatcacttccagaaggagcagaagtaactcacgtcaatctcaacgacaatagttgtgctggccttcagtacgccaagatgaagcttgtgtctctccagtaccatcctgagtcttccccaggtccgcatgattccgacacagccttcggtgagtttatagagctcatgaagagcaacagattgtgagggaggggagtactggcaaaggtcaacaattgtcttggtgctctctcgcagcaagctcaaaagaatttgtttcattttagtgtttttctttgggatgttcatgtacttgaattttgggtccagaggacatagcataagatgctctgcagctgtaccatgaattgaagtagtgaactggttgaatttcttgagaataacatgttatcaaattgcacggtacagtatactcagattatgctcgcgaatttctggccggcaagtaaagtggtgagcaccagtagactagttagtatagagataaaggatggccatgaaggctcgtcagtggatacttctgttgttccaagctaatcagatgtgcacaagcacaacgttgttgccagctttttaaatgactgatggaaaatcatccagcttttgttggcg

SEQ ID NO: 51206 - DNA, 2926 bp, Zea Mays
aaattttacacatacgcctttggtagcacatagcactagtcacgtccatgtccatcccggcccttggtagcactaacatcgaagcatcctcctccgtccacgacccacaccgccgtgctcaaattcggccttgccagcgccgccgagcgtccagcgccgacccaagcacgtgaggagttggacaccaccgagaggaactctctggtcctgctcgtggtggtcgtcgtcatcgcttcccgggcctgagaactgtggcgtacgcgtcctttccctcccgcggcaaggcaacagccgccgtcgccctaagccaggtgcccaggtattcgtcggtcccttcgccaggcctccctcgcttgccgccaacgagcacccactagactgtagactacaattgcatcctgaagaataaaatggaccaacatgattccatggctgactcaccaaggaggcggcacaaccttttgcgtgacaaggtccaattggtgaaaaggaaagattcagatcgctatgagatcgtccgcttccatgatccactgtcttttgagaaaggcttctttgttgtgatccgtgcttgccagcttttggcacagcacaatgacgggataatatttgttggtgttgctggcccctctggtgctgggaagactgtgttcactgagaaggtggtcaatttcatgcctgatgttgctgtgatatcaatggacaactataatgacgcaactcgcatagtcgatggcaattttgatgatccacgtctgacagactatgacacactgctggaaaatatacatggtctgaaggaaggaaggtcagttcaggttccaatatatgatttcaagtcaagctgccggactggttatagaacagttgatgtccctagctcccgaattgttatcattgaaggtatttatgcactgagtgagaagttacggccagtgatagacttgcgtgtttctgtcactggtggtgttcattttgacctagtcaagagggttttaagggatatacagcgagctggccaggagcctgaagaaataattcatcagatctctgaaacggtttatccaatgtacaaggctttcatcgaaccagatttggagaccgcacatattaagatcatcaacaagttcaacccattttcagggttccaaaatcctatgtacattctaaagtcaccaaggtctctaggacctgagaaaatcaaggctgtgcttggtgatgatcatacggaaagcaacgaagaaacttatgatatatatctgcttccacctggtgaagacccagaagcatgccaatcttacttgagaatgcggaatagggaagggaaatataatctaatgtttgaggaatgggtgaccgacaattcttttatcatatcaccaaggatcacttttgaagtcagtgttcgtcttcttggtggtttgatggcattgggatatactatagcagctatactgaagagaagcactcgtgttttttctgatggcaaggcaactgttaaaattgattggctggaacaacttaacagacaatatatacaagtgcaaggaagagatcggctttatgttaaatctgtagcggatcagttaggtttggatggttcttacataccacgcacatatattgaacaaattcagctggagaaattgattaatgatgttatggcgttaccagaagatttgaagacaaagctcagcatcgacgatgagctggtctcaagtccaaaggaagccttttcccgtgtttcggctgatcggagaaacaaacttatgaagagtggcctatctcaatcatattcaacacacggagacaaaaatattgtgaaattgagtaaactaacagaaaccaataggaggtttggtggagggcgggcccttgaaccgcctgctatcaaccagggtgcaatcacccagctttcagaacagatatcaacattgaatgaaaggatggatgagtttacctctcgagttgaagaactcaactcgaaatttacagtgaaaaaacatttgcccagtcagcagaacttagctcttccaaatgatgcttgcaatggttccacgcctacaaatctctttgtctctcatttaggcaatggtactctgatacctcattcttcatcatcaaaccaactttcaaaggattccccgatgatagaagagattatgaacataacaagaggtcagcgccaggttatacatcagctcgacaatctgacaaatctgcttcacgagcatttggtcttaacacgccagactaataataccgccagcaggaaccgggtgctggatagcgacacactcatctgtccacttatttgcctgactgttgccagtatcggttacttcatgtttaaaggtctcagtaggggctgagcaaagtgagttggcccaaacatgtgctccgaggctcaccaccaagttttggcagaactggagctaaaggaagacagttcttgaaccgtttacatcaggaagatcatatctaacagcttacggtcttattaagacaggtaaacctatataccagcacatggaacaaagctttcgcttttcagggagttattactcccaaacgcagaaaatggtgtaccagaagcatacacttctgtaacaggcactgacagttcccagtgctaataaattttggaggttaaaataatgctcagataatgtcgaagaaattatgagagatctataagtttaactgaacattgtcgttgtctttgtcgtgatttctgagtgcgagcactatctcatgatgccatctgaattcacgattctacaaaattgtcttttattttattctcacaagtaaccgggattaacaattgctgcatatttgacgttccgtatggtacaactgtcggaaacgttgaaacggaggagagggtgtagaattcgtcgcgcgctaaaaataacaaagaaaa

SEQ ID NO: 51207 - DNA, 2803 bp, Zea Mays
aaattttacacatacgcctttggtagcacatagcactagtcacgtccatgtccatcccggcccttggtagcactaacatcgaagcatcctcctccgtccacgacccacaccgccgtgctcaaattcggccttgccagcgccgccgagcgtccagcgccgacccaagcacgtgaggagttggacaccaccgagaggaactctctggtcctgctcgtggtggtcgtcgtcatcgcttcccgggcctgagaactgtgactgtagactacaattgcatcctgaagaataaaatggaccaacatgattccatggctgactcaccaaggaggcggcacaaccttttgcgtgacaaggtccaattggtgaaaaggaaagattcagatcgctatgagatcgtccgcttccatgatccactgtcttttgagaaaggcttctttgttgtgatccgtgcttgccagcttttggcacagcacaatgacgggataatatttgttggtgttgctggcccctctggtgctgggaagactgtgttcactgagaaggtggtcaatttcatgcctgatgttgctgtgatatcaatggacaactataatgacgcaactcgcatagtcgatggcaattttgatgatccacgtctgacagactatgacacactgctggaaaatatacatggtctgaaggaaggaaggtcagttcaggttccaatatatgatttcaagtcaagctgccggactggttatagaacagttgatgtccctagctcccgaattgttatcattgaaggtatttatgcactgagtgagaagttacggccagtgatagacttgcgtgtttctgtcactggtggtgttcattttgacctagtcaagagggttttaagggatatacagcgagctggccaggagcctgaagaaataattcatcagatctctgaaacggtttatccaatgtacaaggctttcatcgaaccagatttggagaccgcacatattaagatcatcaacaagttcaacccattttcagggttccaaaatcctatgtacattctaaagtcaccaaggtctctaggacctgagaaaatcaaggctgtgcttggtgatgatcatacggaaagcaacgaagaaacttatgatatatatctgcttccacctggtgaagacccagaagcatgccaatcttacttgagaatgcggaatagggaagggaaatataatctaatgtttgaggaatgggtgaccgacaattcttttatcatatcaccaaggatcacttttgaagtcagtgttcgtcttcttggtggtttgatggcattgggatatactatagcagctatactgaagagaagcactcgtgttttttctgatggcaaggcaactgttaaaattgattggctggaacaacttaacagacaatatatacaagtgcaaggaagagatcggctttatgttaaatctgtagcggatcagttaggtttggatggttcttacataccacgcacatatattgaacaaattcagctggagaaattgattaatgatgttatggcgttaccagaagatttgaagacaaagctcagcatcgacgatgagctggtctcaagtccaaaggaagccttttcccgtgtttcggctgatcggagaaacaaacttatgaagagtggcctatctcaatcatattcaacacacggagacaaaaatattgtgaaattgagtaaactaacagaaaccaataggaggtttggtggagggcgggcccttgaaccgcctgctatcaaccagggtgcaatcacccagctttcagaacagatatcaacattgaatgaaaggatggatgagtttacctctcgagttgaagaactcaactcgaaatttacagtgaaaaaacatttgcccagtcagcagaacttagctcttccaaatgatgcttgcaatggttccacgcctacaaatctctttgtctctcatttaggcaatggtactctgatacctcattcttcatcatcaaaccaactttcaaaggattccccgatgatagaagagattatgaacataacaagaggtcagcgccaggttatacatcagctcgacaatctgacaaatctgcttcacgagcatttggtcttaacacgccagactaataataccgccagcaggaaccgggtgctggatagcgacacactcatctgtccacttatttgcctgactgttgccagtatcggttacttcatgtttaaaggtctcagtaggggctgagcaaagtgagttggcccaaacatgtgctccgaggctcaccaccaagttttggcagaactggagctaaaggaagacagttcttgaaccgtttacatcaggaagatcatatctaacagcttacggtcttattaagacaggtaaacctatataccagcacatggaacaaagctttcgcttttcagggagttattactcccaaacgcagaaaatggtgtaccagaagcatacacttctgtaacaggcactgacagttcccagtgctaataaattttggaggttaaaataatgctcagataatgtcgaagaaattatgagagatctataagtttaactgaacattgtcgttgtctttgtcgtgatttctgagtgcgagcactatctcatgatgccatctgaattcacgattctacaaaattgtcttttattttattctcacaagtaaccgggattaacaattgctgcatatttgacgttccgtatggtacaactgtcggaaacgttgaaacggaggagagggtgtagaattcgtcgcgcgctaaaaataacaaagaaaa

SEQ ID NO: 51208 - DNA, 2766 bp, Zea Mays
gcacatagcactagtcacgtccatgtccatcccggcccttggtagcactaacatcgaagcatcctcctccgtccacgacccacaccgccgtgctcaaattcggccttgccagcgccgccgagcgtccagcgccgacccaagcacgtgaggagttggacaccaccgagaggaactctctggtcctgctcgtggtggtcgtcgtcatcgcttcccgggcctgagaactgtgactacaattgcatcctgaagaataaaatggaccaacatgattccatggctgactcaccaaggaggcggcacaaccttttgcgtgacaaggtccaattggtgaaaaggaaagattcagatcgctatgagatcgtccgcttccatgatccactgtcttttgagaaaggcttctttgttgtgatccgtgcttgccagcttttggcacagcacaatgacgggataatatttgttggtgttgctggcccctctggtgctgggaagactgtgttcactgagaaggtggtcaatttcatgcctgatgttgctgtgatatcaatggacaactataatgacgcaactcgcatagtcgatggcaattttgatgatccacgtctgacagactatgacacactgctggaaaatatacatggtctgaaggaaggaaggtcagttcaggttccaatatatgatttcaagtcaagctgccggactggttatagttgatgtccctagctcccgaattgttatcattgaaggtatttatgcactgagtgagaagttacggccagtgatagacttgcgtgtttctgtcactggtggtgttcattttgacctagtcaagagggttttaagggatatacagcgagctggccaggagcctgaagaaataattcatcagatctctgaaacggtttatccaatgtacaaggctttcatcgaaccagatttggagaccgcacatattaagatcatcaacaagttcaacccattttcagggttccaaaatcctatgtacattctaaagtcaccaaggtctctaggacctgagaaaatcaaggctgtgcttggtgatgatcatacggaaagcaacgaagaaacttatgatatatatctgcttccacctggtgaagacccagaagcatgccaatcttacttgagaatgcggaatagggaagggaaatataatctaatgtttgaggaatgggtgaccgacaattcttttatcatatcaccaaggatcacttttgaagtcagtgttcgtcttcttggtggtttgatggcattgggatatactatagcagctatactgaagagaagcactcgtgttttttctgatggcaaggcaactgttaaaattgattggctggaacaacttaacagacaatatatacaagtgcaaggaagagatcggctttatgttaaatctgtagcggatcagttaggtttggatggttcttacataccacgcacatatattgaacaaattcagctggagaaattgattaatgatgttatggcgttaccagaagatttgaagacaaagctcagcatcgacgatgagctggtctcaagtccaaaggaagccttttcccgtgtttcggctgatcggagaaacaaacttatgaagagtggcctatctcaatcatattcaacacacggagacaaaaatattgtgaaattgagtaaactaacagaaaccaataggaggtttggtggagggcgggcccttgaaccgcctgctatcaaccagggtgcaatcacccagctttcagaacagatatcaacattgaatgaaaggatggatgagtttacctctcgagttgaagaactcaactcgaaatttacagtgaaaaaacatttgcccagtcagcagaacttagctcttccaaatgatgcttgcaatggttccacgcctacaaatctctttgtctctcatttaggcaatggtactctgatacctcattcttcatcatcaaaccaactttcaaaggattccccgatgatagaagagattatgaacataacaagaggtcagcgccaggttatacatcagctcgacaatctgacaaatctgcttcacgagcatttggtcttaacacgccagactaataataccgccagcaggaaccgggtgctggatagcgacacactcatctgtccacttatttgcctgactgttgccagtatcggttacttcatgtttaaaggtctcagtaggggctgagcaaagtgagttggcccaaacatgtgctccgaggctcaccaccaagttttggcagaactggagctaaaggaagacagttcttgaaccgtttacatcaggaagatcatatctaacagcttacggtcttattaagacaggtaaacctatataccagcacatggaacaaagctttcgcttttcagggagttattactcccaaacgcagaaaatggtgtaccagaagcatacacttctgtaacaggcactgacagttcccagtgctaataaattttggaggttaaaataatgctcagataatgtcgaagaaattatgagagatctataagtttaactgaacattgtcgttgtctttgtcgtgatttctgagtgcgagcactatctcatgatgccatctgaattcacgattctacaaaattgtcttttattttattctcacaagtaaccgggattaacaattgctgcatatttgacgttccgtatggtacaactgtcggaaacgttgaaacggaggagagggtgtagaattcgtcgcgcgctaaaaataacaaagaaaa

SEQ ID NO: 51209 - DNA, 2896 bp, Zea Mays
gcacatagcactagtcacgtccatgtccatcccggcccttggtagcactaacatcgaagcatcctcctccgtccacgacccacaccgccgtgctcaaattcggccttgccagcgccgccgagcgtccagcgccgacccaagcacgtgaggagttggacaccaccgagaggaactctctggtcctgctcgtggtggtcgtcgtcatcgcttcccgggcctgagaactgtggcgtacgcgtcctttccctcccgcggcaaggcaacagccgccgtcgccctaagccaggtgcccaggtattcgtcggtcccttcgccaggcctccctcgcttgccgccaacgagcacccactagactgtagactacaattgcatcctgaagaataaaatggaccaacatgattccatggctgactcaccaaggaggcggcacaaccttttgcgtgacaaggtccaattggtgaaaaggaaagattcagatcgctatgagatcgtccgcttccatgatccactgtcttttgagaaaggcttctttgttgtgatccgtgcttgccagcttttggcacagcacaatgacgggataatatttgttggtgttgctggcccctctggtgctgggaagactgtgttcactgagaaggtggtcaatttcatgcctgatgttgctgtgatatcaatggacaactataatgacgcaactcgcatagtcgatggcaattttgatgatccacgtctgacagactatgacacactgctggaaaatatacatggtctgaaggaaggaaggtcagttcaggttccaatatatgatttcaagtcaagctgccggactggttatagttgatgtccctagctcccgaattgttatcattgaaggtatttatgcactgagtgagaagttacggccagtgatagacttgcgtgtttctgtcactggtggtgttcattttgacctagtcaagagggttttaagggatatacagcgagctggccaggagcctgaagaaataattcatcagatctctgaaacggtttatccaatgtacaaggctttcatcgaaccagatttggagaccgcacatattaagatcatcaacaagttcaacccattttcagggttccaaaatcctatgtacattctaaagtcaccaaggtctctaggacctgagaaaatcaaggctgtgcttggtgatgatcatacggaaagcaacgaagaaacttatgatatatatctgcttccacctggtgaagacccagaagcatgccaatcttacttgagaatgcggaatagggaagggaaatataatctaatgtttgaggaatgggtgaccgacaattcttttatcatatcaccaaggatcacttttgaagtcagtgttcgtcttcttggtggtttgatggcattgggatatactatagcagctatactgaagagaagcactcgtgttttttctgatggcaaggcaactgttaaaattgattggctggaacaacttaacagacaatatatacaagtgcaaggaagagatcggctttatgttaaatctgtagcggatcagttaggtttggatggttcttacataccacgcacatatattgaacaaattcagctggagaaattgattaatgatgttatggcgttaccagaagatttgaagacaaagctcagcatcgacgatgagctggtctcaagtccaaaggaagccttttcccgtgtttcggctgatcggagaaacaaacttatgaagagtggcctatctcaatcatattcaacacacggagacaaaaatattgtgaaattgagtaaactaacagaaaccaataggaggtttggtggagggcgggcccttgaaccgcctgctatcaaccagggtgcaatcacccagctttcagaacagatatcaacattgaatgaaaggatggatgagtttacctctcgagttgaagaactcaactcgaaatttacagtgaaaaaacatttgcccagtcagcagaacttagctcttccaaatgatgcttgcaatggttccacgcctacaaatctctttgtctctcatttaggcaatggtactctgatacctcattcttcatcatcaaaccaactttcaaaggattccccgatgatagaagagattatgaacataacaagaggtcagcgccaggttatacatcagctcgacaatctgacaaatctgcttcacgagcatttggtcttaacacgccagactaataataccgccagcaggaaccgggtgctggatagcgacacactcatctgtccacttatttgcctgactgttgccagtatcggttacttcatgtttaaaggtctcagtaggggctgagcaaagtgagttggcccaaacatgtgctccgaggctcaccaccaagttttggcagaactggagctaaaggaagacagttcttgaaccgtttacatcaggaagatcatatctaacagcttacggtcttattaagacaggtaaacctatataccagcacatggaacaaagctttcgcttttcagggagttattactcccaaacgcagaaaatggtgtaccagaagcatacacttctgtaacaggcactgacagttcccagtgctaataaattttggaggttaaaataatgctcagataatgtcgaagaaattatgagagatctataagtttaactgaacattgtcgttgtctttgtcgtgatttctgagtgcgagcactatctcatgatgccatctgaattcacgattctacaaaattgtcttttattttattctcacaagtaaccgggattaacaattgctgcatatttgacgttccgtatggtacaactgtcggaaacgttgaaacggaggagagggtgtagaattcgtcgcgcgctaaaaataacaaagaaaa

SEQ ID NO: 51210 - DNA, 2843 bp, Zea Mays
gcacatagcactagtcacgtccatgtccatcccggcccttggtagcactaacatcgaagcatcctcctccgtccacgacccacaccgccgtgctcaaattcggccttgccagcgccgccgagcgtccagcgccgacccaagcacgtgaggagttggacaccaccgagaggaactctctggtcctgctcgtggtggtcgtcgtcatcgcttcccgggcctgagaactgtggcgtacgcgtcctttccctcccgcggcaaggcaacagccgccgtcgccctaagccaggtgcccagactgtagactacaattgcatcctgaagaataaaatggaccaacatgattccatggctgactcaccaaggaggcggcacaaccttttgcgtgacaaggtccaattggtgaaaaggaaagattcagatcgctatgagatcgtccgcttccatgatccactgtcttttgagaaaggcttctttgttgtgatccgtgcttgccagcttttggcacagcacaatgacgggataatatttgttggtgttgctggcccctctggtgctgggaagactgtgttcactgagaaggtggtcaatttcatgcctgatgttgctgtgatatcaatggacaactataatgacgcaactcgcatagtcgatggcaattttgatgatccacgtctgacagactatgacacactgctggaaaatatacatggtctgaaggaaggaaggtcagttcaggttccaatatatgatttcaagtcaagctgccggactggttatagaacagttgatgtccctagctcccgaattgttatcattgaaggtatttatgcactgagtgagaagttacggccagtgatagacttgcgtgtttctgtcactggtggtgttcattttgacctagtcaagagggttttaagggatatacagcgagctggccaggagcctgaagaaataattcatcagatctctgaaacggtttatccaatgtacaaggctttcatcgaaccagatttggagaccgcacatattaagatcatcaacaagttcaacccattttcagggttccaaaatcctatgtacattctaaagtcaccaaggtctctaggacctgagaaaatcaaggctgtgcttggtgatgatcatacggaaagcaacgaagaaacttatgatatatatctgcttccacctggtgaagacccagaagcatgccaatcttacttgagaatgcggaatagggaagggaaatataatctaatgtttgaggaatgggtgaccgacaattcttttatcatatcaccaaggatcacttttgaagtcagtgttcgtcttcttggtggtttgatggcattgggatatactatagcagctatactgaagagaagcactcgtgttttttctgatggcaaggcaactgttaaaattgattggctggaacaacttaacagacaatatatacaagtgcaaggaagagatcggctttatgttaaatctgtagcggatcagttaggtttggatggttcttacataccacgcacatatattgaacaaattcagctggagaaattgattaatgatgttatggcgttaccagaagatttgaagacaaagctcagcatcgacgatgagctggtctcaagtccaaaggaagccttttcccgtgtttcggctgatcggagaaacaaacttatgaagagtggcctatctcaatcatattcaacacacggagacaaaaatattgtgaaattgagtaaactaacagaaaccaataggaggtttggtggagggcgggcccttgaaccgcctgctatcaaccagggtgcaatcacccagctttcagaacagatatcaacattgaatgaaaggatggatgagtttacctctcgagttgaagaactcaactcgaaatttacagtgaaaaaacatttgcccagtcagcagaacttagctcttccaaatgatgcttgcaatggttccacgcctacaaatctctttgtctctcatttaggcaatggtactctgatacctcattcttcatcatcaaaccaactttcaaaggattccccgatgatagaagagattatgaacataacaagaggtcagcgccaggttatacatcagctcgacaatctgacaaatctgcttcacgagcatttggtcttaacacgccagactaataataccgccagcaggaaccgggtgctggatagcgacacactcatctgtccacttatttgcctgactgttgccagtatcggttacttcatgtttaaaggtctcagtaggggctgagcaaagtgagttggcccaaacatgtgctccgaggctcaccaccaagttttggcagaactggagctaaaggaagacagttcttgaaccgtttacatcaggaagatcatatctaacagcttacggtcttattaagacaggtaaacctatataccagcacatggaacaaagctttcgcttttcagggagttattactcccaaacgcagaaaatggtgtaccagaagcatacacttctgtaacaggcactgacagttcccagtgctaataaattttggaggttaaaataatgctcagataatgtcgaagaaattatgagagatctataagtttaactgaacattgtcgttgtctttgtcgtgatttctgagtgcgagcactatctcatgatgccatctgaattcacgattctacaaaattgtcttttattttattctcacaagtaaccgggattaacaattgctgcatatttgacgttccgtatggtacaactgtcggaaacgttgaaacggaggagagggtgtagaattcgtcgcgcgctaaaaataacaaagaaaa

SEQ ID NO: 51211 - DNA, 3044 bp, Zea Mays
gcacatagcactagtcacgtccatgtccatcccggcccttggtagcactaacatcgaagcatcctcctccgtccacgacccacaccgccgtgctcaaattcggccttgccagcgccgccgagcgtccagcgccgacccaagcacgtgaggagttggacaccaccgagaggaactctctggtcctgctcgtggtggtcgtcgtcatcgcttcccgggcctgagaactgtggtatttctcttgttctgaactcaccccctgcctttccataattccatctccggttcaccccgcgtgatctgtctcgtgcggcaaggcgtacgcgtcctttccctcccgcggcaaggcaacagccgccgtcgccctaagccaggtgcccaggtattcgtcggtcccttcgccaggcctccctcgcttgccgccaacgagcacccactaggtatccgcaacctccctctcccattcatgctgtgcgaaaccgatcacccgattcatgctgtgcgaaaccccatccgaaccctcgcaataaaatggaccaacatgattccatggctgactcaccaaggaggcggcacaaccttttgcgtgacaaggtccaattggtgaaaaggaaagattcagatcgctatgagatcgtccgcttccatgatccactgtcttttgagaaaggcttctttgttgtgatccgtgcttgccagcttttggcacagcacaatgacgggataatatttgttggtgttgctggcccctctggtgctgggaagactgtgttcactgagaaggtggtcaatttcatgcctgatgttgctgtgatatcaatggacaactataatgacgcaactcgcatagtcgatggcaattttgatgatccacgtctgacagactatgacacactgctggaaaatatacatggtctgaaggaaggaaggtcagttcaggttccaatatatgatttcaagtcaagctgccggactggttatagaacagttgatgtccctagctcccgaattgttatcattgaaggtatttatgcactgagtgagaagttacggccagtgatagacttgcgtgtttctgtcactggtggtgttcattttgacctagtcaagagggttttaagggatatacagcgagctggccaggagcctgaagaaataattcatcagatctctgaaacggtttatccaatgtacaaggctttcatcgaaccagatttggagaccgcacatattaagatcatcaacaagttcaacccattttcagggttccaaaatcctatgtacattctaaagtcaccaaggtctctaggacctgagaaaatcaaggctgtgcttggtgatgatcatacggaaagcaacgaagaaacttatgatatatatctgcttccacctggtgaagacccagaagcatgccaatcttacttgagaatgcggaatagggaagggaaatataatctaatgtttgaggaatgggtgaccgacaattcttttatcatatcaccaaggatcacttttgaagtcagtgttcgtcttcttggtggtttgatggcattgggatatactatagcagctatactgaagagaagcactcgtgttttttctgatggcaaggcaactgttaaaattgattggctggaacaacttaacagacaatatatacaagtgcaaggaagagatcggctttatgttaaatctgtagcggatcagttaggtttggatggttcttacataccacgcacatatattgaacaaattcagctggagaaattgattaatgatgttatggcgttaccagaagatttgaagacaaagctcagcatcgacgatgagctggtctcaagtccaaaggaagccttttcccgtgtttcggctgatcggagaaacaaacttatgaagagtggcctatctcaatcatattcaacacacggagacaaaaatattgtgaaattgagtaaactaacagaaaccaataggaggtttggtggagggcgggcccttgaaccgcctgctatcaaccagggtgcaatcacccagctttcagaacagatatcaacattgaatgaaaggatggatgagtttacctctcgagttgaagaactcaactcgaaatttacagtgaaaaaacatttgcccagtcagcagaacttagctcttccaaatgatgcttgcaatggttccacgcctacaaatctctttgtctctcatttaggcaatggtactctgatacctcattcttcatcatcaaaccaactttcaaaggattccccgatgatagaagagattatgaacataacaagaggtcagcgccaggttatacatcagctcgacaatctgacaaatctgcttcacgagcatttggtcttaacacgccagactaataataccgccagcaggaaccgggtgctggatagcgacacactcatctgtccacttatttgcctgactgttgccagtatcggttacttcatgtttaaaggtctcagtaggggctgagcaaagtgagttggcccaaacatgtgctccgaggctcaccaccaagttttggcagaactggagctaaaggaagacagttcttgaaccgtttacatcaggaagatcatatctaacagcttacggtcttattaagacaggtaaacctatataccagcacatggaacaaagctttcgcttttcagggagttattactcccaaacgcagaaaatggtgtaccagaagcatacacttctgtaacaggcactgacagttcccagtgctaataaattttggaggttaaaataatgctcagataatgtcgaagaaattatgagagatctataagtttaactgaacattgtcgttgtctttgtcgtgatttctgagtgcgagcactatctcatgatgccatctgaattcacgattctacaaaattgtcttttattttattctcacaagtaaccgggattaacaattgctgcatatttgacgttccgtatggtacaactgtcggaaacgttgaaacggaggagagggtgtagaattcgtcgcgcgctaaaaataacaaagaaaa

SEQ ID NO: 51212 - DNA, 2851 bp, Zea Mays
gcacatagcactagtcacgtccatgtccatcccggcccttggtagcactaacatcgaagcatcctcctccgtccacgacccacaccgccgtgctcaaattcggccttgccagcgccgccgagcgtccagcgccgacccaagcacgtgaggagttggacaccaccgagaggaactctctggtcctgctcgtggtggtcgtcgtcatcgcttcccgggcctgagaactgtggcgtacgcgtcctttccctcccgcggcaaggcaacagccgccgtcgccctaagccaggtgcccaggtattcgtcggtcccttcgccaggcctccctcgcttgccgccaacgagcacccactagactgtagactacaattgcatcctgaagaataaaatggaccaacatgattccatggctgactcaccaaggaggcggcacaaccttttgcgtgacaaggtccaattggtgaaaaggaaagattcagatcgctatgagatcgtccgcttccatgatccactgtcttttgagaaaggcttctttgttgtgatccgtgcttgccagcttttggcacagcacaatgacgggataatatttgttggtgttgctggcccctctggtgctgggaagactgtgttcactgagaaggtggtcaatttcatgcctgatgttgctgtgatatcaatggacaactataatgacgcaactcgcatagtcgatggcaattttgatgatccacgtctgacagactatgacacactgctggaaaatatacatggtctgaaggaaggaaggtcagttcaggttccaatatatgatttcaagtcaagctgccggactggttatagaacagttgatgtccctagctcccgaattgttatcattgaaggtatttatgcactgagtgagaagttacggccagtgatagacttgcgtgtttctgtcactggtggtgttcattttgacctagtcaagagggttttaagggatatacagcgagctggccaggagcctgaagaaataattcatcagatctctgaaacggtttatccaatgtacaaggctttcatcgaaccagatttggagaccgcacatattaagatcatcaacaagttcaacccattttcagggttccaaaatcctatgtacattctaaagtcaccaaggtctctaggacctgagaaaatcaaggctgtgcttggtgatgatcatacggaaagcaacgaagaaacttatgatatatatctgcttccacctggtgaagacccagaagcatgccaatcttacttgagaatgcggaatagggaagggaaatataatctaatgtttgaggaatgggtgaccgacaattcttttatcatatcaccaaggatcacttttgaagtcagtgttcgtcttcttggtggtttgatggcattgggatatactatagcagctatactgaagagaagcactcgtgttttttctgatggcaaggcaactgttaaaattgattggctggaataaatctgtagcggatcagttaggtttggatggttcttacataccacgcacatatattgaacaaattcagctggagaaattgattaatgatgttatggcgttaccagaagatttgaagacaaagctcagcatcgacgatgagctggtctcaagtccaaaggaagccttttcccgtgtttcggctgatcggagaaacaaacttatgaagagtggcctatctcaatcatattcaacacacggagacaaaaatattgtgaaattgagtaaactaacagaaaccaataggaggtttggtggagggcgggcccttgaaccgcctgctatcaaccagggtgcaatcacccagctttcagaacagatatcaacattgaatgaaaggatggatgagtttacctctcgagttgaagaactcaactcgaaatttacagtgaaaaaacatttgcccagtcagcagaacttagctcttccaaatgatgcttgcaatggttccacgcctacaaatctctttgtctctcatttaggcaatggtactctgatacctcattcttcatcatcaaaccaactttcaaaggattccccgatgatagaagagattatgaacataacaagaggtcagcgccaggttatacatcagctcgacaatctgacaaatctgcttcacgagcatttggtcttaacacgccagactaataataccgccagcaggaaccgggtgctggatagcgacacactcatctgtccacttatttgcctgactgttgccagtatcggttacttcatgtttaaaggtctcagtaggggctgagcaaagtgagttggcccaaacatgtgctccgaggctcaccaccaagttttggcagaactggagctaaaggaagacagttcttgaaccgtttacatcaggaagatcatatctaacagcttacggtcttattaagacaggtaaacctatataccagcacatggaacaaagctttcgcttttcagggagttattactcccaaacgcagaaaatggtgtaccagaagcatacacttctgtaacaggcactgacagttcccagtgctaataaattttggaggttaaaataatgctcagataatgtcgaagaaattatgagagatctataagtttaactgaacattgtcgttgtctttgtcgtgatttctgagtgcgagcactatctcatgatgccatctgaattcacgattctacaaaattgtcttttattttattctcacaagtaaccgggattaacaattgctgcatatttgacgttccgtatggtacaactgtcggaaacgttgaaacggaggagagggtgtagaattcgtcgcgcgctaaaaataacaaagaaaa

SEQ ID NO: 51213 - DNA, 1692 bp, Zea Mays
gtcagattctgaattttacttctctttttatatttactaggaatgggtgaccgacaattcttttatcatatcaccaaggatcacttttgaagtcagtgttcgtcttcttggtggtttgatggcattgggatatactatagcagctatactgaagagaagcactcgtgttttttctgatggcaaggcaactgttaaaattgattggctggaacaacttaacagacaatatatacaagtgcaaggaagagatcggctttatgttaaatctgtagcggatcagttaggtttggatggttcttacataccacgcacatatattgaacaaattcagctggagaaattgattaatgatgttatggcgttaccagaagatttgaagacaaagctcagcatcgacgatgagctggtctcaagtccaaaggaagccttttcccgtgtttcggctgatcggagaaacaaacttatgaagagtggcctatctcaatcatattcaacacacggagacaaaaatattgtgaaattgagtaaactaacagaaaccaataggaggtttggtggagggcgggcccttgaaccgcctgctatcaaccagggtgcaatcacccagctttcagaacagatatcaacattgaatgaaaggatggatgagtttacctctcgagttgaagaactcaactcgaaatttacagtgaaaaaacatttgcccagtcagcagaacttagctcttccaaatgatgcttgcaatggttccacgcctacaaatctctttgtctctcatttaggcaatggtactctgatacctcattcttcatcatcaaaccaactttcaaaggattccccgatgatagaagagattatgaacataacaagaggtcagcgccaggttatacatcagctcgacaatctgacaaatctgcttcacgagcatttggtcttaacacgccagactaataataccgccagcaggaaccgggtgctggatagcgacacactcatctgtccacttatttgcctgactgttgccagtatcggttacttcatgtttaaaggtctcagtaggggctgagcaaagtgagttggcccaaacatgtgctccgaggctcaccaccaagttttggcagaactggagtaagcaatcgtcacagctcttactgatctgcagtacttccagaattcgtattgatgctgtctctcctgcaggctaaaggaagacagttcttgaaccgtttacatcaggaagatcatatctaacagcttacggtcttattaagacaggtaaacctatataccagcacatggaacaaagctttcgcttttcagggagttattactcccaaacgcagaaaatggtgtaccagaagcatacacttctgtaacaggcactgacagttcccagtgctaataaattttggaggttaaaataatgctcagataatgtcgaagaaattatgagagatctataagtttaactgaacattgtcgttgtctttgtcgtgatttctgagtgcgagcactatctcatgatgccatctgaattcacgattctacaaaattgtcttttattttattctcacaagtaaccgggattaacaattgctgcatatttgacgttccgtatggtacaactgtcggaaacgttgaaacggaggagagggtgtagaattcgtcgcgcgctaaaaataacaaagaaaa

SEQ ID NO: 51214 - DNA, 1407 bp, Zea Mays
ctcaatgccatttttgtctcaggtgcaaggaagagatcggctttatgttaaatctgtagcggatcagttaggtttggatggttcttacataccacgcacatatattgaacaaattcagctggagaaattgattaatgatgttatggcgttaccagaagatttgaagacaaagctcagcatcgacgatgagctggtctcaagtccaaaggaagccttttcccgtgtttcggctgatcggagaaacaaacttatgaagagtggcctatctcaatcatattcaacacacggagacaaaaatattgtgaaattgagtaaactaacagaaaccaataggaggtttggtggagggcgggcccttgaaccgcctgctatcaaccagggtgcaatcacccagctttcagaacagatatcaacattgaatgaaaggatggatgagtttacctctcgagttgaagaactcaactcgaaatttacagtgaaaaaacatttgcccagtcagcagaacttagctcttccaaatgatgcttgcaatggttccacgcctacaaatctctttgtctctcatttaggcaatggtactctgatacctcattcttcatcatcaaaccaactttcaaaggattccccgatgatagaagagattatgaacataacaagaggtcagcgccaggttatacatcagctcgacaatctgacaaatctgcttcacgagcatttggtcttaacacgccagactaataataccgccagcaggaaccgggtgctggatagcgacacactcatctgtccacttatttgcctgactgttgccagtatcggttacttcatgtttaaaggtctcagtaggggctgagcaaagtgagttggcccaaacatgtgctccgaggctcaccaccaagttttggcagaactggagctaaaggaagacagttcttgaaccgtttacatcaggaagatcatatctaacagcttacggtcttattaagacaggtaaacctatataccagcacatggaacaaagctttcgcttttcagggagttattactcccaaacgcagaaaatggtgtaccagaagcatacacttctgtaacaggcactgacagttcccagtgctaataaattttggaggttaaaataatgctcagataatgtcgaagaaattatgagagatctataagtttaactgaacattgtcgttgtctttgtcgtgatttctgagtgcgagcactatctcatgatgccatctgaattcacgattctacaaaattgtcttttattttattctcacaagtaaccgggattaacaattgctgcatatttgacgttccgtatggtacaactgtcggaaacgttgaaacggaggagagggtgtagaattcgtcgcgcgctaaaaataacaaagaaaa

SEQ ID NO: 51215 - DNA, 1106 bp, Zea Mays
tagactttcggtctagtctcgacatttgtacaggatagaattgtgactgcggggggtgttagggtttagggtttggggttctccccgtgtaattactcacttacaaacatgtttggaggttctccaattctgggttgtttacatctaagtcggcttgcagagctttctacatggctattgtagtgtttgagccttggaagatggtttggaagagttgggcgacccctaaatgcaagtttttcatttggctagctatcaataacaaacaagtgttggactgcagacatgatgaaaaaagcgggcttgacttcccgaagtgttgcgtgctttgtgatcaagaagaggaaaccgtgcagcatatcatctccagcagtttgtttgcaaggcaattttggcactctattctctcccgtattggtttttcgtccttaattcccaaaggcaagaaaaagggcttcaacgacagcgctgtcattctaggggcttggagcctctagaaacatagaaacaaatatgtctttgacggagttagtccttgccttgctaatcaggtcgagggtttcagggaagagcagcagaactggtcccttgcaggtgccaagaacctgaagactctatttgatccaggttgagagggaggagatcccttctgagttgttttattttgttcttaggcggtcattgagcttaggaatgacaatgttaagcttcgagcagccgtaaattgcaaccttccaaacaacatggtgcagagaaggacaaaaattatagtacctcacaaagcatttcaatagtctcagcatcatgtgcattcatacacttttggttccacatcttaaaagaattttgtagccattcatagcttatgtagtcaggaagaatcatctgaaatcaaacgattaagatgaaacaatgctgggaaacatacaaagaaaataattgacatgttaaatatttgtaagacgaccaatgacgcactgacgcacatctatggaaactcagaaagtcctagtgaacatctagtccagcttaagataccacataatgatcaataaaatgtgtaggtattcttacatgacttgtctttttgtatagttggattaaat

SEQ ID NO: 51216 - DNA, 1607 bp, Zea Mays
gaaatcagttggggagttttctgccttttcttctccccttctctgttttccttcaccgcgccaccgggggcgaatcgcggacgccgctcacctcccccatctcctccccaccacgtcgcaaacccatcgtcaccatcaccgcctccggccgcggctcccatcctcgcgtggccgtcgcgatccactacgagcttctctcgtccggtcttccgagtctcggctacctgctcctacgtcgaatcctcgggccctgctgtcgccaccgccgaatcctgctgcactcgccgcagccggggaacgcggacggcctgcgggagcttggcgcctcctccttcgcgttgcgtcgtcacgaggaactaagtcaacagtctttatgggcttcatgctagtagaggataattccagcactgcttttggaggtcctgctattctttctcatatggattggtagaccagatcctggcaaagcaatgctgatggaccctcctgttatgcaaatggactgcaagttgaaaaatgacgtggataaaacatcatcaattgactatgataggaaggtgaccatctcacatgatgattatgggtgggcaggctctgatgtcaaaccaaaagatgatatagtatgtaaccctgtggaggttagtaatgcttgtcaaacaggcataaatgaggtattagattctgcttccaaaaattcacctcttaacttgggtgatttacctcagggtgcagaactaagaaataagaatggtgacagttcctactccaatgtaaaacttcagttgaactcaagtgctggaaataataatggcttgcaaactgatgatgacaactttactaaacaatattttggtaagaaggatatgcatcatcgacaggaagagatgcatccttcttccaacacagtgtcattaccaacttcatgcagactcaatggagatgccacaccttctgaagaggagaaaatagcagaggatcgtgtcaaagtggatggaaatgtagatgctgtaattaaggaagtcgaaactgacttggtaggatgccatgcacatcagaaagaatttcagtgcacgctccaagatctatcagaaatagcctgcagtattgatttagtacataatacatcttctccacaaggagagaataagaagcctgtctcccctttaaatggcatgggccattatgttgataacaatagttgtaatggtgataccaattataaaggggaggagctcaatatgggggatgctggggatgaggatcatgctatagcactttgggtgaagtggagaggaaaatggcaaactggaattcgatgctgtagagtagattgtcctttacctactctaagggcaaaaccaacacatgacaggaagagctatgttgtcgttttcttcccacgaacaaaaacttattcttgggtagacatgctacttgttcttccaatagaggaatgtcctttgccacttgtaaatggaactcatcgtaaatggagaaagctggtgaaggatttgaacattcctcgacgattcaacatgcaaaatcttgccgtttttatgataaatttaattgatgagcttcatatcgaggctgtagttgatgatgct

SEQ ID NO: 51217 - DNA, 5173 bp, Zea Mays
cagttggggagttttctgccttttcttctccccttctctgttttccttcaccgcgccaccgggggcgaatcgcggacgccgctcacctcccccatctcctccccaccacgtcgcaaacccatcgtcaccatcaccgcctccggccgcggctcccatcctcgcgtggccgtcgcgatccactacgagcttctctcgtccggtcttccgagtctcggctacctgctcctacgtcgaatcctcgggccctgctgtcgccaccgccgaatcctgctgcactcgccgcagccggggaacgcggacggcctgcgggagcttggcgcctcctccttcgcgttgcgtcgtcacgaggaactaagtcaacagtctttatgggcttcatgctagtagaggataattccagcactgcttttggaggtcctgctattctttctcatatggattggtagaccagatcctggcaaagcaatgctgatggaccctcctgttatgcaaatggactgcaagttgaaaaatgacgtggataaaacatcatcaattgactatgataggaaggtgaccatctcacatgatgattatgggtgggcaggctctgatgtcaaaccaaaagatgatatagtatgtaaccctgtggagggtgcagaactaagaaataagaatggtgacagttcctactccaatgtaaaacttcagttgaactcaagtgctggaaataataatggcttgcaaactgatgatgacaactttactaaacaatattttggtaagaaggatatgcatcatcgacaggaagagatgcatccttcttccaacacagtgtcattaccaacttcatgcagactcaatggagatgccacaccttctgaagaggagaaaatagcagaggatcgtgtcaaagtggatggaaatgtagatgctgtaattaaggaagtcgaaactgacttggtaggatgccatgcacatcagaaagaatttcagtgcacgctccaagatctatcagaaatagcctgcagtattgatttagtacataatacatcttctccacaaggagagaataagaagcctgtctcccctttaaatggcatgggccattatgttgataacaatagttgtaatggtgataccaattataaaggggaggagctcaatatgggggatgctggggatgaggatcatgctatagcactttgggtgaagtggagaggaaaatggcaaactggaattcgatgctgtagagtagattgtcctttacctactctaagggcaaaaccaacacatgacaggaagagctatgttgtcgttttcttcccacgaacaaaaacttattcttgggtagacatgctacttgttcttccaatagaggaatgtcctttgccacttgtaaatggaactcatcgtaaatggagaaagctggtgaaggatttgaacattcctcgacgattcaacatgcaaaatcttgccgtttttatgataaatttaattgatgagcttcatatcgaggaacttcgacagtcccttcatgggaacaagcttaaggaattgaggaatgcatcagtgcagcctgaattgatccctgagtggaacagatggaaacaagaattgataaaacagtacttttcattgcatcctgctggtaatgttggaaactttgagaaaaacaattgttatgatgatccagctttagatcaacaaggtagtagaaaacgtccaaaacttgaggtccgaagaggagagatacaaatttcacacatgggtgaggctgactacaggactccaaccgaagacccaaaccaaaataaccttcctggtaactctgtcatgcatgaaaatgtaggggcattaggatcaacagatcaaaataattctgtcacgttgcctggaagttttggcaccaacgaaaacacaatatccagtagtgccaatgcagctttacagaatgctagacttgatttagattcattcaagagttctcggcagtgttctgcacacattgaagcaaaggggaggcaatgtggtaggtgggcaaatgatggtgatatttactgttgtgtgcatcaaagtatgcattttcttgaccattcttcaagggaggacaaggcacttaccattgaagctccgttgtgcagtggtatgactaacatgggtagaaaatgcaagcatcgagctcagtatggttctactttttgtaaaaagcaccggctacagacaaacttggatgcaatgcacccagaaaatttgttggatccatctgaggtactccatatgggtgaagaacctccgaataagtgggtggaagaaatttctaagtcgcaagcaatgtatagcatagacttggaaacagacaagaaagtccaggatgctgtaaaagtgaaattgatgacaattgtgtctatagagaactctggtgaaaaaggcgcaatggagaaagctgatatgtgtgtggcatcaacttctataacaaatactgatgatacttctctttgtattggaattcactctcatgatagtattgttgaatgccaggattatgccatgcaacatactctttattgtgagaagcaccttccaaggttccttaaacgtgccaggaatggtaagagtcgactcgtttctaaagatatcttcgtcaatctactgaagggatgcacatcaagaaaagataagatatgtctgcaccaagcatgtgaatttctttattggttcttgagaaacaacctttctcatcaacacactagtcttgctagtgaacatatgccccagatattggctgaagtgtctaaaaatccagatgttggagagtttttgttaaagttgatatctactgagagagagaaactagcaaatatctggggctttgatacaaatagatctaagcaaatatattctgaaaacaaagaagggtctctagtgttgcataaagagggaactaatctttcatctggtccgaagtgcaaaatctgtgctcaccagttctctgatgatgaagctcttggattacattggacaactgtccacaaaaaggaagcccggtggctgtttagagaagggacaaatggtctgtccctttatgatagccacaacattgaggatgccaatggctctcagaagttcatctgcagattatgtgggctcaaatttgatcttcagccagatcttggccgccaccataaagtcgctcatatggactcagatgttgttggccacagctcactgggccgtgggaagtatcagcttaaccgtggccgacactactattccgctttcaagaaaagtttacgaccaacaagtacattaaagaagaggagtagctctggaatcgagaaaaactttaagtttcagagttctgccctaacatctcaaataattcaatctgaaacatccagctttggtaagttacaggattttcagtgctcagatgttgcgcaaacattattttccaagattcaaaagacaagaccccatccaagcaaccttgatattttatcggttgcccgcactgtatgctgcaagacaagtcttgctgctgcattggaagttaaatatggatctttacctgagaacatatttgtgaaagctgcaaagctatgcagtgacaatggcatccaaattgattggcatcaagaggtatttatatgccctaaaggttgcaaatctagatataattcaaatgctctgcttcctatgcaactcacggcagttgattttcctgaagctccttctgttgatcctcttaatgatgatgaaatgtgggcaatggaagaataccattatgttcttgattcaaagcactttggatggaagcctaaaaatgagagtgtcgttctctatgaagacataagctttggcagggagaaagttccaattgtctgtgtcattgatatggacgcaaaagattctttaggcatgaagcctgaagaacttttgtcacatggcagttctgtgccttggcaaggtttccactatatcacaaagcgtttgatggattcatctcttattaattcagagaactctatgcctgggtgcgcatgttctcatcctgaatgttctcctgagaaatgtggtcacgtgagtctcttcgatggtgtctatgctagtctggtggatatcaatggaacaccaatacatggcagatttgcatatgatgaaaatagtaaaattattttacaggaagggtatccaatatatgagtgcaattcatcatgtacttgtgactcatcctgccggaataaagtattgcagaaaggactgcttgttaagttggaactcttcagaactgagaataagggttgggctattagagctgccgaacctattccacagggtacctttgtctgcgagtatattggtgaagttgtgaaggccgacaagaccatgaaaaatgcagaaagattgatagggaaagacttcggactgtaggggctattgaatacttgattgatgccacaagatctggaaatgtgtcccgctatatcaatcacagttgttccccaaatctcagcacccgattggttttggtagagagcaaagattgccagcttgctcacattggcttgtttgctaatcaagacattgccgtaggagaagaacttgcctatgattaccgacaaaagcttgtagcaggcgatggctgcttctgccattgtgggggtaccaattgccgaggccgtgtctattgacttcgcaggaagacactaactgttcaacgcttggttgcagaactcgaggtttctacagctgtgtaggctgctgagcgatttagcactgcaattttccagagctcgagtgcaggactaggatcccattcttcatgctacaaatagggattgtgatataggactcacagaaatgaagtgattcaggctgctttattcgtaggcgagaattctttcagtaaaattccttcattcatattttattgctcatgggcaccatcatcgacgtcaagtaataaactgcttatcccatttttgcgtttgttcatattagacgacggcctgttgtgcaggtaatattttgtagttgtattaattgcgtgatggctatcagaatcaatgaaaagataagtcttgtttctttaatggcgtatttgtattttgcagttgtattaattgtgtgatgggtatcagaatgaatcaaaagatagtcttatttctctaaatgcgtgattatgaaattt

SEQ ID NO: 51218 - DNA, 5190 bp, Zea Mays
cagttggggagttttctgccttttcttctccccttctctgttttccttcaccgcgccaccgggggcgaatcgcggacgccgctcacctcccccatctcctccccaccacgtcgcaaacccatcgtcaccatcaccgcctccggccgcggctcccatcctcgcgtggccgtcgcgatccactacgagcttctctcgtccggtcttccgagtctcggctacctgctcctacgtcgaatcctcgggccctgctgtcgccaccgccgaatcctgctgcactcgccgcagccggggaacgcggacggcctgcgggagcttggcgcctcctccttcgcgttgcgtcgtcacgaggaactaagtcaacagtctttatgggcttcatgctagtagaggataattccagcactgcttttggaggtcctgctattctttctcatatggattggtagaccagatcctggcaaagcaatgctgatggaccctcctgttatgcaaatggactgcaagttgaaaaatgacgtggataaaacatcatcaattgactatgataggaaggtgaccatctcacatgatgattatgggtgggcaggctctgatgtcaaaccaaaagatgatatagtatgtaaccctgtggagggtgcagaactaagaaataagaatggtgacagttcctactccaatgtaaaacttcagttgaactcaagtgctggaaataataatggcttgcaaactgatgatgacaactttactaaacaatattttggtaagaaggatatgcatcatcgacaggaagagatgcatccttcttccaacacagtgtcattaccaacttcatgcagactcaatggagatgccacaccttctgaagaggagaaaatagcagaggatcgtgtcaaagtggatggaaatgtagatgctgtaattaaggaagtcgaaactgacttggtaggatgccatgcacatcagaaagaatttcagtgcacgctccaagatctatcagaaatagcctgcagtattgatttagtacataatacatcttctccacaaggagagaataagaagcctgtctcccctttaaatggcatgggccattatgttgataacaatagttgtaatggtgataccaattataaaggggaggagctcaatatgggggatgctggggatgaggatcatgctatagcactttgggtgaagtggagaggaaaatggcaaactggaattcgatgctgtagagtagattgtcctttacctactctaagggcaaaaccaacacatgacaggaagagctatgttgtcgttttcttcccacgaacaaaaacttattcttgggtagacatgctacttgttcttccaatagaggaatgtcctttgccacttgtaaatggaactcatcgtaaatggagaaagctggtgaaggatttgaacattcctcgacgattcaacatgcaaaatcttgccgtttttatgataaatttaattgatgagcttcatatcgaggaacttcgacagtcccttcatgggaacaagcttaaggaattgaggaatgcatcagtgcagcctgaattgatccctgagtggaacagatggaaacaagaattgataaaacagtacttttcattgcatcctgctggtaatgttggaaactttgagaaaaacaattgttatgatgatccagctttagatcaacaaggtagtagaaaacgtccaaaacttgaggtccgaagaggagagatacaaatttcacacatgggtgaggctgactacaggactccaaccgaagacccaaaccaaaataaccttcctggtaactctgtcatgcatgaaaatgtaggggcattaggatcaacagatcaaaataattctgtcacgttgcctggaagttttggcaccaacgaaaacacaatatccagtagtgccaatgcagctttacagaatgctagacttgatttagattcattcaagagttctcggcagtgttctgcacacattgaagcaaaggggaggcaatgtggtaggtgggcaaatgatggtgatatttactgttgtgtgcatcaaagtatgcattttcttgaccattcttcaagggaggacaaggcacttaccattgaagctccgttgtgcagtggtatgactaacatgggtagaaaatgcaagcatcgagctcagtatggttctactttttgtaaaaagcaccggctacagacaaacttggatgcaatgcacccagaaaatttgttggatccatctgaggtactccatatgggtgaagaacctccgaataagtgggtggaagaaatttctaagtcgcaagcaatgtatagcatagacttggaaacagacaagaaagtccaggatgctgtaaaagtgaaattgatgacaattgtgtctatagagaactctggtgaaaaaggcgcaatggagaaagctgatatgtgtgtggcatcaacttctataacaaatactgatgatacttctctttgtattggaattcactctcatgatagtattgttgaatgccaggattatgccatgcaacatactctttattgtgagaagcaccttccaaggttccttaaacgtgccaggaatggtaagagtcgactcgtttctaaagatatcttcgtcaatctactgaagggatgcacatcaagaaaagataagatatgtctgcaccaagcatgtgaatttctttattggttcttgagaaacaacctttctcatcaacacactagtcttgctagtgaacatatgccccagatattggctgaagtgtctaaaaatccagatgttggagagtttttgttaaagttgatatctactgagagagagaaactagcaaatatctggggctttgatacaaatagatctaagcaaatatattctgaaaacaaagaagggtctctagtgttgcataaagagggaactaatctttcatctggtccgaagtgcaaaatctgtgctcaccagttctctgatgatgaagctcttggattacattggacaactgtccacaaaaaggaagcccggtggctgtttagagaagggacaaatggtctgtccctttatgatagccacaacattgaggatgccaatggctctcagaagttcatctgcagattatgtgggctcaaatttgatcttcagccagatcttggccgccaccataaagtcgctcatatggactcagatgttgttggccacagctcactgggccgtgggaagtatcagcttaaccgtggccgacactactattccgctttcaagaaaagtttacgaccaacaagtacattaaagaagaggagtagctctggaatcgagaaaaactttaagtttcagagttctgccctaacatctcaaataattcaatctgaaacatccagctttggtaagttacaggattttcagtgctcagatgttgcgcaaacattattttccaagattcaaaagacaagaccccatccaagcaaccttgatattttatcggttgcccgcactgtatgctgcaagacaagtcttgctgctgcattggaagttaaatatggatctttacctgagaacatatttgtgaaagctgcaaagctatgcagtgacaatggcatccaaattgattggcatcaagaggtatttatatgccctaaaggttgcaaatctagatataattcaaatgctctgcttcctatgcaactcacggcagttgattttcctgaagctccttctgttgatcctcttaatgatgatgaaatgtgggcaatggaagaataccattatgttcttgattcaaagcactttggatggaagcctaaaaatgagagtgtcgttctctatgaagacataagctttggcagggagaaagttccaattgtctgtgtcattgatatggacgcaaaagattctttaggcatgaagcctgaagaacttttgtcacatggcagttctgtgccttggcaaggtttccactatatcacaaagcgtttgatggattcatctcttattaattcagagaactctatgcctgggtgcgcatgttctcatcctgaatgttctcctgagaaatgtggtcacgtgagtctcttcgatggtgtctatgctagtctggtggatatcaatggaacaccaatacatggcagatttgcatatgatgaaaatagtaaaattattttacaggaagggtatccaatatatgagtgcaattcatcatgtacttgtgactcatcctgccggaataaagtattgcagaaaggactgcttgttaagttggaactcttcagaactgagaataagggttgggctattagagctgccgaacctattccacagggtacctttgtctgcgagtatattggtgaagttgtgaaggccgacaagaccatgaaaaatgcagaaaggtcgagtttttatactgatgggatgcatctcattgaattctcatcccatacaattcagtgtgtcatcaaagagtgggtgcaattacttgtttgacattgcttctcagattgatagggaaagacttcggactgtaggggctattgaatacttgattgatgccacaagatctggaaatgtgtcccgctatatcaatcacagttgttccccaaatctcagcacccgattggttttggtagagagcaaagattgccagcttgctcacattggcttgtttgctaatcaagacattgccgtaggagaagaacttgcctatgattaccgacaaaagcttgtagcaggcgatggctgcttctgccattgtgggggtaccaattgccgaggccgtgtctattgacttcgcaggaagacactaactgttcaacgcttggttgcagaactcgaggtttctacagctgtgtaggctgctgagcgatttagcactgcaattttccagagctcgagtgcaggactaggatcccattcttcatgctacaaatagggattgtgatataggactcacagccagaaatgaagtgattcaggctgctttattcgtaggcgagaattctttcagtaaaattccttcattcatattttattgctcatgggcaccatcatcgacgtcaagtaataaactgcttatcccatttttgcgtttgttcatattagacgacggcctgttgtgcagttgtattaattgtgtgatgggtatcagaatgaatcaaaagatagtcttatttctctaaatgcgtgattatgaaattt

SEQ ID NO: 51219 - DNA, 4370 bp, Zea Mays
cagttggggagttttctgccttttcttctccccttctctgttttccttcaccgcgccaccgggggcgaatcgcggacgccgctcacctcccccatctcctccccaccacgtcgcaaacccatcgtcaccatcaccgcctccggccgcggctcccatcctcgcgtggccgtcgcgatccactacgagcttctctcgtccggtcttccgagtctcggctacctgctcctacgtcgaatcctcgggccctgctgtcgccaccgccgaatcctgctgcactcgccgcagccggggaacgcggacggcctgcgggagcttggcgcctcctccttcgcgttgcgtcgtcacgaggtggagaggaaaatggcaaactggaattcgatgctgtagagtagattgtcctttacctactctaagggcaaaaccaacacatgacaggaagagctatgttgtcgttttcttcccacgaacaaaaacttattcttgggtagacatgctacttgttcttccaatagaggaatgtcctttgccacttgtaaatggaactcatcgtaaatggagaaagctggtgaaggatttgaacattcctcgacgattcaacatgcaaaatcttgccgtttttatgataaatttaattgatgagcttcatatcgaggaacttcgacagtcccttcatgggaacaagcttaaggaattgaggaatgcatcagtgcagcctgaattgatccctgagtggaacagatggaaacaagaattgataaaacagtacttttcattgcatcctgctggtaatgttggaaactttgagaaaaacaattgttatgatgatccagctttagatcaacaaggtagtagaaaacgtccaaaacttgaggtccgaagaggagagatacaaatttcacacatgggtgaggctgactacaggactccaaccgaagacccaaaccaaaataaccttcctggtaactctgtcatgcatgaaaatgtaggggcattaggatcaacagatcaaaataattctgtcacgttgcctggaagttttggcaccaacgaaaacacaatatccagtagtgccaatgcagctttacagaatgctagacttgatttagattcattcaagagttctcggcagtgttctgcacacattgaagcaaaggggaggcaatgtggtaggtgggcaaatgatggtgatatttactgttgtgtgcatcaaagtatgcattttcttgaccattcttcaagggaggacaaggcacttaccattgaagctccgttgtgcagtggtatgactaacatgggtagaaaatgcaagcatcgagctcagtatggttctactttttgtaaaaagcaccggctacagacaaacttggatgcaatgcacccagaaaatttgttggatccatctgaggtactccatatgggtgaagaacctccgaataagtgggtggaagaaatttctaagtcgcaagcaatgtatagcatagacttggaaacagacaagaaagtccaggatgctgtaaaagtgaaattgatgacaattgtgtctatagagaactctggtgaaaaaggcgcaatggagaaagctgatatgtgtgtggcatcaacttctataacaaatactgatgatacttctctttgtattggaattcactctcatgatagtattgttgaatgccaggattatgccatgcaacatactctttattgtgagaagcaccttccaaggttccttaaacgtgccaggaatggtaagagtcgactcgtttctaaagatatcttcgtcaatctactgaagggatgcacatcaagaaaagataagatatgtctgcaccaagcatgtgaatttctttattggttcttgagaaacaacctttctcatcaacacactagtcttgctagtgaacatatgccccagatattggctgaagtgtctaaaaatccagatgttggagagtttttgttaaagttgatatctactgagagagagaaactagcaaatatctggggctttgatacaaatagatctaagcaaatatattctgaaaacaaagaagggtctctagtgttgcataaagagggaactaatctttcatctggtccgaagtgcaaaatctgtgctcaccagttctctgatgatgaagctcttggattacattggacaactgtccacaaaaaggaagcccggtggctgtttagagaagggacaaatggtctgtccctttatgatagccacaacattgaggatgccaatggctctcagaagttcatctgcagattatgtgggctcaaatttgatcttcagccagatcttggccgccaccataaagtcgctcatatggactcagatgttgttggccacagctcactgggccgtgggaagtatcagcttaaccgtggccgacactactattccgctttcaagaaaagtttacgaccaacaagtacattaaagaagaggagtagctctggaatcgagaaaaactttaagtttcagagttctgccctaacatctcaaataattcaatctgaaacatccagctttggtaagttacaggattttcagtgctcagatgttgcgcaaacattattttccaagattcaaaagacaagaccccatccaagcaaccttgatattttatcggttgcccgcactgtatgctgcaagacaagtcttgctgctgcattggaagttaaatatggatctttacctgagaacatatttgtgaaagctgcaaagctatgcagtgacaatggcatccaaattgattggcatcaagaggtatttatatgccctaaaggttgcaaatctagatataattcaaatgctctgcttcctatgcaactcacggcagttgattttcctgaagctccttctgttgatcctcttaatgatgatgaaatgtgggcaatggaagaataccattatgttcttgattcaaagcactttggatggaagcctaaaaatgagagtgtcgttctctatgaagacataagctttggcagggagaaagttccaattgtctgtgtcattgatatggacgcaaaagattctttaggcatgaagcctgaagaacttttgtcacatggcagttctgtgccttggcaaggtttccactatatcacaaagcgtttgatggattcatctcttattaattcagagaactctatgcctgggtgcgcatgttctcatcctgaatgttctcctgagaaatgtggtcacgtgagtctcttcgatggtgtctatgctagtctggtggatatcaatggaacaccaatacatggcagatttgcatatgatgaaaatagtaaaattattttacaggaagggtatccaatatatgagtgcaattcatcatgtacttgtgactcatcctgccggaataaagtattgcagaaaggactgcttgttaagttggaactcttcagaactgagaataagggttgggctattagagctgccgaacctattccacagggtacctttgtctgcgagtatattggtgaagttgtgaaggccgacaagaccatgaaaaatgcagaaagtgtgtcatcaaagagtgggtgcaattacttgtttgacattgcttctcagattgatagggaaagacttcggactgtaggggctattgaatacttgattgatgccacaagatctggaaatgtgtcccgctatatcaatcacagattgccgtaggagaagaacttgcctatgattaccgacaaaagcttgtagcaggcgatggctgcttctgccattgtgggggtaccaattgccgaggccgtgtctattgacttcgcaggaagacactaactgttcaacgcttggttgcagaactcgaggtttctacagctgtgtaggctgctgagcgatttagcactgcaattttccagagctcgagtgcaggactaggatcccattcttcatgctacaaatagggattgtgatataggactcacaggcaagcatcaggcaacaacatagtgtcgattttagtcatggtaccatcgtgcataactgattatttgtttgacgcagccagaaatgaagtgattcaggctgctttattcgtaggcgagaattctttcagtaaaattccttcattcatattttattgctcatgggcaccatcatcgacgtcaagtaataaactgcttatcccatttttgcgtttgttcatattagacgacggcctgttgtgcaggtaatattttgtagttgtattaattgcgtgatggctatcagaatcaatgaaaagataagtcttgtttctttaatggcgtatttgtattttgcagttgtattaattgtgtgatgggtatcagaatgaatcaaaagatagtcttatttctctaaatgcgtgattatgaaattt

SEQ ID NO: 51220 - DNA, 5128 bp, Zea Mays
cagttggggagttttctgccttttcttctccccttctctgttttccttcaccgcgccaccgggggcgaatcgcggacgccgctcacctcccccatctcctccccaccacgtcgcaaacccatcgtcaccatcaccgcctccggccgcggctcccatcctcgcgtggccgtcgcgatccactacgagcttctctcgtccggtcttccgagtctcggctacctgctcctacgtcgaatcctcgggccctgctgtcgccaccgccgaatcctgctgcactcgccgcagccggggaacgcggacggcctgcgggagcttggcgcctcctccttcgcgttgcgtcgtcacgaggaactaagtcaacagtctttatgggcttcatgctagtagaggataattccagcactgcttttggaggtcctgctattctttctcatatggattggtagaccagatcctggcaaagcaatgctgatggaccctcctgttatgcaaatggactgcaagttgaaaaatgacgtggataaaacatcatcaattgactatgataggaaggtgaccatctcacatgatgattatgggtgggcaggctctgatgtcaaaccaaaagatgatatagtatgtaaccctgtggagggtgcagaactaagaaataagaatggtgacagttcctactccaatgtaaaacttcagttgaactcaagtgctggaaataataatggcttgcaaactgatgatgacaactttactaaacaatattttggtaagaaggatatgcatcatcgacaggaagagatgcatccttcttccaacacagtgtcattaccaacttcatgcagactcaatggagatgccacaccttctgaagaggagaaaatagcagaggatcgtgtcaaagtggatggaaatgtagatgctgtaattaaggaagtcgaaactgacttggtaggatgccatgcacatcagaaagaatttcagtgcacgctccaagatctatcagaaatagcctgcagtattgatttagtacataatacatcttctccacaaggagagaataagaagcctgtctcccctttaaatggcatgggccattatgttgataacaatagttgtaatggtgataccaattataaaggggaggagctcaatatgggggatgctggggatgaggatcatgctatagcactttgggtgaagtggagaggaaaatggcaaactggaattcgatgctgtagagtagattgtcctttacctactctaagggcaaaaccaacacatgacaggaagagctatgttgtcgttttcttcccacgaacaaaaacttattcttgggtagacatgctacttgttcttccaatagaggaatgtcctttgccacttgtaaatggaactcatcgtaaatggagaaagctggtgaaggatttgaacattcctcgacgattcaacatgcaaaatcttgccgtttttatgataaatttaattgatgagcttcatatcgaggaacttcgacagtcccttcatgggaacaagcttaaggaattgaggaatgcatcagtgcagcctgaattgatccctgagtggaacagatggaaacaagaattgataaaacagtacttttcattgcatcctgctggtaatgttggaaactttgagaaaaacaattgttatgatgatccagctttagatcaacaaggtagtagaaaacgtccaaaacttgaggtccgaagaggagagatacaaatttcacacatgggtgaggctgactacaggactccaaccgaagacccaaaccaaaataaccttcctggtaactctgtcatgcatgaaaatgtaggggcattaggatcaacagatcaaaataattctgtcacgttgcctggaagttttggcaccaacgaaaacacaatatccagtagtgccaatgcagctttacagaatgctagacttgatttagattcattcaagagttctcggcagtgttctgcacacattgaagcaaaggggaggcaatgtggtaggtgggcaaatgatggtgatatttactgttgtgtgcatcaaagtatgcattttcttgaccattcttcaagggaggacaaggcacttaccattgaagctccgttgtgcagtggtatgactaacatgggtagaaaatgcaagcatcgagctcagtatggttctactttttgtaaaaagcaccggctacagacaaacttggatgcaatgcacccagaaaatttgttggatccatctgaggtactccatatgggtgaagaacctccgaataagtgggtggaagaaatttctaagtcgcaagcaatgtatagcatagacttggaaacagacaagaaagtccaggatgctgtaaaagtgaaattgatgacaattgtgtctatagagaactctggtgaaaaaggcgcaatggagaaagctgatatgtgtgtggcatcaacttctataacaaatactgatgatacttctctttgtattggaattcactctcatgatagtattgttgaatgccaggattatgccatgcaacatactctttattgtgagaagcaccttccaaggttccttaaacgtgccaggaatggtaagagtcgactcgtttctaaagatatcttcgtcaatctactgaagggatgcacatcaagaaaagataagatatgtctgcaccaagcatgtgaatttctttattggttcttgagaaacaacctttctcatcaacacactagtcttgctagtgaacatatgccccagatattggctgaagtgtctaaaaatccagatgttggagagtttttgttaaagttgatatctactgagagagagaaactagcaaatatctggggctttgatacaaatagatctaagcaaatatattctgaaaacaaagaagggtctctagtgttgcataaagagggaactaatctttcatctggtccgaagtgcaaaatctgtgctcaccagttctctgatgatgaagctcttggattacattggacaactgtccacaaaaaggaagcccggtggctgtttagagaagggacaaatggtctgtccctttatgatagccacaacattgaggatgccaatggctctcagaagttcatctgcagattatgtgggctcaaatttgatcttcagccagatcttggccgccaccataaagtcgctcatatggactcagatgttgttggccacagctcactgggccgtgggaagtatcagcttaaccgtggccgacactactattccgctttcaagaaaagtttacgaccaacaagtacattaaagaagaggagtagctctggaatcgagaaaaactttaagtttcagagttctgccctaacatctcaaataattcaatctgaaacatccagctttggtaagttacaggattttcagtgctcagatgttgcgcaaacattattttccaagattcaaaagacaagaccccatccaagcaaccttgatattttatcggttgcccgcactgtatgctgcaagacaagtcttgctgctgcattggaagttaaatatggatctttacctgagaacatatttgtgaaagctgcaaagctatgcagtgacaatggcatccaaattgattggcatcaagaggtatttatatgccctaaaggttgcaaatctagatataattcaaatgctctgcttcctatgcaactcacggcagttgattttcctgaagctccttctgttgatcctcttaatgatgatgaaatgtgggcaatggaagaataccattatgttcttgattcaaagcactttggatggaagcctaaaaatgagagtgtcgttctctatgaagacataagctttggcagggagaaagttccaattgtctgtgtcattgatatggacgcaaaagattctttaggcatgaagcctgaagaacttttgtcacatggcagttctgtgccttggcaaggtttccactatatcacaaagcgtttgatggattcatctcttattaattcagagaactctatgcctgggtgcgcatgttctcatcctgaatgttctcctgagaaatgtggtcacgtgagtctcttcgatggtgtctatgctagtctggtggatatcaatggaacaccaatacatggcagatttgcatatgatgaaaatagtaaaattattttacaggaagggtatccaatatatgagtgcaattcatcatgtacttgtgactcatcctgccggaataaagtattgcagaaaggactgcttgttaagttggaactcttcagaactgagaataagggttgggctattagagctgccgaacctattccacagggtacctttgtctgcgagtatattggtgaagttgtgaaggccgacaagaccatgaaaaatgcagaaagtgtgtcatcaaagagtgggtgcaattacttgtttgacattgcttctcagattgatagggaaagacttcggactgtaggggctattgaatacttgattgatgccacaagatctggaaatgtgtcccgctatatcaatcacagttgttccccaaatctcagcacccgattggttttggtagagagcaaagattgccagcttgctcacattggcttgtttgctaatcaagacattgccgtaggagaagaacttgcctatgattaccgacaaaagcttgtagcaggcgatggctgcttctgccattgtgggggtaccaattgccgaggccgtgtctattgacttcgcaggaagacactaactgttcaacgcttggttgcagaactcgaggtttctacagctgtgtaggctgctgagcgatttagcactgcaattttccagagctcgagtgcaggactaggatcccattcttcatgctacaaatagggattgtgatataggactcacagaaatgaagtgattcaggctgctttattcgtaggcgagaattctttcagtaaaattccttcattcatattttattgctcatgggcaccatcatcgacgtcaagtaataaactgcttatcccatttttgcgtttgttcatattagacgacggcctgttgtgcagttgtattaattgtgtgatgggtatcagaatgaatcaaaagatagtcttatttctctaaatgcgtgattatgaaattt

SEQ ID NO: 51221 - DNA, 4500 bp, Zea Mays
cagttggggagttttctgccttttcttctccccttctctgttttccttcaccgcgccaccgggggcgaatcgcggacgccgctcacctcccccatctcctccccaccacgtcgcaaacccatcgtcaccatcaccgcctccggccgcggctcccatcctcgcgtggccgtcgcgatccactacgagcttctctcgtccggtcttccgagtctcggctacctgctcctacgtcgaatcctcgggccctgctgtcgccaccgccgaatcctgctgcactcgccgcagccggggaacgcggacggcctgcgggagcttggcgcctcctccttcgcgttgcgtcgtcacgaggtggagaggaaaatggcaaactggaattcgatgctgtagagtagattgtcctttacctactctaagggcaaaaccaacacatgacaggaagagctatgttgtcgttttcttcccacgaacaaaaacttattcttgggtagacatgctacttgttcttccaatagaggaatgtcctttgccacttgtaaatggaactcatcgtaaatggagaaagctggtgaaggatttgaacattcctcgacgattcaacatgcaaaatcttgccgtttttatgataaatttaattgatgagcttcatatcgaggaacttcgacagtcccttcatgggaacaagcttaaggaattgaggaatgcatcagtgcagcctgaattgatccctgagtggaacagatggaaacaagaattgataaaacagtacttttcattgcatcctgctggtaatgttggaaactttgagaaaaacaattgttatgatgatccagctttagatcaacaaggtagtagaaaacgtccaaaacttgaggtccgaagaggagagatacaaatttcacacatgggtgaggctgactacaggactccaaccgaagacccaaaccaaaataaccttcctggtaactctgtcatgcatgaaaatgtaggggcattaggatcaacagatcaaaataattctgtcacgttgcctggaagttttggcaccaacgaaaacacaatatccagtagtgccaatgcagctttacagaatgctagacttgatttagattcattcaagagttctcggcagtgttctgcacacattgaagcaaaggggaggcaatgtggtaggtgggcaaatgatggtgatatttactgttgtgtgcatcaaagtatgcattttcttgaccattcttcaagggaggacaaggcacttaccattgaagctccgttgtgcagtggtatgactaacatgggtagaaaatgcaagcatcgagctcagtatggttctactttttgtaaaaagcaccggctacagacaaacttggatgcaatgcacccagaaaatttgttggatccatctgaggtactccatatgggtgaagaacctccgaataagtgggtggaagaaatttctaagtcgcaagcaatgtatagcatagacttggaaacagacaagaaagtccaggatgctgtaaaagtgaaattgatgacaattgtgtctatagagaactctggtgaaaaaggcgcaatggagaaagctgatatgtgtgtggcatcaacttctataacaaatactgatgatacttctctttgtattggaattcactctcatgatagtattgttgaatgccaggattatgccatgcaacatactctttattgtgagaagcaccttccaaggttccttaaacgtgccaggaatggtaagagtcgactcgtttctaaagatatcttcgtcaatctactgaagggatgcacatcaagaaaagataagatatgtctgcaccaagcatgtgaatttctttattggttcttgagaaacaacctttctcatcaacacactagtcttgctagtgaacatatgccccagatattggctgaagtgtctaaaaatccagatgttggagagtttttgttaaagttgatatctactgagagagagaaactagcaaatatctggggctttgatacaaatagatctaagcaaatatattctgaaaacaaagaagggtctctagtgttgcataaagagggaactaatctttcatctggtccgaagtgcaaaatctgtgctcaccagttctctgatgatgaagctcttggattacattggacaactgtccacaaaaaggaagcccggtggctgtttagagaagggacaaatggtctgtccctttatgatagccacaacattgaggatgccaatggctctcagaagttcatctgcagattatgtgggctcaaatttgatcttcagccagatcttggccgccaccataaagtcgctcatatggactcagatgttgttggccacagctcactgggccgtgggaagtatcagcttaaccgtggccgacactactattccgctttcaagaaaagtttacgaccaacaagtacattaaagaagaggagtagctctggaatcgagaaaaactttaagtttcagagttctgccctaacatctcaaataattcaatctgaaacatccagctttggtaagttacaggattttcagtgctcagatgttgcgcaaacattattttccaagattcaaaagacaagaccccatccaagcaaccttgatattttatcggttgcccgcactgtatgctgcaagacaagtcttgctgctgcattggaagttaaatatggatctttacctgagaacatatttgtgaaagctgcaaagctatgcagtgacaatggcatccaaattgattggcatcaagaggtatttatatgccctaaaggttgcaaatctagatataattcaaatgctctgcttcctatgcaactcacggcagttgattttcctgaagctccttctgttgatcctcttaatgatgatgaaatgtgggcaatggaagaataccattatgttcttgattcaaagcactttggatggaagcctaaaaatgagagtgtcgttctctatgaagacataagctttggcagggagaaagttccaattgtctgtgtcattgatatggacgcaaaagattctttaggcatgaagcctgaagaacttttgtcacatggcagttctgtgccttggcaaggtttccactatatcacaaagcgtttgatggattcatctcttattaattcagagaactctatgcctgggtgcgcatgttctcatcctgaatgttctcctgagaaatgtggtcacgtgagtctcttcgatggtgtctatgctagtctggtggatatcaatggaacaccaatacatggcagatttgcatatgatgaaaatagtaaaattattttacaggaagggtatccaatatatgagtgcaattcatcatgtacttgtgactcatcctgccggaataaagtattgcagaaaggactgcttgttaagttggaactcttcagaactgagaataaggtgaagtactctgtactccccatgatggatttccgaactcctggttgggctattagagctgccgaacctattccacagggtacctttgtctgcgagtatattggtgaagttgtgaaggccgacaagaccatgaaaaatgcagaaagtgtgtcatcaaagagtgggtgcaattacttgtttgacattgcttctcagattgatagggaaagacttcggactgtaggggctattgaatacttgattgatgccacaagatctggaaatgtgtcccgctatatcaatcacagttgttccccaaatctcagcacccgattggttttggtagagagcaaagattgccagcttgctcacattggcttgtttgctaatcaagacattgccgtaggagaagaacttgcctatgattaccgacaaaagcttgtagcaggcgatggctgcttctgccattgtgggggtaccaattgccgaggccgtgtctattgacttcgcaggaagacactaactgttcaacgcttggttgcagaactcgaggtttctacagctgtgtaggctgctgagcgatttagcactgcaattttccagagctcgagtgcaggactaggatcccattcttcatgctacaaatagggattgtgatataggactcacaggcaagcatcaggcaacaacatagtgtcgattttagtcatggtaccatcgtgcataactgattatttgtttgacgcagccagaaatgaagtgattcaggctgctttattcgtaggcgagaattctttcagtaaaattccttcattcatattttattgctcatgggcaccatcatcgacgtcaagtaataaactgcttatcccatttttgcgtttgttcatattagacgacggcctgttgtgcaggtaatattttgtagttgtattaattgcgtgatggctatcagaatcaatgaaaagataagtcttgtttctttaatggcgtatttgtattttgcagttgtattaattgtgtgatgggtatcagaatgaatcaaaagatagtcttatttctctaaatgcgtgattatgaaattt

SEQ ID NO: 51222 - DNA, 4451 bp, Zea Mays
cagttggggagttttctgccttttcttctccccttctctgttttccttcaccgcgccaccgggggcgaatcgcggacgccgctcacctcccccatctcctccccaccacgtcgcaaacccatcgtcaccatcaccgcctccggccgcggctcccatcctcgcgtggccgtcgcgatccactacgagcttctctcgtccggtcttccgagtctcggctacctgctcctacgtcgaatcctcgggccctgctgtcgccaccgccgaatcctgctgcactcgccgcagccggggaacgcggacggcctgcgggagcttggcgcctcctccttcgcgttgcgtcgtcacgaggtggagaggaaaatggcaaactggaattcgatgctgtagagtagattgtcctttacctactctaagggcaaaaccaacacatgacaggaagagctatgttgtcgttttcttcccacgaacaaaaacttattcttgggtagacatgctacttgttcttccaatagaggaatgtcctttgccacttgtaaatggaactcatcgtaaatggagaaagctggtgaaggatttgaacattcctcgacgattcaacatgcaaaatcttgccgtttttatgataaatttaattgatgagcttcatatcgaggaacttcgacagtcccttcatgggaacaagcttaaggaattgaggaatgcatcagtgcagcctgaattgatccctgagtggaacagatggaaacaagaattgataaaacagtacttttcattgcatcctgctggtaatgttggaaactttgagaaaaacaattgttatgatgatccagctttagatcaacaaggtagtagaaaacgtccaaaacttgaggtccgaagaggagagatacaaatttcacacatgggtgaggctgactacaggactccaaccgaagacccaaaccaaaataaccttcctggtaactctgtcatgcatgaaaatgtaggggcattaggatcaacagatcaaaataattctgtcacgttgcctggaagttttggcaccaacgaaaacacaatatccagtagtgccaatgcagctttacagaatgctagacttgatttagattcattcaagagttctcggcagtgttctgcacacattgaagcaaaggggaggcaatgtggtaggtgggcaaatgatggtgatatttactgttgtgtgcatcaaagtatgcattttcttgaccattcttcaagggaggacaaggcacttaccattgaagctccgttgtgcagtggtatgactaacatgggtagaaaatgcaagcatcgagctcagtatggttctactttttgtaaaaagcaccggctacagacaaacttggatgcaatgcacccagaaaatttgttggatccatctgaggtactccatatgggtgaagaacctccgaataagtgggtggaagaaatttctaagtcgcaagcaatgtatagcatagacttggaaacagacaagaaagtccaggatgctgtaaaagtgaaattgatgacaattgtgtctatagagaactctggtgaaaaaggcgcaatggagaaagctgatatgtgtgtggcatcaacttctataacaaatactgatgatacttctctttgtattggaattcactctcatgatagtattgttgaatgccaggattatgccatgcaacatactctttattgtgagaagcaccttccaaggttccttaaacgtgccaggaatggtaagagtcgactcgtttctaaagatatcttcgtcaatctactgaagggatgcacatcaagaaaagataagatatgtctgcaccaagcatgtgaatttctttattggttcttgagaaacaacctttctcatcaacacactagtcttgctagtgaacatatgccccagatattggctgaagtgtctaaaaatccagatgttggagagtttttgttaaagttgatatctactgagagagagaaactagcaaatatctggggctttgatacaaatagatctaagcaaatatattctgaaaacaaagaagggtctctagtgttgcataaagagggaactaatctttcatctggtccgaagtgcaaaatctgtgctcaccagttctctgatgatgaagctcttggattacattggacaactgtccacaaaaaggaagcccggtggctgtttagagaagggacaaatggtctgtccctttatgatagccacaacattgaggatgccaatggctctcagaagttcatctgcagattatgtgggctcaaatttgatcttcagccagatcttggccgccaccataaagtcgctcatatggactcagatgttgttggccacagctcactgggccgtgggaagtatcagcttaaccgtggccgacactactattccgctttcaagaaaagtttacgaccaacaagtacattaaagaagaggagtagctctggaatcgagaaaaactttaagtttcagagttctgccctaacatctcaaataattcaatctgaaacatccagctttggtaagttacaggattttcagtgctcagatgttgcgcaaacattattttccaagattcaaaagacaagaccccatccaagcaaccttgatattttatcggttgcccgcactgtatgctgcaagacaagtcttgctgctgcattggaagttaaatatggatctttacctgagaacatatttgtgaaagctgcaaagctatgcagtgacaatggcatccaaattgattggcatcaagaggtatttatatgccctaaaggttgcaaatctagatataattcaaatgctctgcttcctatgcaactcacggcagttgattttcctgaagctccttctgttgatcctcttaatgatgatgaaatgtgggcaatggaagaataccattatgttcttgattcaaagcactttggatggaagcctaaaaatgagagtgtcgttctctatgaagacataagctttggcagggagaaagttccaattgtctgtgtcattgatatggacgcaaaagattctttaggcatgaagcctgaagaacttttgtcacatggcagttctgtgccttggcaaggtttccactatatcacaaagcgtttgatggattcatctcttattaattcagagaactctatgcctgggtgcgcatgttctcatcctgaatgttctcctgagaaatgtggtcacgtgagtctcttcgatggtgtctatgctagtctggtggatatcaatggaacaccaatacatggcagatttgcatatgatgaaaatagtaaaattattttacaggaagggtatccaatatatgagtgcaattcatcatgtacttgtgactcatcctgccggaataaagtattgcagaaaggactgcttgttaagttggaactcttcagaactgagaataaggtgaagtactctgtactccccatgatggatttccgaactcctggttgggctattagagctgccgaacctattccacagggtacctttgtctgcgagtatattggtgaagttgtgaaggccgacaagaccatgaaaaatgcagaaagattgatagggaaagacttcggactgtaggggctattgaatacttgattgatgccacaagatctggaaatgtgtcccgctatatcaatcacagttgttccccaaatctcagcacccgattggttttggtagagagcaaagattgccagcttgctcacattggcttgtttgctaatcaagacattgccgtaggagaagaacttgcctatgattaccgacaaaagcttgtagcaggcgatggctgcttctgccattgtgggggtaccaattgccgaggccgtgtctattgacttcgcaggaagacactaactgttcaacgcttggttgcagaactcgaggtttctacagctgtgtaggctgctgagcgatttagcactgcaattttccagagctcgagtgcaggactaggatcccattcttcatgctacaaatagggattgtgatataggactcacaggcaagcatcaggcaacaacatagtgtcgattttagtcatggtaccatcgtgcataactgattatttgtttgacgcagccagaaatgaagtgattcaggctgctttattcgtaggcgagaattctttcagtaaaattccttcattcatattttattgctcatgggcaccatcatcgacgtcaagtaataaactgcttatcccatttttgcgtttgttcatattagacgacggcctgttgtgcaggtaatattttgtagttgtattaattgcgtgatggctatcagaatcaatgaaaagataagtcttgtttctttaatggcgtatttgtattttgcagttgtattaattgtgtgatgggtatcagaatgaatcaaaagatagtcttatttctctaaatgcgtgattatgaaattt

SEQ ID NO: 51223 - DNA, 1483 bp, Zea Mays
gcgtgcgctgtctccccccaggccccccacctctctggctctctctctctctgcgagtctgcgacgacggggctaccgccgcctccgtacgccaggtgccgaggtcttcgttggtcctttcgccggcgacatccaccagaaattatatcatcaattcattaccgggtgtacatttgtacacagtacacccatgtccttcactggatccgcccctgtagtgaggataatatctttggagtttcggagggggcgcgctagaaggatggtttccaaaatgagatttcggaatgctctcggttctagaccatttcagtgttgttcgcgtgagaatcatacatatgtccggaagctgttggaccgagtgtcggagagatcaaagctccttaaaaaggtgtctgttttggtgggttacagtaatccacaagatttagttgagaaacaaagagcccctggggaatcttctgcagagttgattagtgccttgaaagaaatcgatttcccagaaattactgcaaagtttccatgcataaaagttggtgatgcatcacctgttgaactgtatgaggattctactaacatgaagtttaaagaagctgcactttctgaaaagctcacaaatttcatccaaggctcagctcgaaatttggagtcagcttatgaattccataatgactgtcatccattgaatcaaacacccacaactgcaggtgatctttcaatcagtgaagagatccctctcattgaaccaatagttgatacgaagtcccccgagtcattgtcagatgctataacctctgacaatagtatactggataaaagtataaggtgcttgcctggaacaactagtaggcaatatcgccagctagaggatggtggtttccatacggtccgcaaattattgcagcattttcctcggacttatgcagatctgcaaaaccctcaaggccccatagaatatgggcagtatattatgttatctggtactgttatatcttccaggggaatcaaggttaagtccactttaggtcttcttgaggtggttgttggttgttccataatcgagtctgaattgagctcttcagttgagagtagtcactctggagcagagcaaaagagaattcacttgcacctcaacagatttttcagtggcgcacgtttttcttcccaacattttcttaacttaatgtcagcaaagcacaaagaaggggatcttgtttatgttagtggtaagataaaaaaggtgcttgctaatggccattatgagttgaaggagtacacaattgacgctattgaaggagaaggggaacacagcactatgcttgctaggaaaccacaccctatatacccgtcgaaagcgggattaaaacctagtctgcttggcctttcaatctctagggccttgaagatattgagcccagatgttgatccagtgcctcccgatgttctcgttgaattcaacttgcctaatctctttgatcaatag

SEQ ID NO: 51224 - DNA, 1478 bp, Zea Mays
gcgtgcgctgtctccccccaggccccccacctctctggctctctctctctctgcgagtctgcgacgacggggctaccgccgcctccgtacgccaggtgccgaggtcttcgttggtcctttcgccggcgacatccaccagaaattatatcatcaattcattaccgggtgtacatttgtacacagtacacccatgtccttcactggatccgcccctgtagtgaggataatatctttggagtttcggagggggcgcgctagaaggatggtttccaaaatgagatttcggaatgctctcggttctagaccatttcagtgttgttcgcgtgagaatcatacatatgtccggaagctgttggaccgagtgtcggagagatcaaagctccttaaaaaggtgtctgttttggtgggttacagtaatccacaagatttagttgagaaacaaagagcccctggggaatcttctgcagagttgattagtgccttgaaagaaatcgatttcccagaaattactgcaaagtttccatgcataaaagttggtgatgcatcacctgttgaactgtatgaggattctactaacatgaagtttaaagaagctgcactttctgaaaagctcacaaatttcatccaaggctcagctcgaaatttggagtcagcttatgaattccataatgactgtcatccattgaatcaaacacccacaactgcaggtgatctttcaatcagtgaagagatccctctcattgaaccaatagttgatacgaagtcccccgagtcattgtcagatgctataacctctgacaatagtatactggataaaagtataaggtgcttgcctggaacaactagtaggcaatatcgccagctagaggatggtggtttccatacggtccgcaaattattgcagcattttcctcggacttatgcagatctgcaaaaccctcaaggccccatagaatatgggcagtatattatgttatctggtactgttatatcttccaggggaatcaaggttaagtccactttaggtcttcttgaggtggttgttggttgttccataatcgagtctgaattgagctcttcagttgagagtagtcactctggagcagagcaaaagagaattcacttgcacctcaacagatttttcagtggcgcacgtttttcttcccaacattttcttaacttaatgtcagcaaagcacaaagaaggggatcttgtttatgttagtgataaaaaaggtgcttgctaatggccattatgagttgaaggagtacacaattgacgctattgaaggagaaggggaacacagcactatgcttgctaggaaaccacaccctatatacccgtcgaaagcgggattaaaacctagtctgcttggcctttcaatctctagggccttgaagatattgagcccagatgttgatccagtgcctcccgatgttctcgttgaattcaacttgcctaatctctttgatcaatag

SEQ ID NO: 51225 - DNA, 3571 bp, Zea Mays
gcgtgcgctgtctccccccaggccccccacctctctggctctctctctctctgcgagtctgcgacgacggggctaccgccgcctccgtacgccaggtgccgaggtcttcgttggtcctttcgccggcgacatccaccagaaattatatcatcaattcattaccgggtgtacatttgtacacagtacacccatgtccttcactggatccgcccctgtagtgaggataatatctttggagtttcggagggggcgcgctagaaggatggtttccaaaatgagatttcggaatgctctcggttctagaccatttcagtgttgttcgcgtgagaatcatacatatgtccggaagctgttggaccgagtgtcggagagatcaaagctccttaaaaaggtgtctgttttggtgggttacagtaatccacaagatttagttgagaaacaaagagcccctggggaatcttctgcagagttgattagtgccttgaaagaaatcgatttcccagaaattactgcaaagtttccatgcataaaagttggtgatgcatcacctgttgaactgtatgaggattctactaacatgaagtttaaagaagctgcactttctgaaaagctcacaaatttcatccaaggctcagctcgaaatttggagtcagcttatgaattccataatgactgtcatccattgaatcaaacacccacaactgcaggtgatctttcaatcagtgaagagatccctctcattgaaccaatagttgatacgaagtcccccgagtcattgtcagatgctataacctctgacaatagtatactggataaaagtataaggtgcttgcctggaacaactagtaggcaatatcgccagctagaggatggtggtttccatacggtccgcaaattattgcagcattttcctcggacttatgcagatctgcaaaaccctcaaggccccatagaatatgggcagtatattatgttatctggggaatcaaggttaagtccactttaggtcttcttgaggtggttgttggttgttccataatcgagtctgaattgagctcttcagttgagagtagtcactctggagcagagcaaaagagaattcacttgcacctcaacagatttttcagtggcgcacgtttttcttcccaacattttcttaacttaatgtcagcaaagcacaaagaaggggatcttgtttatgttagtgggccttgaagatattgagcccagatgttgatccagtgcctcccgatgttctcgttgaattcaacttgcctaatctctttgatgcttacatgggaattcacaaacctaaggatcgatctgaagctgattttgctcgaagaaggcttatatttgatgatttcttttacctccagttaggaagactatttcaaatgcttgaagcagttggtacgcgggttgagaaggaggaattgttatacaagtgcaaaagtcatgagctgaatactgttggtgtagatgattggtctcctcttacaaagaaattgttgagggctcttccttattggcttactcctagtcagttggatgctgttcaagagattatatgggatctcaggagaccagttcccatgaacagactcttgcagggggatgttggttgtggaaagaccattgttgctttcctggcatgtatggaggttgttaattcaggatttcaggctgctttcatggttccaacagaggtgcttgctgtccagcattatgaacacctaacttcattgctagagaagtttgatggagatgagaaaccaaatattgccttgctaactggttcaacgtccacaagggagtcaaggataattcgagatggtctgaaaactggagagataggcatggtcattggaacacactgcttaatagctgataaaactgaattttcagctttacgtatctctgttatagatgaacagcagcgctttggagttgtacagagaggcaggtttaacagtaagctatatacttcttcctcaaagttgagtggtgaaaatacaagttcagacgaggcttctgattctgaaacatttatggctccacacgttcttgcgatgtcagctacccctattccaagaacattggcacttgctttatatggtgatatgtctcttactcagatcacggacctgcctcctggaaggcaacctattaaaacccttgctcttgaaggaaatgatgtagggtttgaagctgtcttccagatgatgagggatgaactgatagacgggggcaaggtctaccttgtgtatcctatcatagatgagtctgagcacttgccacaactccgtgctgcaacagctggatttgattccataaagcaaaaattcgaaggctatccctgtgggctattacacggccgcatgaggagcgatgagaaggaagaaactctcaacagttttagaagcggagaaacacgcattctcctgtcgacacaggtgatcgagatcggggtcgatgttcctgatgcttccatgatggttgtcatgaacgctgagcgatttggaatctctcagctgcatcagctgcgagggagagtaggtcgcggtgagaggaaatccagatgcatattcctggcttcaacttcgagcacgctgccaaggctgaaggtgctcgagaagtcctccgatgggttttacctggctaatgcagacctgctgctccgtggccctggcaatctactaggtaaaaagcaatctggtcatcttccagaatttccaatagctagattggaggtcgatggtggtattttacaagaggcccatcttgccgctctgaaagtgctggtcgcaagcaacgacctagcgttgtatccacggctgaaggtggagctcagcatgaggcagccattgtgcattcttggagattgacatgtcaacagtactgctcgtaggctcgtagcattgggcgacgcgtgtactgtggataactattggtcgtaggctcgtagcgtcggcaaagttgacatgccgtctggtgagcgaggcgtgtaccatgaataactgttagactgattgtgtgagtgtgtgtgggctggtaccattgttaggctgccggttcattagggttagagttgagtctatatattgtaaccccttctctatgcaatacaatgatccacttcactattctacatgttattagactaggttagggttttctgaaacccacagtagccaccggtcgcctcccaccccacagcagccgccaccacctgagccgtcgtcgccctccaggaggctcctccctctcggggcggcacttgcccctggcgcggctgtgcatgggcgcggcccctcgtagctcggcgcgggagtggcagcccctggcctcgacggcgcgaggcgcgaccccctggcagtgtggacgcgacggtccgtccatggcggcgcggccacgccggccccggcgcgggaaacggctcggcggcgcacgacacggagcctcatcacgaggcaatggtggccacggcgccgccctggcggctggctcctccggcgaggtacagcctcggcgcgacctaggcgcgagcgtaggctcgtgggcctcctct

SEQ ID NO: 51226 - DNA, 3754 bp, Zea Mays
gcgtgcgctgtctccccccaggccccccacctctctggctctctctctctctgcgagtctgcgacgacggggctaccgccgcctccgtacgccaggtgccgaggtcttcgttggtcctttcgccggcgacatccaccagaaattatatcatcaattcattaccgggtgtacatttgtacacagtacacccatgtccttcactggatccgcccctgtagtgaggataatatctttggagtttcggagggggcgcgctagaaggatggtttccaaaatgagatttcggaatgctctcggttctagaccatttcagtgttgttcgcgtgagaatcatacatatgtccggaagctgttggaccgagtgtcggagagatcaaagctccttaaaaaggtgtctgttttggtgggttacagtaatccacaagatttagttgagaaacaaagagcccctggggaatcttctgcagagttgattagtgccttgaaagaaatcgatttcccagaaattactgcaaagtttccatgcataaaagttggtgatgcatcacctgttgaactgtatgaggattctactaacatgaagtttaaagaagctgcactttctgaaaagctcacaaatttcatccaaggctcagctcgaaatttggagtcagcttatgaattccataatgactgtcatccattgaatcaaacacccacaactgcaggtgatctttcaatcagtgaagagatccctctcattgaaccaatagttgatacgaagtcccccgagtcattgtcagatgctataacctctgacaatagtatactggataaaagtataaggtgcttgcctggaacaactagtaggcaatatcgccagctagaggatggtggtttccatacggtccgcaaattattgcagcattttcctcggacttatgcagatctgcaaaaccctcaaggccccatagaatatgggcagtatattatgttatctggtactgttatatcttccaggggaatcaaggttaagtccactttaggtcttcttgaggtggttgttggttgttccataatcgagtctgaattgagctcttcagttgagagtagtcactctggagcagagcaaaagagaattcacttgcacctcaacagatttttcagtggcgcacgtttttcttcccaacattttcttaacttaatgtcagcaaagcacaaagaaggggatcttgtttatgttagtgataaaaaaggtgcttgctaatggccattatgagttgaaggagtacacaattgacgctattgaaggagaaggggaacacagcactatgcttgctaggaaaccacaccctatatacccgtcgaaagcgggattaaaacctagtctgcttggcctttcaatctctagggccttgaagatattgagcccagatgttgatccagtgcctcccgatgttctcgttgaattcaacttgcctaatctctttgatgcttacatgggaattcacaaacctaaggatcgatctgaagctgattttgctcgaagaaggcttatatttgatgatttcttttacctccagttaggaagactatttcaaatgcttgaagcagttggtacgcgggttgagaaggaggaattgttatacaagtgcaaaagtcatgagctgaatactgttggtgtagatgattggtctcctcttacaaagaaattgttgagggctcttccttattggcttactcctagtcagttggatgctgttcaagagattatatgggatctcaggagaccagttcccatgaacagactcttgcagggggatgttggttgtggaaagaccattgttgctttcctggcatgtatggaggttgttaattcaggatttcaggctgctttcatggttccaacagaggtgcttgctgtccagcattatgaacacctaacttcattgctagagaagtttgatggagatgagaaaccaaatattgccttgctaactggttcaacgtccacaagggagtcaaggataattcgagatggtctgaaaactggagagataggcatggtcattggaacacactgcttaatagctgataaaactgaattttcagctttacgtatctctgttatagatgaacagcagcgctttggagttgtacagagaggcaggtttaacagtaagctatatacttcttcctcaaagttgagtggtgaaaatacaagttcagacgaggcttctgattctgaaacatttatggctccacacgttcttgcgatgtcagctacccctattccaagaacattggcacttgctttatatggtgatatgtctcttactcagatcacggacctgcctcctggaaggcaacctattaaaacccttgctcttgaaggaaatgatgtagggtttgaagctgtcttccagatgatgagggatgaactgatagacgggggcaaggtctaccttgtgtatcctatcatagatgagtctgagcacttgccacaactccgtgctgcaacagctggatttgattccataaagcaaaaattcgaaggctatccctgtgggctattacacggccgcatgaggagcgatgagaaggaagaaactctcaacagttttagaagcggagaaacacgcattctcctgtcgacacaggtgatcgagatcggggtcgatgttcctgatgcttccatgatggttgtcatgaacgctgagcgatttggaatctctcagctgcatcagctgcgagggagagtaggtcgcggtgagaggaaatccagatgcatattcctggcttcaacttcgagcacgctgccaaggctgaaggtgctcgagaagtcctccgatgggttttacctggctaatgcagacctgctgctccgtggccctggcaatctactaggtaaaaagcaatctggtcatcttccagaatttccaatagctagattggaggtcgatggtggtattttacaagaggcccatcttgccgctctgaaagtgctggtcgcaagcaacgacctagcgttgtatccacggctgaaggtggagctcagcatgaggcagccattgtgcattcttggagattgacatgtcaacagtactgctcgtaggctcgtagcattgggcgacgcgtgtactgtggataactattggtcgtaggctcgtagcgtcggcaaagttgacatgccgtctggtgagcgaggcgtgtaccatgaataactgttagactgattgtgtgagtgtgtgtgggctggtaccattgttaggctgccggttcattagggttagagttgagtctatatattgtaaccccttctctatgcaatacaatgatccacttcactattctacatgttattagactaggttagggttttctgaaacccacagtagccaccggtcgcctcccaccccacagcagccgccaccacctgagccgtcgtcgccctccaggaggctcctccctctcggggcggcacttgcccctggcgcggctgtgcatgggcgcggcccctcgtagctcggcgcgggagtggcagcccctggcctcgacggcgcgaggcgcgaccccctggcagtgtggacgcgacggtccgtccatggcggcgcggccacgccggccccggcgcgggaaacggctcggcggcgcacgacacggagcctcatcacgaggcaatggtggccacggcgccgccctggcggctggctcctccggcgaggtacagcctcggcgcgacctaggcgcgagcgtaggctcgtgggcctcctct

SEQ ID NO: 51227 - DNA, 3146 bp, Zea Mays
gcgtgcgctgtctccccccaggccccccacctctctggctctctctctctctgcgagtctgcgacgacggggctaccgccgcctccgtacgccaggtgccgaggtcttcgttggtcctttcgccggcgacatccaccagaaattatatcatcaattcattaccgggtgtacatttgtacacagtacacccatgtccttcactggatccgcccctgtagtgaggataatatctttggagtttcggagggggcgcgctagaaggatggtttccaaaatgagatttcggaatgctctcggttctagaccatttcagtgttgttcgcgtgagaatcatacatatgtccggaagctgttggaccgagtgtcggagagatcaaagctccttaaaaaggggaatcaaggttaagtccactttaggtcttcttgaggtggttgttggttgttccataatcgagtctgaattgagctcttcagttgagagtagtcactctggagcagagcaaaagagaattcacttgcacctcaacagatttttcagtggcgcacgtttttcttcccaacattttcttaacttaatgtcagcaaagcacaaagaaggggatcttgtttatgttagtgataaaaaaggtgcttgctaatggccattatgagttgaaggagtacacaattgacgctattgaaggagaaggggaacacagcactatgcttgctaggaaaccacaccctatatacccgtcgaaagcgggattaaaacctagtctgcttggcctttcaatctctagggccttgaagatattgagcccagatgttgatccagtgcctcccgatgttctcgttgaattcaacttgcctaatctctttgatgcttacatgggaattcacaaacctaaggatcgatctgaagctgattttgctcgaagaaggcttatatttgatgatttcttttacctccagttaggaagactatttcaaatgcttgaagcagttggtacgcgggttgagaaggaggaattgttatacaagtgcaaaagtcatgagctgaatactgttggtgtagatgattggtctcctcttacaaagaaattgttgagggctcttccttattggcttactcctagtcagttggatgctgttcaagagattatatgggatctcaggagaccagttcccatgaacagactcttgcagggggatgttggttgtggaaagaccattgttgctttcctggcatgtatggaggttgttaattcaggatttcaggctgctttcatggttccaacagaggtgcttgctgtccagcattatgaacacctaacttcattgctagagaagtttgatggagatgagaaaccaaatattgccttgctaactggttcaacgtccacaagggagtcaaggataattcgagatggtctgaaaactggagagataggcatggtcattggaacacactgcttaatagctgataaaactgaattttcagctttacgtatctctgttatagatgaacagcagcgctttggagttgtacagagaggcaggtttaacagtaagctatatacttcttcctcaaagttgagtggtgaaaatacaagttcagacgaggcttctgattctgaaacatttatggctccacacgttcttgcgatgtcagctacccctattccaagaacattggcacttgctttatatggtgatatgtctcttactcagatcacggacctgcctcctggaaggcaacctattaaaacccttgctcttgaaggaaatgatgtagggtttgaagctgtcttccagatgatgagggatgaactgatagacgggggcaaggtctaccttgtgtatcctatcatagatgagtctgagcacttgccacaactccgtgctgcaacagctggatttgattccataaagcaaaaattcgaaggctatccctgtgggctattacacggccgcatgaggagcgatgagaaggaagaaactctcaacagttttagaagcggagaaacacgcattctcctgtcgacacaggtgatcgagatcggggtcgatgttcctgatgcttccatgatggttgtcatgaacgctgagcgatttggaatctctcagctgcatcagctgcgagggagagtaggtcgcggtgagaggaaatccagatgcatattcctggcttcaacttcgagcacgctgccaaggctgaaggtgctcgagaagtcctccgatgggttttacctggctaatgcagacctgctgctccgtggccctggcaatctactaggtaaaaagcaatctggtcatcttccagaatttccaatagctagattggaggtcgatggtggtattttacaagaggcccatcttgccgctctgaaagtgctggtcgcaagcaacgacctagcgttgtatccacggctgaaggtggagctcagcatgaggcagccattgtgcattcttggagattgacatgtcaacagtactgctcgtaggctcgtagcattgggcgacgcgtgtactgtggataactattggtcgtaggctcgtagcgtcggcaaagttgacatgccgtctggtgagcgaggcgtgtaccatgaataactgttagactgattgtgtgagtgtgtgtgggctggtaccattgttaggctgccggttcattagggttagagttgagtctatatattgtaaccccttctctatgcaatacaatgatccacttcactattctacatgttattagactaggttagggttttctgaaacccacagtagccaccggtcgcctcccaccccacagcagccgccaccacctgagccgtcgtcgccctccaggaggctcctccctctcggggcggcacttgcccctggcgcggctgtgcatgggcgcggcccctcgtagctcggcgcgggagtggcagcccctggcctcgacggcgcgaggcgcgaccccctggcagtgtggacgcgacggtccgtccatggcggcgcggccacgccggccccggcgcgggaaacggctcggcggcgcacgacacggagcctcatcacgaggcaatggtggccacggcgccgccctggcggctggctcctccggcgaggtacagcctcggcgcgacctaggcgcgagcgtaggctcgtgggcctcctct

SEQ ID NO: 51228 - DNA, 3735 bp, Zea Mays
gcgtgcgctgtctccccccaggccccccacctctctggctctctctctctctgcgagtctgcgacgacggggctaccgccgcctccgtacgccaggtgccgaggtcttcgttggtcctttcgccggcgacatccaccagaaattatatcatcaattcattaccgggtgtacatttgtacacagtacacccatgtccttcactggatccgcccctgtagtgaggataatatctttggagtttcggagggggcgcgctagaaggatggtttccaaaatgagatttcggaatgctctcggttctagaccatttcagtgttgttcgcgtgagaatcatacatatgtccggaagctgttggaccgagtgtcggagagatcaaagctccttaaaaaggtgtctgttttggtgggttacagtaatccacaagatttagttgagaaacaaagagcccctggggaatcttctgcagagttgattagtgccttgaaagaaatcgatttcccagaaattactgcaaagtttccatgcataaaagttggtgatgcatcacctgttgaactgtatgaggattctactaacatgaagtttaaagaagctgcactttctgaaaagctcacaaatttcatccaaggctcagctcgaaatttggagtcagcttatgaattccataatgactgtcatccattgaatcaaacacccacaactgcaggtgatctttcaatcagtgaagagatccctctcattgaaccaatagttgatacgaagtcccccgagtcattgtcagatgctataacctctgacaatagtatactggataaaagtataaggtgcttgcctggaacaactagtaggcaatatcgccagctagaggatggtggtttccatacggtccgcaaattattgcagcattttcctcggacttatgcagatctgcaaaaccctcaaggccccatagaatatgggcagtatattatgttatctggggaatcaaggttaagtccactttaggtcttcttgaggtggttgttggttgttccataatcgagtctgaattgagctcttcagttgagagtagtcactctggagcagagcaaaagagaattcacttgcacctcaacagatttttcagtggcgcacgtttttcttcccaacattttcttaacttaatgtcagcaaagcacaaagaaggggatcttgtttatgttagtgataaaaaaggtgcttgctaatggccattatgagttgaaggagtacacaattgacgctattgaaggagaaggggaacacagcactatgcttgctaggaaaccacaccctatatacccgtcgaaagcgggattaaaacctagtctgcttggcctttcaatctctagggccttgaagatattgagcccagatgttgatccagtgcctcccgatgttctcgttgaattcaacttgcctaatctctttgatgcttacatgggaattcacaaacctaaggatcgatctgaagctgattttgctcgaagaaggcttatatttgatgatttcttttacctccagttaggaagactatttcaaatgcttgaagcagttggtacgcgggttgagaaggaggaattgttatacaagtgcaaaagtcatgagctgaatactgttggtgtagatgattggtctcctcttacaaagaaattgttgagggctcttccttattggcttactcctagtcagttggatgctgttcaagagattatatgggatctcaggagaccagttcccatgaacagactcttgcagggggatgttggttgtggaaagaccattgttgctttcctggcatgtatggaggttgttaattcaggatttcaggctgctttcatggttccaacagaggtgcttgctgtccagcattatgaacacctaacttcattgctagagaagtttgatggagatgagaaaccaaatattgccttgctaactggttcaacgtccacaagggagtcaaggataattcgagatggtctgaaaactggagagataggcatggtcattggaacacactgcttaatagctgataaaactgaattttcagctttacgtatctctgttatagatgaacagcagcgctttggagttgtacagagaggcaggtttaacagtaagctatatacttcttcctcaaagttgagtggtgaaaatacaagttcagacgaggcttctgattctgaaacatttatggctccacacgttcttgcgatgtcagctacccctattccaagaacattggcacttgctttatatggtgatatgtctcttactcagatcacggacctgcctcctggaaggcaacctattaaaacccttgctcttgaaggaaatgatgtagggtttgaagctgtcttccagatgatgagggatgaactgatagacgggggcaaggtctaccttgtgtatcctatcatagatgagtctgagcacttgccacaactccgtgctgcaacagctggatttgattccataaagcaaaaattcgaaggctatccctgtgggctattacacggccgcatgaggagcgatgagaaggaagaaactctcaacagttttagaagcggagaaacacgcattctcctgtcgacacaggtgatcgagatcggggtcgatgttcctgatgcttccatgatggttgtcatgaacgctgagcgatttggaatctctcagctgcatcagctgcgagggagagtaggtcgcggtgagaggaaatccagatgcatattcctggcttcaacttcgagcacgctgccaaggctgaaggtgctcgagaagtcctccgatgggttttacctggctaatgcagacctgctgctccgtggccctggcaatctactaggtaaaaagcaatctggtcatcttccagaatttccaatagctagattggaggtcgatggtggtattttacaagaggcccatcttgccgctctgaaagtgctggtcgcaagcaacgacctagcgttgtatccacggctgaaggtggagctcagcatgaggcagccattgtgcattcttggagattgacatgtcaacagtactgctcgtaggctcgtagcattgggcgacgcgtgtactgtggataactattggtcgtaggctcgtagcgtcggcaaagttgacatgccgtctggtgagcgaggcgtgtaccatgaataactgttagactgattgtgtgagtgtgtgtgggctggtaccattgttaggctgccggttcattagggttagagttgagtctatatattgtaaccccttctctatgcaatacaatgatccacttcactattctacatgttattagactaggttagggttttctgaaacccacagtagccaccggtcgcctcccaccccacagcagccgccaccacctgagccgtcgtcgccctccaggaggctcctccctctcggggcggcacttgcccctggcgcggctgtgcatgggcgcggcccctcgtagctcggcgcgggagtggcagcccctggcctcgacggcgcgaggcgcgaccccctggcagtgtggacgcgacggtccgtccatggcggcgcggccacgccggccccggcgcgggaaacggctcggcggcgcacgacacggagcctcatcacgaggcaatggtggccacggcgccgccctggcggctggctcctccggcgaggtacagcctcggcgcgacctaggcgcgagcgtaggctcgtgggcctcctct

SEQ ID NO: 51229 - DNA, 3837 bp, Zea Mays
gcgtgcgctgtctccccccaggccccccacctctctggctctctctctctctgcgagtctgcgacgacggggctaccgccgcctccgtacgccaggtgccgaggtcttcgttggtcctttcgccggcgacatccaccagaaattatatcatcaattcattaccgggtgtacatttgtacacagtacacccatgtccttcactggatccgcccctgtagtgaggataatatctttggagtttcggagggggcgcgctagaaggatggtttccaaaatgagatttcggaatgctctcggttctagaccatttcagtgttgttcgcgtgagaatcatacatatgtccggaagctgttggaccgagtgtcggagagatcaaagctccttaaaaaggtgtctgttttggtgggttacagtaatccacaagatttagttgagaaacaaagagcccctggggaatcttctgcagagttgattagtgccttgaaagaaatcgatttcccagaaattactgcaaagtttccatgcataaaagttggtgatgcatcacctgttgaactgtatgaggattctactaacatgaagtttaaagaagctgcactttctgaaaagctcacaaatttcatccaaggctcagctcgaaatttggagtcagcttatgaattccataatgactgtcatccattgaatcaaacacccacaactgcaggtgatctttcaatcagtgaagagatccctctcattgaaccaatagttgatacgaagtcccccgagtcattgtcagatgctataacctctgacaatagtatactggataaaagtataaggtgcttgcctggaacaactagtaggcaatatcgccagctagaggatggtggtttccatacggtccgcaaattattgcagcattttcctcggacttatgcagatctgcaaaaccctcaaggccccatagaatatgggcagtatattatgttatctggtactgttatatcttccaggggaatcaaggttaagtccactttaggtcttcttgaggtggttgttggttgttccataatcgagtctgaattgagctcttcagttgagagtagtcactctggagcagagcaaaagagaattcacttgcacctcaacagatttttcagtggcgcacgtttttcttcccaacattttcttaacttaatgtcagcaaagcacaaagaaggggatcttgtttatgttagtgataaaaaaggtgcttgctaatggccattatgagttgaaggagtacacaattgacgctattgaaggagaaggggaacacagcactatgcttgctaggaaaccacaccctatatacccgtcgaaagcgggattaaaacctagtctgcttggcctttcaatctctagggccttgaagatattgagcccagatgttgatccagtgcctcccgatgttctcgttgaattcaacttgcctaatctctttgatgcttacatgggaattcacaaacctaaggatcgatctgaagctgattttgctcgaagaaggcttatatttgatgatttcttttacctccaggaagactatttcaaatgcttgaagcagttggtacgcgggttgagaaggaggaattgttatacaagtgcaaaagtcatgagctgaatactgttggtgtagatgattggtctcctcttacaaagaaattgttgagggctcttccttattggcttactcctagtcagttggatgctgttcaagagattatatgggatctcaggagaccagttcccatgaacagactcttgcagggggatgttggttgtggaaagaccattgttgctttcctggcatgtatggaggttgttaattcaggatttcaggctgctttcatggttccaacagaggtgcttgctgtccagcattatgaacacctaacttcattgctagagaagtttgatggagatgagaaaccaaatattgccttgctaactggttcaacgtccacaagggagtcaaggataattcgagatgcaagctgttctccctagttctttcactcactctcaagttccacatgcatatattaatatctccgctctattcgtattctattacagggtctgaaaactggagagataggcatggtcattggaacacactgcttaatagctgataaaactgaattttcagctttacgtatctctgttatagatgaacagcagcgctttggagttgtacagagaggcaggtttaacagtaagctatatacttcttcctcaaagttgagtggtgaaaatacaagttcagacgaggcttctgattctgaaacatttatggctccacacgttcttgcgatgtcagctacccctattccaagaacattggcacttgctttatatggtgatatgtctcttactcagatcacggacctgcctcctggaaggcaacctattaaaacccttgctcttgaaggaaatgatgtagggtttgaagctgtcttccagatgatgagggatgaactgatagacgggggcaaggtctaccttgtgtatcctatcatagatgagtctgagcacttgccacaactccgtgctgcaacagctggatttgattccataaagcaaaaattcgaaggctatccctgtgggctattacacggccgcatgaggagcgatgagaaggaagaaactctcaacagttttagaagcggagaaacacgcattctcctgtcgacacaggtgatcgagatcggggtcgatgttcctgatgcttccatgatggttgtcatgaacgctgagcgatttggaatctctcagctgcatcagctgcgagggagagtaggtcgcggtgagaggaaatccagatgcatattcctggcttcaacttcgagcacgctgccaaggctgaaggtgctcgagaagtcctccgatgggttttacctggctaatgcagacctgctgctccgtggccctggcaatctactaggtaaaaagcaatctggtcatcttccagaatttccaatagctagattggaggtcgatggtggtattttacaagaggcccatcttgccgctctgaaagtgctggtcgcaagcaacgacctagcgttgtatccacggctgaaggtggagctcagcatgaggcagccattgtgcattcttggagattgacatgtcaacagtactgctcgtaggctcgtagcattgggcgacgcgtgtactgtggataactattggtcgtaggctcgtagcgtcggcaaagttgacatgccgtctggtgagcgaggcgtgtaccatgaataactgttagactgattgtgtgagtgtgtgtgggctggtaccattgttaggctgccggttcattagggttagagttgagtctatatattgtaaccccttctctatgcaatacaatgatccacttcactattctacatgttattagactaggttagggttttctgaaacccacagtagccaccggtcgcctcccaccccacagcagccgccaccacctgagccgtcgtcgccctccaggaggctcctccctctcggggcggcacttgcccctggcgcggctgtgcatgggcgcggcccctcgtagctcggcgcgggagtggcagcccctggcctcgacggcgcgaggcgcgaccccctggcagtgtggacgcgacggtccgtccatggcggcgcggccacgccggccccggcgcgggaaacggctcggcggcgcacgacacggagcctcatcacgaggcaatggtggccacggcgccgccctggcggctggctcctccggcgaggtacagcctcggcgcgacctaggcgcgagcgtaggctcgtgggcctcctct

SEQ ID NO: 51230 - DNA, 3595 bp, Zea Mays
gcgtgcgctgtctccccccaggccccccacctctctggctctctctctctctgcgagtctgcgacgacggggctaccgccgcctccgtacgccaggtgccgaggtcttcgttggtcctttcgccggcgacatccaccagaaattatatcatcaattcattaccgggtgtacatttgtacacagtacacccatgtccttcactggatccgcccctgtagtgaggataatatctttggagtttcggagggggcgcgctagaaggatggtttccaaaatgagatttcggaatgctctcggttctagaccatttcagtgttgttcgcgtgagaatcatacatatgtccggaagctgttggaccgagtgtcggagagatcaaagctccttaaaaaggtgtctgttttggtgggttacagtaatccacaagatttagttgagaaacaaagagcccctggggaatcttctgcagagttgattagtgccttgaaagaaatcgatttcccagaaattactgcaaagtttccatgcataaaagttggtgatgcatcacctgttgaactgtatgaggattctactaacatgaagtttaaagaagctgcactttctgaaaagctcacaaatttcatccaaggctcagctcgaaatttggagtcagcttatgaattccataatgactgtcatccattgaatcaaacacccacaactgcaggtgatctttcaatcagtgaagagatccctctcattgaaccaatagttgatacgaagtcccccgagtcattgtcagatgctataacctctgacaatagtatactggataaaagtataaggtgcttgcctggaacaactagtaggcaatatcgccagctagaggatggtggtttccatacggtccgcaaattattgcagcattttcctcggacttatgcagatctgcaaaaccctcaaggccccatagaatatgggcagtatattatgttatctggtactgttatatcttccaggggaatcaaggttaagtccactttaggtcttcttgaggtggttgttggttgttccataatcgagtctgaattgagctcttcagttgagagtagtcactctggagcagagcaaaagagaattcacttgcacctcaacagatttttcagtggcgcacgtttttcttcccaacattttcttaacttaatgtcagcaaagcacaaagaaggggatcttgtttatgttagtggtaagggccttgaagatattgagcccagatgttgatccagtgcctcccgatgttctcgttgaattcaacttgcctaatctctttgatgcttacatgggaattcacaaacctaaggatcgatctgaagctgattttgctcgaagaaggcttatatttgatgatttcttttacctccagttaggaagactatttcaaatgcttgaagcagttggtacgcgggttgagaaggaggaattgttatacaagtgcaaaagtcatgagctgaatactgttggtgtagatgattggtctcctcttacaaagaaattgttgagggctcttccttattggcttactcctagtcagttggatgctgttcaagagattatatgggatctcaggagaccagttcccatgaacagactcttgcagggggatgttggttgtggaaagaccattgttgctttcctggcatgtatggaggttgttaattcaggatttcaggctgctttcatggttccaacagaggtgcttgctgtccagcattatgaacacctaacttcattgctagagaagtttgatggagatgagaaaccaaatattgccttgctaactggttcaacgtccacaagggagtcaaggataattcgagatggtctgaaaactggagagataggcatggtcattggaacacactgcttaatagctgataaaactgaattttcagctttacgtatctctgttatagatgaacagcagcgctttggagttgtacagagaggcaggtttaacagtaagctatatacttcttcctcaaagttgagtggtgaaaatacaagttcagacgaggcttctgattctgaaacatttatggctccacacgttcttgcgatgtcagctacccctattccaagaacattggcacttgctttatatggtgatatgtctcttactcagatcacggacctgcctcctggaaggcaacctattaaaacccttgctcttgaaggaaatgatgtagggtttgaagctgtcttccagatgatgagggatgaactgatagacgggggcaaggtctaccttgtgtatcctatcatagatgagtctgagcacttgccacaactccgtgctgcaacagctggatttgattccataaagcaaaaattcgaaggctatccctgtgggctattacacggccgcatgaggagcgatgagaaggaagaaactctcaacagttttagaagcggagaaacacgcattctcctgtcgacacaggtgatcgagatcggggtcgatgttcctgatgcttccatgatggttgtcatgaacgctgagcgatttggaatctctcagctgcatcagctgcgagggagagtaggtcgcggtgagaggaaatccagatgcatattcctggcttcaacttcgagcacgctgccaaggctgaaggtgctcgagaagtcctccgatgggttttacctggctaatgcagacctgctgctccgtggccctggcaatctactaggtaaaaagcaatctggtcatcttccagaatttccaatagctagattggaggtcgatggtggtattttacaagaggcccatcttgccgctctgaaagtgctggtcgcaagcaacgacctagcgttgtatccacggctgaaggtggagctcagcatgaggcagccattgtgcattcttggagattgacatgtcaacagtactgctcgtaggctcgtagcattgggcgacgcgtgtactgtggataactattggtcgtaggctcgtagcgtcggcaaagttgacatgccgtctggtgagcgaggcgtgtaccatgaataactgttagactgattgtgtgagtgtgtgtgggctggtaccattgttaggctgccggttcattagggttagagttgagtctatatattgtaaccccttctctatgcaatacaatgatccacttcactattctacatgttattagactaggttagggttttctgaaacccacagtagccaccggtcgcctcccaccccacagcagccgccaccacctgagccgtcgtcgccctccaggaggctcctccctctcggggcggcacttgcccctggcgcggctgtgcatgggcgcggcccctcgtagctcggcgcgggagtggcagcccctggcctcgacggcgcgaggcgcgaccccctggcagtgtggacgcgacggtccgtccatggcggcgcggccacgccggccccggcgcgggaaacggctcggcggcgcacgacacggagcctcatcacgaggcaatggtggccacggcgccgccctggcggctggctcctccggcgaggtacagcctcggcgcgacctaggcgcgagcgtaggctcgtgggcctcctct

SEQ ID NO: 51231 - DNA, 3759 bp, Zea Mays
gcgtgcgctgtctccccccaggccccccacctctctggctctctctctctctgcgagtctgcgacgacggggctaccgccgcctccgtacgccaggtgccgaggtcttcgttggtcctttcgccggcgacatccaccagaaattatatcatcaattcattaccgggtgtacatttgtacacagtacacccatgtccttcactggatccgcccctgtagtgaggataatatctttggagtttcggagggggcgcgctagaaggatggtttccaaaatgagatttcggaatgctctcggttctagaccatttcagtgttgttcgcgtgagaatcatacatatgtccggaagctgttggaccgagtgtcggagagatcaaagctccttaaaaaggtgtctgttttggtgggttacagtaatccacaagatttagttgagaaacaaagagcccctggggaatcttctgcagagttgattagtgccttgaaagaaatcgatttcccagaaattactgcaaagtttccatgcataaaagttggtgatgcatcacctgttgaactgtatgaggattctactaacatgaagtttaaagaagctgcactttctgaaaagctcacaaatttcatccaaggctcagctcgaaatttggagtcagcttatgaattccataatgactgtcatccattgaatcaaacacccacaactgcaggtgatctttcaatcagtgaagagatccctctcattgaaccaatagttgatacgaagtcccccgagtcattgtcagatgctataacctctgacaatagtatactggataaaagtataaggtgcttgcctggaacaactagtaggcaatatcgccagctagaggatggtggtttccatacggtccgcaaattattgcagcattttcctcggacttatgcagatctgcaaaaccctcaaggccccatagaatatgggcagtatattatgttatctggtactgttatatcttccaggggaatcaaggttaagtccactttaggtcttcttgaggtggttgttggttgttccataatcgagtctgaattgagctcttcagttgagagtagtcactctggagcagagcaaaagagaattcacttgcacctcaacagatttttcagtggcgcacgtttttcttcccaacattttcttaacttaatgtcagcaaagcacaaagaaggggatcttgtttatgttagtggtaagataaaaaaggtgcttgctaatggccattatgagttgaaggagtacacaattgacgctattgaaggagaaggggaacacagcactatgcttgctaggaaaccacaccctatatacccgtcgaaagcgggattaaaacctagtctgcttggcctttcaatctctagggccttgaagatattgagcccagatgttgatccagtgcctcccgatgttctcgttgaattcaacttgcctaatctctttgatgcttacatgggaattcacaaacctaaggatcgatctgaagctgattttgctcgaagaaggcttatatttgatgatttcttttacctccagttaggaagactatttcaaatgcttgaagcagttggtacgcgggttgagaaggaggaattgttatacaagtgcaaaagtcatgagctgaatactgttggtgtagatgattggtctcctcttacaaagaaattgttgagggctcttccttattggcttactcctagtcagttggatgctgttcaagagattatatgggatctcaggagaccagttcccatgaacagactcttgcagggggatgttggttgtggaaagaccattgttgctttcctggcatgtatggaggttgttaattcaggatttcaggctgctttcatggttccaacagaggtgcttgctgtccagcattatgaacacctaacttcattgctagagaagtttgatggagatgagaaaccaaatattgccttgctaactggttcaacgtccacaagggagtcaaggataattcgagatggtctgaaaactggagagataggcatggtcattggaacacactgcttaatagctgataaaactgaattttcagctttacgtatctctgttatagatgaacagcagcgctttggagttgtacagagaggcaggtttaacagtaagctatatacttcttcctcaaagttgagtggtgaaaatacaagttcagacgaggcttctgattctgaaacatttatggctccacacgttcttgcgatgtcagctacccctattccaagaacattggcacttgctttatatggtgatatgtctcttactcagatcacggacctgcctcctggaaggcaacctattaaaacccttgctcttgaaggaaatgatgtagggtttgaagctgtcttccagatgatgagggatgaactgatagacgggggcaaggtctaccttgtgtatcctatcatagatgagtctgagcacttgccacaactccgtgctgcaacagctggatttgattccataaagcaaaaattcgaaggctatccctgtgggctattacacggccgcatgaggagcgatgagaaggaagaaactctcaacagttttagaagcggagaaacacgcattctcctgtcgacacaggtgatcgagatcggggtcgatgttcctgatgcttccatgatggttgtcatgaacgctgagcgatttggaatctctcagctgcatcagctgcgagggagagtaggtcgcggtgagaggaaatccagatgcatattcctggcttcaacttcgagcacgctgccaaggctgaaggtgctcgagaagtcctccgatgggttttacctggctaatgcagacctgctgctccgtggccctggcaatctactaggtaaaaagcaatctggtcatcttccagaatttccaatagctagattggaggtcgatggtggtattttacaagaggcccatcttgccgctctgaaagtgctggtcgcaagcaacgacctagcgttgtatccacggctgaaggtggagctcagcatgaggcagccattgtgcattcttggagattgacatgtcaacagtactgctcgtaggctcgtagcattgggcgacgcgtgtactgtggataactattggtcgtaggctcgtagcgtcggcaaagttgacatgccgtctggtgagcgaggcgtgtaccatgaataactgttagactgattgtgtgagtgtgtgtgggctggtaccattgttaggctgccggttcattagggttagagttgagtctatatattgtaaccccttctctatgcaatacaatgatccacttcactattctacatgttattagactaggttagggttttctgaaacccacagtagccaccggtcgcctcccaccccacagcagccgccaccacctgagccgtcgtcgccctccaggaggctcctccctctcggggcggcacttgcccctggcgcggctgtgcatgggcgcggcccctcgtagctcggcgcgggagtggcagcccctggcctcgacggcgcgaggcgcgaccccctggcagtgtggacgcgacggtccgtccatggcggcgcggccacgccggccccggcgcgggaaacggctcggcggcgcacgacacggagcctcatcacgaggcaatggtggccacggcgccgccctggcggctggctcctccggcgaggtacagcctcggcgcgacctaggcgcgagcgtaggctcgtgggcctcctct

SEQ ID NO: 51232 - DNA, 3590 bp, Zea Mays
gcgtgcgctgtctccccccaggccccccacctctctggctctctctctctctgcgagtctgcgacgacggggctaccgccgcctccgtacgccaggtgccgaggtcttcgttggtcctttcgccggcgacatccaccagaaattatatcatcaattcattaccgggtgtacatttgtacacagtacacccatgtccttcactggatccgcccctgtagtgaggataatatctttggagtttcggagggggcgcgctagaaggatggtttccaaaatgagatttcggaatgctctcggttctagaccatttcagtgttgttcgcgtgagaatcatacatatgtccggaagctgttggaccgagtgtcggagagatcaaagctccttaaaaaggtgtctgttttggtgggttacagtaatccacaagatttagttgagaaacaaagagcccctggggaatcttctgcagagttgattagtgccttgaaagaaatcgatttcccagaaattactgcaaagtttccatgcataaaagttggtgatgcatcacctgttgaactgtatgaggattctactaacatgaagtttaaagaagctgcactttctgaaaagctcacaaatttcatccaaggctcagctcgaaatttggagtcagcttatgaattccataatgactgtcatccattgaatcaaacacccacaactgcaggtgatctttcaatcagtgaagagatccctctcattgaaccaatagttgatacgaagtcccccgagtcattgtcagatgctataacctctgacaatagtatactggataaaagtataaggtgcttgcctggaacaactagtaggcaatatcgccagctagaggatggtggtttccatacggtccgcaaattattgcagcattttcctcggacttatgcagatctgcaaaaccctcaaggccccatagaatatgggcagtatattatgttatctggtactgttatatcttccaggggaatcaaggttaagtccactttaggtcttcttgaggtggttgttggttgttccataatcgagtctgaattgagctcttcagttgagagtagtcactctggagcagagcaaaagagaattcacttgcacctcaacagatttttcagtggcgcacgtttttcttcccaacattttcttaacttaatgtcagcaaagcacaaagaaggggatcttgtttatgttagtgggccttgaagatattgagcccagatgttgatccagtgcctcccgatgttctcgttgaattcaacttgcctaatctctttgatgcttacatgggaattcacaaacctaaggatcgatctgaagctgattttgctcgaagaaggcttatatttgatgatttcttttacctccagttaggaagactatttcaaatgcttgaagcagttggtacgcgggttgagaaggaggaattgttatacaagtgcaaaagtcatgagctgaatactgttggtgtagatgattggtctcctcttacaaagaaattgttgagggctcttccttattggcttactcctagtcagttggatgctgttcaagagattatatgggatctcaggagaccagttcccatgaacagactcttgcagggggatgttggttgtggaaagaccattgttgctttcctggcatgtatggaggttgttaattcaggatttcaggctgctttcatggttccaacagaggtgcttgctgtccagcattatgaacacctaacttcattgctagagaagtttgatggagatgagaaaccaaatattgccttgctaactggttcaacgtccacaagggagtcaaggataattcgagatggtctgaaaactggagagataggcatggtcattggaacacactgcttaatagctgataaaactgaattttcagctttacgtatctctgttatagatgaacagcagcgctttggagttgtacagagaggcaggtttaacagtaagctatatacttcttcctcaaagttgagtggtgaaaatacaagttcagacgaggcttctgattctgaaacatttatggctccacacgttcttgcgatgtcagctacccctattccaagaacattggcacttgctttatatggtgatatgtctcttactcagatcacggacctgcctcctggaaggcaacctattaaaacccttgctcttgaaggaaatgatgtagggtttgaagctgtcttccagatgatgagggatgaactgatagacgggggcaaggtctaccttgtgtatcctatcatagatgagtctgagcacttgccacaactccgtgctgcaacagctggatttgattccataaagcaaaaattcgaaggctatccctgtgggctattacacggccgcatgaggagcgatgagaaggaagaaactctcaacagttttagaagcggagaaacacgcattctcctgtcgacacaggtgatcgagatcggggtcgatgttcctgatgcttccatgatggttgtcatgaacgctgagcgatttggaatctctcagctgcatcagctgcgagggagagtaggtcgcggtgagaggaaatccagatgcatattcctggcttcaacttcgagcacgctgccaaggctgaaggtgctcgagaagtcctccgatgggttttacctggctaatgcagacctgctgctccgtggccctggcaatctactaggtaaaaagcaatctggtcatcttccagaatttccaatagctagattggaggtcgatggtggtattttacaagaggcccatcttgccgctctgaaagtgctggtcgcaagcaacgacctagcgttgtatccacggctgaaggtggagctcagcatgaggcagccattgtgcattcttggagattgacatgtcaacagtactgctcgtaggctcgtagcattgggcgacgcgtgtactgtggataactattggtcgtaggctcgtagcgtcggcaaagttgacatgccgtctggtgagcgaggcgtgtaccatgaataactgttagactgattgtgtgagtgtgtgtgggctggtaccattgttaggctgccggttcattagggttagagttgagtctatatattgtaaccccttctctatgcaatacaatgatccacttcactattctacatgttattagactaggttagggttttctgaaacccacagtagccaccggtcgcctcccaccccacagcagccgccaccacctgagccgtcgtcgccctccaggaggctcctccctctcggggcggcacttgcccctggcgcggctgtgcatgggcgcggcccctcgtagctcggcgcgggagtggcagcccctggcctcgacggcgcgaggcgcgaccccctggcagtgtggacgcgacggtccgtccatggcggcgcggccacgccggccccggcgcgggaaacggctcggcggcgcacgacacggagcctcatcacgaggcaatggtggccacggcgccgccctggcggctggctcctccggcgaggtacagcctcggcgcgacctaggcgcgagcgtaggctcgtgggcctcctct

SEQ ID NO: 51233 - DNA, 3827 bp, Zea Mays
gcgtgcgctgtctccccccaggccccccacctctctggctctctctctctctgcgagtctgcgacgacggggctaccgccgcctccgtacgccaggtgccgaggtcttcgttggtcctttcgccggcgacatccaccagaaattatatcatcaattcattaccgggtgtacatttgtacacagtacacccatgtccttcactggatccgcccctgtagtgaggataatatctttggagtttcggagggggcgcgctagaaggatggtttccaaaatgagatttcggaatgctctcggttctagaccatttcagtgttgttcgcgtgagaatcatacatatgtccggaagctgttggaccgagtgtcggagagatcaaagctccttaaaaaggtgtctgttttggtgggttacagtaatccacaagatttagttgagaaacaaagagcccctggggaatcttctgcagagttgattagtgccttgaaagaaatcgatttcccagaaattactgcaaagtttccatgcataaaagttggtgatgcatcacctgttgaactgtatgaggattctactaacatgaagtttaaagaagctgcactttctgaaaagctcacaaatttcatccaaggctcagctcgaaatttggagtcagcttatgaattccataatgactgtcatccattgaatcaaacacccacaactgcaggtgatctttcaatcagtgaagagatccctctcattgaaccaatagttgatacgaagtcccccgagtcattgtcagatgctataacctctgacaatagtatactggataaaagtataaggtgcttgcctggaacaactagtaggcaatatcgccagctagaggatggtggtttccatacggtccgcaaattattgcagcattttcctcggacttatgcagatctgcaaaaccctcaaggccccatagaatatgggcagtatattatgttatctggggaatcaaggttaagtccactttaggtcttcttgaggtggttgttggttgttccataatcgagtctgaattgagctcttcagttgagagtagtcactctggagcagagcaaaagagaattcacttgcacctcaacagatttttcagtggcgcacgtttttcttcccaacattttcttaacttaatgtcagcaaagcacaaagaaggggatcttgtttatgttagtggtaagataaaaaaggtgcttgctaatggccattatgagttgaaggagtacacaattgacgctattgaaggagaaggggaacacagcactatgcttgctaggaaaccacaccctatatacccgtcgaaagcgggattaaaacctagtctgcttggcctttcaatctctagggccttgaagatattgagcccagatgttgatccagtgcctcccgatgttctcgttgaattcaacttgcctaatctctttgatgcttacatgggaattcacaaacctaaggatcgatctgaagctgattttgctcgaagaaggcttatatttgatgatttcttttacctccagttaggaagactatttcaaatgcttgaagcagttggtacgcgggttgagaaggaggaattgttatacaagtgcaaaagtcatgagctgaatactgttggtgtagatgattggtctcctcttacaaagaaattgttgagggctcttccttattggcttactcctagtcagttggatgctgttcaagagattatatgggatctcaggagaccagttcccatgaacagactcttgcagggggatgttggttgtggaaagaccattgttgctttcctggcatgtatggaggttgttaattcaggatttcaggctgctttcatggttccaacagaggtgcttgctgtccagcattatgaacacctaacttcattgctagagaagtttgatggagatgagaaaccaaatattgccttgctaactggttcaacgtccacaagggagtcaaggataattcgagatgcaagctgttctccctagttctttcactcactctcaagttccacatgcatatattaatatctccgctctattcgtattctattacagggtctgaaaactggagagataggcatggtcattggaacacactgcttaatagctgataaaactgaattttcagctttacgtatctctgttatagatgaacagcagcgctttggagttgtacagagaggcaggtttaacagtaagctatatacttcttcctcaaagttgagtggtgaaaatacaagttcagacgaggcttctgattctgaaacatttatggctccacacgttcttgcgatgtcagctacccctattccaagaacattggcacttgctttatatggtgatatgtctcttactcagatcacggacctgcctcctggaaggcaacctattaaaacccttgctcttgaaggaaatgatgtagggtttgaagctgtcttccagatgatgagggatgaactgatagacgggggcaaggtctaccttgtgtatcctatcatagatgagtctgagcacttgccacaactccgtgctgcaacagctggatttgattccataaagcaaaaattcgaaggctatccctgtgggctattacacggccgcatgaggagcgatgagaaggaagaaactctcaacagttttagaagcggagaaacacgcattctcctgtcgacacaggtgatcgagatcggggtcgatgttcctgatgcttccatgatggttgtcatgaacgctgagcgatttggaatctctcagctgcatcagctgcgagggagagtaggtcgcggtgagaggaaatccagatgcatattcctggcttcaacttcgagcacgctgccaaggctgaaggtgctcgagaagtcctccgatgggttttacctggctaatgcagacctgctgctccgtggccctggcaatctactaggtaaaaagcaatctggtcatcttccagaatttccaatagctagattggaggtcgatggtggtattttacaagaggcccatcttgccgctctgaaagtgctggtcgcaagcaacgacctagcgttgtatccacggctgaaggtggagctcagcatgaggcagccattgtgcattcttggagattgacatgtcaacagtactgctcgtaggctcgtagcattgggcgacgcgtgtactgtggataactattggtcgtaggctcgtagcgtcggcaaagttgacatgccgtctggtgagcgaggcgtgtaccatgaataactgttagactgattgtgtgagtgtgtgtgggctggtaccattgttaggctgccggttcattagggttagagttgagtctatatattgtaaccccttctctatgcaatacaatgatccacttcactattctacatgttattagactaggttagggttttctgaaacccacagtagccaccggtcgcctcccaccccacagcagccgccaccacctgagccgtcgtcgccctccaggaggctcctccctctcggggcggcacttgcccctggcgcggctgtgcatgggcgcggcccctcgtagctcggcgcgggagtggcagcccctggcctcgacggcgcgaggcgcgaccccctggcagtgtggacgcgacggtccgtccatggcggcgcggccacgccggccccggcgcgggaaacggctcggcggcgcacgacacggagcctcatcacgaggcaatggtggccacggcgccgccctggcggctggctcctccggcgaggtacagcctcggcgcgacctaggcgcgagcgtaggctcgtgggcctcctct

SEQ ID NO: 51234 - DNA, 2023 bp, Zea Mays
atagttattaaggcgataaggcgataaggcgagcgacccctcctccctaccttttaagtggaaagggggatgttggttgtggaaagaccattgttgctttcctggcatgtatggaggttgttaattcaggatttcaggctgctttcatggttccaacagaggtgcttgctgtccagcattatgaacacctaacttcattgctagagaagtttgatggagatgagaaaccaaatattgccttgctaactggttcaacgtccacaagggagtcaaggataattcgagatggtctgaaaactggagagataggcatggtcattggaacacactgcttaatagctgataaaactgaattttcagctttacgtatctctgttatagatgaacagcagcgctttggagttgtacagagaggcaggtttaacagtaagctatatacttcttcctcaaagttgagtggtgaaaatacaagttcagacgaggcttctgattctgaaacatttatggctccacacgttcttgcgatgtcagctacccctattccaagaacattggcacttgctttatatggtgatatgtctcttactcagatcacggacctgcctcctggaaggcaacctattaaaacccttgctcttgaaggaaatgatgtagggtttgaagctgtcttccagatgatgagggatgaactgatagacgggggcaaggtctaccttgtgtatcctatcatagatgagtctgagcacttgccacaactccgtgctgcaacagctggatttgattccataaagcaaaaattcgaaggctatccctgtgggctattacacggccgcatgaggagcgatgagaaggaagaaactctcaacagttttagaagcggagaaacacgcattctcctgtcgacacaggtgatcgagatcggggtcgatgttcctgatgcttccatgatggttgtcatgaacgctgagcgatttggaatctctcagctgcatcagctgcgagggagagtaggtcgcggtgagaggaaatccagatgcatattcctggcttcaacttcgagcacgctgccaaggctgaaggtgctcgagaagtcctccgatgggttttacctggctaatgcagacctgctgctccgtggccctggcaatctactaggtaaaaagcaatctggtcatcttccagaatttccaatagctagattggaggtcgatggtggtattttacaagaggcccatcttgccgctctgaaagtgctggtcgcaagcaacgacctagcgttgtatccacggctgaaggtggagctcagcatgaggcagccattgtgcattcttggagattgacatgtcaacagtactgctcgtaggctcgtagcattgggcgacgcgtgtactgtggataactattggtcgtaggctcgtagcgtcggcaaagttgacatgccgtctggtgagcgaggcgtgtaccatgaataactgttagactgattgtgtgagtgtgtgtgggctggtaccattgttaggctgccggttcattagggttagagttgagtctatatattgtaaccccttctctatgcaatacaatgatccacttcactattctacatgttattagactaggttagggttttctgaaacccacagtagccaccggtcgcctcccaccccacagcagccgccaccacctgagccgtcgtcgccctccaggaggctcctccctctcggggcggcacttgcccctggcgcggctgtgcatgggcgcggcccctcgtagctcggcgcgggagtggcagcccctggcctcgacggcgcgaggcgcgaccccctggcagtgtggacgcgacggtccgtccatggcggcgcggccacgccggccccggcgcgggaaacggctcggcggcgcacgacacggagcctcatcacgaggcaatggtggccacggcgccgccctggcggctggctcctccggcgaggtacagcctcggcgcgacctaggcgcgagcgtaggctcgtgggcctcctct

SEQ ID NO: 51235 - DNA, 2181 bp, Zea Mays
atcaaattgggtgtttctataaaccttgtgatccgtgcctatatatgtgtaacccctatcttgttacaatcaaatctgttctagcctacgtttccacagttactcgcccgggcaaggcgaccaggacgccttacagggggatgttggttgtggaaagaccattgttgctttcctggcatgtatggaggttgttaattcaggatttcaggctgctttcatggttccaacagaggtgcttgctgtccagcattatgaacacctaacttcattgctagagaagtttgatggagatgagaaaccaaatattgccttgctaactggttcaacgtccacaagggagtcaaggataattcgagatgcaagctgttctccctagttctttcactcactctcaagttccacatgcatatattaatatctccgctctattcgtattctattacagggtctgaaaactggagagataggcatggtcattggaacacactgcttaatagctgataaaactgaattttcagctttacgtatctctgttatagatgaacagcagcgctttggagttgtacagagaggcaggtttaacagtaagctatatacttcttcctcaaagttgagtggtgaaaatacaagttcagacgaggcttctgattctgaaacatttatggctccacacgttcttgcgatgtcagctacccctattccaagaacattggcacttgctttatatggtgatatgtctcttactcagatcacggacctgcctcctggaaggcaacctattaaaacccttgctcttgaaggaaatgatgtagggtttgaagctgtcttccagatgatgagggatgaactgatagacgggggcaaggtctaccttgtgtatcctatcatagatgagtctgagcacttgccacaactccgtgctgcaacagctggatttgattccataaagcaaaaattcgaaggctatccctgtgggctattacacggccgcatgaggagcgatgagaaggaagaaactctcaacagttttagaagcggagaaacacgcattctcctgtcgacacaggtgatcgagatcggggtcgatgttcctgatgcttccatgatggttgtcatgaacgctgagcgatttggaatctctcagctgcatcagctgcgagggagagtaggtcgcggtgagaggaaatccagatgcatattcctggcttcaacttcgagcacgctgccaaggctgaaggtgctcgagaagtcctccgatgggttttacctggctaatgcagacctgctgctccgtggccctggcaatctactaggtaaaaagcaatctggtcatcttccagaatttccaatagctagattggaggtcgatggtggtattttacaagaggcccatcttgccgctctgaaagtgctggtcgcaagcaacgacctagcgttgtatccacggctgaaggtggagctcagcatgaggcagccattgtgcattcttggagattgacatgtcaacagtactgctcgtaggctcgtagcattgggcgacgcgtgtactgtggataactattggtcgtaggctcgtagcgtcggcaaagttgacatgccgtctggtgagcgaggcgtgtaccatgaataactgttagactgattgtgtgagtgtgtgtgggctggtaccattgttaggctgccggttcattagggttagagttgagtctatatattgtaaccccttctctatgcaatacaatgatccacttcactattctacatgttattagactaggttagggttttctgaaacccacagtagccaccggtcgcctcccaccccacagcagccgccaccacctgagccgtcgtcgccctccaggaggctcctccctctcggggcggcacttgcccctggcgcggctgtgcatgggcgcggcccctcgtagctcggcgcgggagtggcagcccctggcctcgacggcgcgaggcgcgaccccctggcagtgtggacgcgacggtccgtccatggcggcgcggccacgccggccccggcgcgggaaacggctcggcggcgcacgacacggagcctcatcacgaggcaatggtggccacggcgccgccctggcggctggctcctccggcgaggtacagcctcggcgcgacctaggcgcgagcgtaggctcgtgggcctcctct

SEQ ID NO: 51236 - DNA, 3385 bp, Zea Mays
tatagcaggagcacgccctcttcacctccttcccgtcctcgagatcgttctgagtttctgacctccttcccccgcgtgctcctccagccactccgcaccccagatctccgaaccctaaccccttgcacatgttattgcactgaacgcagctggtagccacaagccatgtcgcagccccgcagttacggaatcctcgtcgccgtccttgtcgcggcggccgtcgccgtcccgccggcgaccgcggcggtggcgagcatcgacctcggctcagagtggctcaaggtcgctgctgtgcatcttgccccaggccgtgctccaatcgctgttgccatcaacgagatgtccaagcgtaagtccccggcactcgcctcgctcgccgacggcaaccgtctctctggggaggaggcggcaggcatcacggcgcggcacccgtccaaggtgttcgcccgcgcgcgggacctcttggccaagcccttgtcctacgtgcagtccgtcacggactcgctcttcctcccctacgatctcgtccccgacgcgcgcggcgccgccgcggttcgcgctgatgacgggcaggtatactccctcgaggagatcgtcgccatggtgctccactacgccgcggggctcgccgatgcgcacgttggggcgcccgtgcgggacgcggtgatcgccgtgccgccctactttgggcaggccgagcgccgggcgttgacgcaggctgcgcagctggctggaatcaacgtgctttctctcatcaacgagcacgctggggccgcgcttcagtacgggattgacaaggacttctccaatgcgtcgcggcatgtcatcttttacgacatgggcgctggtagcacttacgctgcattagtgtactactctgcatacaacgccaaggagttcggaaagacagtgtccgttaaccagttccaggttaaggacgtaagatggaactctgagcttggaggcgttcaaatggaaatgcgtctggtcaactattttgctgcccaattcaataagcagctcggtgatggggttgatatccgtcagtctcccaaggcaatggctaagttgaaaaagcaagtcaagcgcaccaaagaaattcttagtgcaaacactgcagctccaatttcagtagaatctctgtataatgatgttgatttcaggagtaccataacacgtgagaaatttgaagagctgtgtgaggatttatgggagcaagctctaactccagttaaagaagtgctgacacattctggcatgaagatcgatgacatctatgctgtagaactaataggaggagctacccgggttccaaaactgcaggctaagctgcaggaatttctgggtaggcgtggcctggataaacatcttgatgctgatgaagcaattgttctcggagcttcacttcatgctgctaacctgagtgacgggattaagttgaaccgtaagttgggaatgattgatggctctacttatgcttttgtacttgagatagatggcctagattatgtcaaggatgaaagtattgaccaaattttggttccaagaatgaagaaaatgccaataaagatgtttagatccatcagacatacaaaggacttcgatgtctctctcaactatgacaaagcttatgaactgcctccaggcattccatcacacaagtttgcagagtattccgtatcaggactgacagatgccagtgaaaagtatgcaaaccgtaatttatctgcacccatcaaagcaaatctacatttttctttgagtagaagtggaattattgctcttgatagagcagaagcagtaattgagataactgaatgggttgaagttccaaagaagatattgactctagagagtaacatcaccaatcagaattcttcttctgaagtaggagcagctaatagcacaacagatagtaaggaaaatctgagttctggcagtaatactaattcgagcactcccattgatgagagtaatgctcaagaaattattacagagaaggtgctaaagaaaagaacttttagggttccattgaaggttgtggaaaaaacaactggtgctggaacaattctttcgaaggagttgtattctgaagcaaaaaataggttagaggcactcgataagaaggatgcagaacggaggaaaactgctgaacttaagaataacctagagtcatacatatattctatgaaggagaagctggaagaaagcgcagatattttgactgtctcaactgaacaggagagggaatcctttgctgagaaacttagtgaggtgcaggattggttatatatggacggtgaagatgctcaagctaatgaattcaaagagcgtcttgaccaacttaaagccattggtgacccaattcttttcagattgttaagaactgggagacaaacaaaccatggctcccccaaaagagagtagatgaggttgtaagtgaagcagagaaagtgaaagcttggctgaaggagaaggaaaacctgcagaaaaatacccctgtctttaacccaccagttttcacatctgaagaagtttctgagaaagttctggacttacaagataaggtctcaagtgtcaataggattccaaaaccaaaaccgaaggtcgagaagaaaacagcaaaggaggaagaacctgctagcaaggagaaaaccacctatacggaatctgcacccgacgagggtgaatacaccgaaacgtctcagaaatctaaggctcaagaagaggatcagtctgcatcagccaacactagtgattcagaacctgaacctcatgacgagttgtgagaagcagaatccataggaacaggtcgggacgacgcattacgcatgtactacaagaaggcagtttgaggataaattttggttgctcatttttttccaaaattttatttgacgaccgaaagacgaggctatgtaggtgttgaggaacactagatgctgtagggccaaaaatattttatcggtagtttctgattgctgtatagcagcctcatcgttgtgtaagttactcgcctcgaaggcgtagttcaggatctagaatcgctttgttatactgaactcatttcattttttaatgaagaatgctatataggattttacgtcagtaaggtattgttgtactgagctgatttgattttttaaataaataatttcatagattgtacgtcaatccttgctgtgtttaaatatataattagatctatacccgtcggtggagcaagagtttaatatataattagatgtatacccgcataggttcaaacttccatttggctacatctgccctttacctagataaatgattcttgattttttccccattcattaaactttatatggaaatgaaaggaatccagaataacaaatgaaaaaaataaaaa

SEQ ID NO: 51237 - DNA, 2482 bp, Zea Mays
ctcagatgtctgatggcaatcttagatgttaaggacgtaagatggaactctgagcttggaggcgttcaaatggaaatgcgtctggtcaactattttgctgcccaattcaataagcagctcggtgatggggttgatatccgtcagtctcccaaggcaatggctaagttgaaaaagcaagtcaagcgcaccaaagaaattcttagtgcaaacactgcagctccaatttcagtagaatctctgtataatgatgttgatttcaggagtaccataacacgtgagaaatttgaagagctgtgtgaggatttatgggagcaagctctaactccagttaaagaagtgctgacacattctggcatgaagatcgatgacatctatgctgtagaactaataggaggagctacccgggttccaaaactgcaggctaagctgcaggaatttctgggtaggcgtggcctggataaacatcttgatgctgatgaagcaattgttctcggagcttcacttcatgctgctaacctgagtgacgggattaagttgaaccgtaagttgggaatgattgatggctctacttatgcttttgtacttgagatagatggcctagattatgtcaaggatgaaagtattgaccaaattttggttccaagaatgaagaaaatgccaataaagatgtttagatccatcagacatacaaaggacttcgatgtctctctcaactatgacaaagcttatgaactgcctccaggcattccatcacacaagtttgcagagtattccgtatcaggactgacagatgccagtgaaaagtatgcaaaccgtaatttatctgcacccatcaaagcaaatctacatttttctttgagtagaagtggaattattgctcttgatagagcagaagcagtaattgagataactgaatgggttgaagttccaaagaagatattgactctagagagtaacatcaccaatcagaattcttcttctgaagtaggagcagctaatagcacaacagatagtaaggaaaatctgagttctggcagtaatactaattcgagcactcccattgatgagagtaatgctcaagaaattattacagagaaggtgctaaagaaaagaacttttagggttccattgaaggttgtggaaaaaacaactggtgctggaacaattctttcgaaggagttgtattctgaagcaaaaaataggttagaggcactcgataagaaggatgcagaacggaggaaaactgctgaacttaagaataacctagagtcatacatatattctatgaaggagaagctggaagaaagcgcagatattttgactgtctcaactgaacaggagagggaatcctttgctgagaaacttagtgaggtgcaggattggttatatatggacggtgaagatgctcaagctaatgaattcaaagagcgtcttgaccaacttaaagccattggtgacccaattcttttcagattgttaagaactgggagacaaacaaaccatggctcccccaaaagagagtagatgaggttgtaagtgaagcagagaaagtgaaagcttggctgaaggagaaggaaaacctgcagaaaaatacccctgtctttaacccaccagttttcacatctgaagaagtttctgagaaagttctggacttacaagataaggtctcaagtgtcaataggattccaaaaccaaaaccgaaggtcgagaagaaaacagcaaaggaggaagaacctgctagcaaggagaaaaccacctatacggaatctgcacccgacgagggtgaatacaccgaaacgtctcagaaatctaaggctcaagaagaggatcagtctgcatcagccaacactagtgattcagaacctgaacctcatgacgagttgtgagaagcagaatccataggaacaggtcgggacgacgcattacgcatgtactacaagaaggcagtttgaggataaattttggttgctcatttttttccaaaattttatttgacgaccgaaagacgaggctatgtaggtgttgaggaacactagatgctgtagggccaaaaatattttatcggtagtttctgattgctgtatagcagcctcatcgttgtgtaagttactcgcctcgaaggcgtagttcaggatctagaatcgctttgttatactgaactcatttcattttttaatgaagaatgctatataggattttacgtcagtaaggtattgttgtactgagctgatttgattttttaaataaataatttcatagattgtacgtcaatccttgctgtgtttaaatatataattagatctatacccgtcggtggagcaagagtttaatatataattagatgtatacccgcataggttcaaacttccatttggctacatctgccctttacctagataaatgattcttgattttttccccattcattaaactttatatggaaatgaaaggaatccagaataacaaatgaaaaaaataaaaa

SEQ ID NO: 51238 - DNA, 1382 bp, Zea Mays
cccaaatattggggtgatctatctaccatttgtatatgatggaacaatatagggaacaaaaagacttaacacatggttttattgacttggagaagccttataacaaatatcaaggaatattatatgctggaagaaagcgcagatattttgactgtctcaactgaacaggagagggaatcctttgctgagaaacttagtgaggtgcaggattggttatatatggacggtgaagatgctcaagctaatgaattcaaagagcgtcttgaccaacttaaagccattggtgacccaattcttttcagattgaatgaattaaaaacccgaccaacggcctgtgaaaatgctcgattgtatcttgatgagctgcaaaagattgttaagaactgggagacaaacaaaccatggctcccccaaaagagagtagatgaggttgtaagtgaagcagagaaagtgaaagcttggctgaaggagaaggaaaacctgcagaaaaatacccctgtctttaacccaccagttttcacatctgaagaagtttctgagaaagttctggacttacaagataaggtctcaagtgtcaataggattccaaaaccaaaaccgaaggtcgagaagaaaacagcaaaggaggaagaacctgctagcaaggagaaaaccacctatacggaatctgcacccgacgagggtgaatacaccgaaacgtctcagaaatctaaggctcaagaagaggatcagtctgcatcagccaacactagtgattcagaacctgaacctcatgacgagttgtgagaagcagaatccataggaacaggtcgggacgacgcattacgcatgtactacaagaaggcagtttgaggataaattttggttgctcatttttttccaaaattttatttgacgaccgaaagacgaggctatgtaggtgttgaggaacactagatgctgtagggccaaaaatattttatcggtagtttctgattgctgtatagcagcctcatcgttgtgtaagttactcgcctcgaaggcgtagttcaggatctagaatcgctttgttatactgaactcatttcattttttaatgaagaatgctatataggattttacgtcagtaaggtattgttgtactgagctgatttgattttttaaataaataatttcatagattgtacgtcaatccttgctgtgtttaaatatataattagatctatacccgtcggtggagcaagagtttaatatataattagatgtatacccgcataggttcaaacttccatttggctacatctgccctttacctagataaatgattcttgattttttccccattcattaaactttatatggaaatgaaaggaatccagaataacaaatgaaaaaaataaaaa

SEQ ID NO: 51239 - DNA, 4108 bp, Zea Mays
gccgaaaccatgccaaacggaagacgtgctgggagcttaaaatgtcaagaaaccaaacaatttttacctggtacgtcagaatgcacttttacgcctagaatgttgcattgataattatgcaaatacataaaagaaacagctacctaaattgcagccagacagctgcaagcaacaaaattcatgaaacaaaaaaaggacacaaaagatattaaaaaagaccacaactgacgctctagtcattcttcaaggaaatatttcttctatgctctatggataacctgggcaaactctttcttgaaaaaggcttagccatttgatacagacggtagaatttcttggaagatgttccagctcactccttgagacccaaatgctccagctgattaatatgataatttcaatgtagaaactagaaagggacttccaactgttgtttgaaacgttgcagagtgataaaaggctcaacctcattgtcaacactgagatcgcaccaggttacccatacgagggagcacaacaaactaatgtgccttccattttgcaagcaggtgatcatggatctctcctttcttaatcctctgcaggcgctgcttcagcttggacagtgtcgctgaactcaacttgataccccgatcaatcatgtcttctgcatatttgcatgcctcaggtagcctgtcatccttcagctttgctacaagcatgttcccacactcctgtaaaggtggcaagccattctccaccatgcagcaccagactttgatcccagtctcccaatagtgtgtatccaaaaacatgcgaagtgcaagtgaacaatttccctcgtttggccaacattcgttcttgaccatctcgctaaatattgcggctgcctctcggtgcttctttcccttcaacaaaagctggaggaccacattgtatgtgttggtatcagggaagactccattggagatcatgtcgtcgagataacccactatcagctcagcatgcccgagactgccctgcagcttgatcattgtgttgtacatttccatatctgggacgagtcctcgacgcccaacaaagtcatcccagagattcatggctccgcgcaattgtcgtgcatcaaggtgtgcagcaagagcagcacggaagaacttctctcctggcgaacagccgtgcctgctcaagacatttaggtactccattgcttccggtagcgccgtggaggagtcacttgaaacaagcgtagtgaggaaggagtcataggcaggcacgttgtcaggataaaatccaatggcctgcaccatttcgtcgaacacctcgcgcgcaacccgcaggtcggcggcggcctcgctgccctcgaggaggatggcgtaggagtcggcatccgggcgcgtgccagcctcggcgcgggctactgggatcgcggcgcgagcgtcgtcgaggcggttggcacgacacagcgcggagaggagcgagttgagcgccggcgtgtcgcgggtcatgccgtagcggggcatgtccatgaacgccttgagcggggaaccgccgggggtcgccgccagggaggagaatatggaggcgaaagtggcgagcgagagcagctgctgcgactgcatagatttgactgtgtcccacatgggctcgaagaggcgattcttaccgaggatgtcgacgaggaggttccacgagtagggggagtgctcgtggccgaggtaccggtatcccgcccagcgaaagaaggcggcggcggcgcgcgggtgcgcgtaggagaagcggagcacctgctcgacgtcagcgatgcttacgcggatgtcggccttgtcgagctcggcattcagttcctcgtcgtcggcgcgggaggccaggatgtcgcagaagatgcgggtcttgggggccatgtcgggagcttccttgttcgtgggtaacgccggcgcgggcgggtcgcgggcgcgcttcgccgccggcgatgccacagtggctgcgccgtcggacggccgcttcgctcggtgatcggacatcgcggcggggagctcgcgtgatcggtgggattcaggagaggttgcaagtcggacggggaggggatactggagtggagatctttatgtcctgaccctgacccttatcctaataactaaggcggagtcgagtcgacccgaacaggaacctccgaaaccctgaccaaatcgcgaggcaaagccgcgtcggcggcggatggcgccgtccttggtcgtctcggcgaggcatgcccacgctgtgccccaccggagaggtcgcaggcagcgtgtggtcgtcgccagttccggtggcgccggtccgccgccgaagctggtgaccttcctcgggaagggcggctccggcaagactaccgcggccaccatcgccgctcaggtggcaaatttgctccgtgactctatcccttgatcgtatttgtcattattttgatgacaaatcttagttttggtgtgaactcgctgccgcgtcgaggacttcgactggaaatctgcaatgttgctctggggaacagcaatgatgctgtggtattatgcaagtgaaggcttcaagacatgcctggttgttcagtcccaagatcctactgcggagcacttgatgggcagtaaaattgggaattctctgaccgagtgtgtggccaatctctcggccataaagctggagactgttgctgcttgaacccctagaccgactgaagaaggtagacgcccaggtcaattttactcaaggaatccttgaagggattgtaggagaggagcttggagttttacctggaatggattcgatctgtttagtcttagctcttcagaagctccttaatttcttttcatctggaaggagtaattcacaatcagaatttgatgtgatcgtgtatgattgcaacaatacagaggaaattctacggctgataggtgctgctgaccgggcaagatcttacttgaggtatgtgagggaccttgctgagaagactgacatcggaagacttgcttctccttcattactgaaactaatatatgattctgcaaggccaaatggcaaaattagtgaggggagacttagtacagagatatggaatgaaattgaacaactacttgagaaaatctcagtatggtttgccgatccttcaaaacttgcatgcttccttatcatggatcctaggacatcaatctctgtatcctctgcattgcggtattggggttgtaccactcaagctggcggtcaaatatgtggggcatttggatacactgaagacccttctgaaatgcaccgagaagttgctcaaaagttcgtgccgttgtctttgtcttttctgccatttctcccgaatgattcttccgtggattggagcagagcactaagctcattgagccaaaatacaaaggaacagctgaggaatgcgtccacctgggtgtacccttcagtcagttttgattctgttcagaaatctgtaaccctcttcatgccaggctttgataagtctgaaatcaagctatatcaatatagaggtggatcagaactgttgatcgaagctggagatcagaggcgcgtcataaaattgccacttacgatgcagggaaaggtccaaggtgccaaattcgttgacaggaacctcgttgttagcatccggtagcagaatcgctggcgccggctgccggctgggattggagcaccccacttcagattggcagtttactgccgactaatgagcaggaccatcgggattgcatgtctgtttctgttcgtagcctgaattttgtggtgctgttcgtttcaactttcaaccagagtgaagctgcatagtcctactatttttgaaggggttcgcgatactcgagtaaatagtaaactggcagttttttgcactgcttttgtgatcaggaaagaacggtgttctaggggattctctttccaaaaaaaaaatgttcccctcccccactttattatcagcaaagcgtttaacaagactgaagagttccaagcttacagacttgcagcacattttaggctcgaccgccatacatcaacggaagccaaaagttttcaaaacgactaatttcctccctcacgtggttgcatgggtggattccaacaccaaatgccgactcccctgatcgtg

SEQ ID NO: 51240 - DNA, 715 bp, Zea Mays
cccccccccggaccagcaactgatcataaccttcctattgaggtacatgctctctcgggcatctgttccacgccatgccattattaaaaagcttgcaggagaggatattgcacatttagatgaccttattgcagttctttcaaaattgtctaggggaacacgagtgcctctagaatacgtcaaataccctgaccgtcacaggaacaaatctgtactggtgacaatagatcaacatgaatggtatgcgtcacctcagttatatactcgaaatgatgcaactggcttgtggactggaaaaccagctataccaccagaatctccgtttttagctctagctcatcatgctagtcatgtggacacaaactcaaacgctgtttcatctttatccgaatctagtcctatggatctcaagtgccagtatgattctgagaacctggcagacggatgcatcaaaatgcaaactgatgatgagattgttgtggatggatctcattctaacgaagattctgttattgagaaaaaaaggcgacgtgtggtcgaggagatagctgccgacggaactttaccatcttatggagatctagaggatgtaaaaggtggttctttgaggcatccttctaatgcagatggatctgaacttgctcgaacaatatcaagcaatgcatcattggcagaacaagtaattgaaccagcccttgtgatgtttgaggtttaa

SEQ ID NO: 51241 - DNA, 1957 bp, Zea Mays
atcatttcagcccaatgtgtgccagctacattcgtctgtttaactgaaccagccacgagcccacgtcctgctttgaatcgggcctgatcacgcgactcccgggaaaaatatcttctttggcacgctcaactgaagcattcgactctggtgccggtcttccccttccgaaatctcgtgcggcggccggcaagttcgcacttcgcagcgcattcaccaccagcttcactcccaactaccgctgatctcactcacgctcaccccagccggccagccccgtccccatccggctagaggttcacatcacctgcgtgacgataaacatcctcttccaaatcgtagtctagcccgtgcccaaaaccctagcgaccgccggagagctcgtccgaatcgaggccaccgaggggaaattagatcgcggcggacgatggagagccctgcgaaagaggaggccgggggagagctggcaatggagatcgagtcgtcggtcacggcggaggactggcgccgcgcgctttctcgcgtcgtgccgtccgtcgtcgtcctccgcaccactgcgccgcgcgcctttgacaccgaggtcgcgggcgccagctacgccacgggtttcgtcgttgacaagtcccgcggcataatcctcactaaccgccatgtcgtcaagccagggacctgtggtcgcggaggcccatgttcgtgaacagggaagagatccctgtgtacccactgtacagagatcctgtacatgattttggtttttttcgctatgatccaggtgccattaagtttcttaagtatgatgagattccgctggcacctgaagcagcatcagtcgggctagaaatccgggttgtcggaaatgacagcggggaaaaggttccatgaattatatcttaaattctgctgttatgtacccctaaaatatacgtccttgttagacaccacagaccacagcagttgcatatttttttgcattgttccctgtcaaaccttagtgccttagatttctcctttttgtgcactgtgaaacaaatcttctgcttttgcaatatccagaactcacggaactaaggttccacccatcatacactccatcaaaaacttattttgttaaattttaattgacatagggatgcaaatggtaggatattttctgatcaactgaagcagaatagggcaaatatggaagcgacaccgattttcagacactatcaatgtctgactccgattccaagaaaataatatgggatcaaggttttaaagtcggctagtcgactctagtcgcctaagcaccgataaggtgactaatcgcgattagtcgtcgattagctcgattagtcgatcctagtcgactccctagtcgtcctatagtcgcccatctataacaggaccatactgcgggtagtgcagcaatagctttatcttttatggtagaaccagcagcagctgcgacatcagacgaagctgatgcaactgattcacgtgtggcatgatctgcggctgcgccatcaccctgaggctgggacaacctagatcctggaaagaggacttctacattattacgttgcctcccatcctcatctgcagcaagcaaagagcaactcaagaagtgctcatctccgtttccagcaaaagaacaaaagactagagaagggattaccataagtgctcatctctgttccagcaaaagaacaacagagcaggagggagtggaggatggtctgaactctgaacagagcagaaggaagcctagagcagaggttgccgcgccctggatgctggagcagggacaggtcacaggtcgaagcagagatgagggcggcggcgcgcagcagtcagcagtccagctccaacaagcagatgagggcggcggcgctcagcagtcagcagtccatctccagcaagcagatgagggcggcggcgctcagagcagtcagtagtccagcaagcaaatgaaggcggc

SEQ ID NO: 51242 - DNA, 1589 bp, Zea Mays
ctttggcacgctcaactgaagcattcgactctggtgccggtcttccccttccgaaatctcgtgcggcggccggcaagttcgcacttcgcagcgcattcaccaccagcttcactcccaactaccgctgatctcactcacgctcaccccagccggccagccccgtccccatccggctagaggttcacatcacctgcgtgacgataaacatcctcttccaaatcgtagtctagcccgtgcccaaaaccctagcgaccgccggagagctcgtccgaatcgaggccaccgaggggaaattagatcgcggcggacgatggagagccctgcgaaagaggaggccgggggagagctggcaatggagatcgagtcgtcggtcacggcggaggactggcgccgcgcgctttctcgcgtcgtgccgtccgtcgtcgtcctccgcaccactgcgccgcgcgcctttgacaccgaggtcgcgggcgccagctacgccacgggtttcgtcgttgacaagtcccgcggcataatcctcactaaccgccatgtcgtcaagccagggacctgtggtcgcggaggcccatgttcgtgaacagggaagagatccctgtgtacccactgtacagagatcctgtacatgattttggtttttttcgctatgatccaggtgccattaagtttcttaagtatgatgagattccgctggcacctgaagcagcatcagtcgggctagaaatccgggttgtcggaaatgacagcggggaaaagggatgcaaatggtaggatattttctgatcaactgaagcagaatagggcaaatatggaagcgacaccgattttcagacactatcaatgtctgactccgattccaagaaaataatatgggatcaaggttttaaagtcggctagtcgactctagtcgcctaagcaccgataaggtgactaatcgcgattagtcgtcgattagctcgattagtcgatcctagtcgactccctagtcgtcctatagtcgcccatctataacaggaccatactgcgggtagtgcagcaatagctttatcttttatggtagaaccagcagcagctgcgacatcagacgaagctgatgcaactgattcacgtgtggcatgatctgcggctgcgccatcaccctgaggctgggacaacctagatcctggaaagaggacttctacattattacgttgcctcccatcctcatctgcagcaagcaaagagcaactcaagaagtgctcatctccgtttccagcaaaagaacaaaagactagagaagggattaccataagtgctcatctctgttccagcaaaagaacaacagagcaggagggagtggaggatggtctgaactctgaacagagcagaaggaagcctagagcagaggttgccgcgccctggatgctggagcagggacaggtcacaggtcgaagcagagatgagggcggcggcgcgcagcagtcagcagtccagctccaacaagcagatgagggcggcggcgctcagcagtcagcagtccatctccagcaagcagatgagggcggcggcgctcagagcagtcagtagtccagcaagcaaatgaaggcggc

SEQ ID NO: 51243 - DNA, 3114 bp, Zea Mays
gacgcgaaagcccgggcccatcaccataggcaatcacaattccctttcccctcgccgccgcctcgctctctgccttttccacctcccccattcccacccgccgattcactcaccttggggcctcacgcggtcgcgcctccagcctcccctacccctactcccctcgcgcccagggaggagcccgagtcgcggcgagcgaagattccctccgattgctctcctcctagaacttccgatcggctcgtgatggccatgcagcagcacgcggcgtcggcgtcgagctccagcttggggctgcaccttctcgcctcgccctcgtccatcagggaggccacccacaccaaggttttcgtgggcgggctcgcctgggagaccagcagcgacaggctccggcgcttctacgagcgcttcggggacattctcgaggccgtcgtcatcaccgaccgccactctggccgctccaagggatacggattcgtgacattccgtgaagccgagtccgcgagcaaggcctgcgaggaccccacgccggtgatcgatggcaggcgcgccaattgtaacctggcatctttgggtcgagcccagcatcccgtgccccctgggcggccaagatcagctgggtcctatttgggtgtcccagttccaaaggccttctatttagggggttacagccaccaccgaccgtttccacttgggtactaccaaggatttcctgttccccagtacagttacccttcatatgggaccgaatacatctatccacagggtacattaaactcatattccggtcagcaatatcttcctatttatggagtctcagctgcagcgaacacatccaaccaagcatttagccagctgagtccatccgtttccggtggtggcaatggttatttgtcggttcatagttacaacgtgcctggaaatcaatatgtgcagctcactggatccaacttcagcggtgcatcaccaaccgctcgaccttccattcagacttcttttttagtaggtaatgtggtattcataccatgccgcagtatagtaggacctgtgtattctaaagaaactatgacatgcttggtcccaggggcggacccacgttgaaagtagtgggggcacaggcccctgctcaattttttggtttcagtggactttttatgttatttggtgtagctatagagctttattagttaatagaccttcacttaggcccctactcagaatttgggctgggttcacccctgttggtcccttctagaaatctggaaattatttaaggttcgtgtcatatttgtgcatccttggtagtttttagtttctgttcaatgtcacatgctcttctatccatcatgtttgttcttaggttgggcacattttcttcgggccaagattatagatgtgttttctaaattatatcattttatgatgaaatattttcgtttatgaataagttctttatgttcacaaattctttgttttactaactatacgtctatacataacaaacaagatctttcattccttttgtaacaattttcgagctaatttcataaggtccagaaagatcgaaaacacagaaacatgcttggcatatgcagatcattgtgtgtttttttttgcattcctagggcttatattattgattctctaccatgtgacaccagcctcttaaaaatgttcccttgtccagtcgtccttaagattacctgtacatatataggtagtgtttgtttatttgagttgaataagtcacattactcggactacatacactcagtagccaaggtaatcatcacgcaaacacaaatgaaactgtagacatttctttatgtttctagatttgagatttctattttctccatttgtgaataatcacgcattaattggcttctgcagcaacacccgttcctgcacatccacacctaataattccagccccctcaccccagtttacacaagctagtggttcagaccaaagtgcaagttgaactgtgcatccaaacatttgtaccttgagtgttttggttcatggcaggtacccttagattgcagcaggactaaaaagagcagtgttgctgtattcacagcatttgttcttgcctggcaagcaatcatccttgcattcataaggttgtcgttatcatggtcaacagatgtacctggaaaccatgaagttgcccctatggatggggcaagtgatccaagagtaacagttgctcttgcagtttcgctcagtttaaatcgcaagcgtgatggaaatgtagcttatgctggaatggagtccagcatatgtaagatggattaatccaatggagatcagccttcaggtgattgtgcatctgaaaattcgtgttggtgtgtggtccctagtcccagtcaccgtgcacagggtctgatgatcaagaagtgtgtcctgtcctgtacaagtctgcagtcatcaactcatcaccccgttgtctgcatgactagggcctgtttggtttggtgtctaacttgccacactttgcctaacttttctgtctaaggttagtttttcaattcgaaggactaaccttaggcaaagtgtggcagatttagccaccaaccaaacagcccctacattcatcagcggtcagcctttggaccaaactctggaagacctagctactctcttttcctgagagttaccagtaagtgtatccagttctgtatgcagtcatcatcgtgttgtttacaccactgggttgtagccagtgatgatatgatcattcgtctgtaccaaatttttattgttgcaactaaggtgtgatctagcgtgtagtgctctgtgtttggtggtttcaagtatagagcgcttctcttgtacttcaaaataaacccgtttacccatgatgatgctatatttagtagatttctcttctgattatgcttgtctctttaccaaagcatctctcggatagctatggcataaaaggcttgtacatgtttgaatgagcacacttatcaaacaatagaggttgtcttctttcatttgtttgatttgaaagtcgaggaagaaagtaagctcaccaatcattgacatttcaaactcattcgacatcaactcaacaaattacttgcaatgacaatcatttgtca

SEQ ID NO: 51244 - DNA, 3049 bp, Zea Mays
cccgggcccatcaccataggcaatcacaattccctttcccctcgccgccgcctcgctctctgccttttccacctcccccattcccacccgccgattcactcaccttggggcctcacgcggtcgcgcctccagcctcccctacccctactcccctcgcgcccagggaggagcccgagtcgcggcgagcgaagattccctccgattgctctcctcctagaacttccgatcggctcgtgatggccatgcagcagcacgcggcgtcggcgtcgagctccagcttggggctgcaccttctcgcctcgccctcgtccatcagggaggccacccacaccaaggttttcgtgggcgggctcgcctgggagaccagcagcgacaggctccggcgcttctacgagcgcttcggggacattctcgaggccgtcgtcatcaccgaccgccactctggccgctccaagggatacggattcgtgacattccgtgaagccgagtccgcgagcaaggcctgcgaggaccccacgccggtgatcgatggcaggcgcgccaattgtaacctggcatctttgggtcgagcccagcatcccgtgccccctgggcggccaagatcagctgggtcctatttgggtgtcccagttccaaaggccttctatttagggggttacagccaccaccgaccgtttccacttgggtactaccaaggatttcctgttccccagtacagggtacattaaactcatattccggtcagcaatatcttcctatttatggagtctcagctgcagcgaacacatccaaccaagcatttagccagctgagtccatccgtttccggtggtggcaatggttatttgtcggttcatagttacaacgtgcctggaaatcaatatgtgcagctcactggatccaacttcagcggtgcatcaccaaccgctcgaccttccattcagacttcttttttagtaggtaatgtggtattcataccatgccgcagtatagtaggacctgtgtattctaaagaaactatgacatgcttggtcccaggggcggacccacgttgaaagtagtgggggcacaggcccctgctcaattttttggtttcagtggactttttatgttatttggtgtagctatagagctttattagttaatagaccttcacttaggcccctactcagaatttgggctgggttcacccctgttggtcccttctagaaatctggaaattatttaaggttcgtgtcatatttgtgcatccttggtagtttttagtttctgttcaatgtcacatgctcttctatccatcatgtttgttcttaggttgggcacattttcttcgggccaagattatagatgtgttttctaaattatatcattttatgatgaaatattttcgtttatgaataagttctttatgttcacaaattctttgttttactaactatacgtctatacataacaaacaagatctttcattccttttgtaacaattttcgagctaatttcataaggtccagaaagatcgaaaacacagaaacatgcttggcatatgcagatcattgtgtgtttttttttgcattcctagggcttatattattgattctctaccatgtgacaccagcctcttaaaaatgttcccttgtccagtcgtccttaagattacctgtacatatataggtagtgtttgtttatttgagttgaataagtcacattactcggactacatacactcagtagccaaggtaatcatcacgcaaacacaaatgaaactgtagacatttctttatgtttctagatttgagatttctattttctccatttgtgaataatcacgcattaattggcttctgcagcaacacccgttcctgcacatccacacctaataattccagccccctcaccccagtttacacaagctagtggttcagaccaaagtgcaagttgaactgtgcatccaaacatttgtaccttgaggtacccttagattgcagcaggactaaaaagagcagtgttgctgtattcacagcatttgttcttgcctggcaagcaatcatccttgcattcataaggttgtcgttatcatggtcaacagatgtacctggaaaccatgaagttgcccctatggatggggcaagtgatccaagagtaacagttgctcttgcagtttcgctcagtttaaatcgcaagcgtgatggaaatgtagcttatgctggaatggagtccagcatatgtaagatggattaatccaatggagatcagccttcaggtgattgtgcatctgaaaattcgtgttggtgtgtggtccctagtcccagtcaccgtgcacagggtctgatgatcaagaagtgtgtcctgtcctgtacaagtctgcagtcatcaactcatcaccccgttgtctgcatgactagggcctgtttggtttggtgtctaacttgccacactttgcctaacttttctgtctaaggttagtttttcaattcgaaggactaaccttaggcaaagtgtggcagatttagccaccaaccaaacagcccctacattcatcagcggtcagcctttggaccaaactctggaagacctagctactctcttttcctgagagttaccagtaagtgtatccagttctgtatgcagtcatcatcgtgttgtttacaccactgggttgtagccagtgatgatatgatcattcgtctgtaccaaatttttattgttgcaactaaggtgtgatctagcgtgtagtgctctgtgtttggtggtttcaagtatagagcgcttctcttgtacttcaaaataaacccgtttacccatgatgatgctatatttagtagatttctcttctgattatgcttgtctctttaccaaagcatctctcggatagctatggcataaaaggcttgtacatgtttgaatgagcacacttatcaaacaatagaggttgtcttctttcatttgtttgatttgaaagtcgaggaagaaagtaagctcaccaatcattgacatttcaaactcattcgacatcaactcaacaaattacttgcaatgacaatcatttgtca

SEQ ID NO: 51245 - DNA, 2451 bp, Zea Mays
cccgggcccatcaccataggcaatcacaattccctttcccctcgccgccgcctcgctctctgccttttccacctcccccattcccacccgccgattcactcaccttggggcctcacgcggtcgcgcctccagcctcccctacccctactcccctcgcgcccagggaggagcccgagtcgcggcgagcgaagattccctccgattgctctcctcctagaacttccgatcggctcgtgatggccatgcagcagcacgcggcgtcggcgtcgagctccagcttggggctgcaccttctcgcctcgccctcgtccatcagggaggccacccacaccaaggttttcgtgggcgggctcgcctgggagaccagcagcgacaggctccggcgcttctacgagcgcttcggggacattctcgaggccgtcgtcatcaccgaccgccactctggccgctccaagggatacggattcgtgacattccgtgaagccgagtccgcgagcaaggcctgcgaggaccccacgccggtgatcgatggcaggcgcgccaattgtaacctggcatctttgggtcgagcccagcatcccgtgccccctgggcggccaagatcagctgggtcctatttgggtgtcccagttccaaaggccttctatttagggggttacagccaccaccgaccgtttccacttgggtactaccaaggatttcctgttccccagtacaggtaagataatttatggcatcatttgttagttttccaatgtaacattctttgtgacaaaacgttaaaaatgtcctgcacttacttttggagagtatatctgataatacggtgtttgctacttaaattagcttgtacatatggtatctcccctttcgcatgatgaaataatctgatccgaccatgctcatggaacacgatatgactgtttgaaagccaatagaaatacattcagttggttttttgcttttgcagttacccttcatatgggaccgaatacatctatccacagggtacattaaactcatattccggtcagcaatatcttcctatttatggagtctcagctgcagcgaacacatccaaccaagcatttagccagctgagtccatccgtttccggtggtggcaatggttatttgtcggttcatagttacaacgtgcctggaaatcaatatgtgcagctcactggatccaacttcagcggtgcatcaccaaccgctcgaccttccattcagacttcttttttagtagcaacacccgttcctgcacatccacacctaataattccagccccctcaccccagtttacacaagctagtggttcagaccaaagtgcaagttgaactgtgcatccaaacatttgtaccttgaggtacccttagattgcagcaggactaaaaagagcagtgttgctgtattcacagcatttgttcttgcctggcaagcaatcatccttgcattcataaggttgtcgttatcatggtcaacagatgtacctggaaaccatgaagttgcccctatggatggggcaagtgatccaagagtaacagttgctcttgcagtttcgctcagtttaaatcgcaagcgtgatggaaatgtagcttatgctggaatggagtccagcatatgtaagatggattaatccaatggagatcagccttcaggtgattgtgcatctgaaaattcgtgttggtgtgtggtccctagtcccagtcaccgtgcacagggtctgatgatcaagaagtgtgtcctgtcctgtacaagtctgcagtcatcaactcatcaccccgttgtctgcatgactagggcctgtttggtttggtgtctaacttgccacactttgcctaacttttctgtctaaggttagtttttcaattcgaaggactaaccttaggcaaagtgtggcagatttagccaccaaccaaacagcccctacattcatcagcggtcagcctttggaccaaactctggaagacctagctactctcttttcctgagagttaccagtaagtgtatccagttctgtatgcagtcatcatcgtgttgtttacaccactgggttgtagccagtgatgatatgatcattcgtctgtaccaaatttttattgttgcaactaaggtgtgatctagcgtgtagtgctctgtgtttggtggtttcaagtatagagcgcttctcttgtacttcaaaataaacccgtttacccatgatgatgctatatttagtagatttctcttctgattatgcttgtctctttaccaaagcatctctcggatagctatggcataaaaggcttgtacatgtttgaatgagcacacttatcaaacaatagaggttgtcttctttcatttgtttgatttgaaagtcgaggaagaaagtaagctcaccaatcattgacatttcaaactcattcgacatcaactcaacaaattacttgcaatgacaatcatttgtca

SEQ ID NO: 51246 - DNA, 2200 bp, Zea Mays
aggcaatcacaattccctttcccctcgccgccgcctcgctctctgccttttccacctcccccattcccacccgccgattcactcaccttggggcctcacgcggtcgcgcctccagcctcccctacccctactcccctcgcgcccagggaggagcccgagtcgcggcgagcgaagattccctccgattgctctcctcctagaacttccgatcggctcgtgatggccatgcagcagcacgcggcgtcggcgtcgagctccagcttggggctgcaccttctcgcctcgccctcgtccatcagggaggccacccacaccaaggttttcgtgggcgggctcgcctgggagaccagcagcgacaggctccggcgcttctacgagcgcttcggggacattctcgaggccgtcgtcatcaccgaccgccactctggccgctccaagggatacggattcgtgacattccgtgaagccgagtccgcgagcaaggcctgcgaggaccccacgccggtgatcgatggcaggcgcgccaattgtaacctggcatctttgggtcgagcccagcatcccgtgccccctgggcggccaagatcagctgggtcctatttgggtgtcccagttccaaaggccttctatttagggggttacagccaccaccgaccgtttccacttgggtactaccaaggatttcctgttccccagtacagttacccttcatatgggaccgaatacatctatccacagggtacattaaactcatattccggtcagcaatatcttcctatttatggagtctcagctgcagcgaacacatccaaccaagcatttagccagctgagtccatccgtttccggtggtggcaatggttatttgtcggttcatagttacaacgtgcctggaaatcaatatgtgcagctcactggatccaacttcagcggtgcatcaccaaccgctcgaccttccattcagacttcttttttagtagcaacacccgttcctgcacatccacacctaataattccagccccctcaccccagtttacacaagctagtggttcagaccaaagtgcaagttgaactgtgcatccaaacatttgtaccttgagtgttttggttcatggcaggtacccttagattgcagcaggactaaaaagagcagtgttgctgtattcacagcatttgttcttgcctggcaagcaatcatccttgcattcataaggttgtcgttatcatggtcaacagatgtacctggaaaccatgaagttgcccctatggatggggcaagtgatccaagagtaacagttgctcttgcagtttcgctcagtttaaatcgcaagcgtgatggaaatgtagcttatgctggaatggagtccagcatatgtaagatggattaatccaatggagatcagccttcaggtgattgtgcatctgaaaattcgtgttggtgtgtggtccctagtcccagtcaccgtgcacagggtctgatgatcaagaagtgtgtcctgtcctgtacaagtctgcagtcatcaactcatcaccccgttgtctgcatgactagggcctgtttggtttggtgtctaacttgccacactttgcctaacttttctgtctaaggttagtttttcaattcgaaggactaaccttaggcaaagtgtggcagatttagccaccaaccaaacagcccctacattcatcagcggtcagcctttggaccaaactctggaagacctagctactctcttttcctgagagttaccagtaagtgtatccagttctgtatgcagtcatcatcgtgttgtttacaccactgggttgtagccagtgatgatatgatcattcgtctgtaccaaatttttattgttgcaactaaggtgtgatctagcgtgtagtgctctgtgtttggtggtttcaagtatagagcgcttctcttgtacttcaaaataaacccgtttacccatgatgatgctatatttagtagatttctcttctgattatgcttgtctctttaccaaagcatctctcggatagctatggcataaaaggcttgtacatgtttgaatgagcacacttatcaaacaatagaggttgtcttctttcatttgtttgatttgaaagtcgaggaagaaagtaagctcaccaatcattgacatttcaaactcattcgacatcaactcaacaaattacttgcaatgacaatcatttgtca

SEQ ID NO: 51247 - DNA, 3089 bp, Zea Mays
aggcaatcacaattccctttcccctcgccgccgcctcgctctctgccttttccacctcccccattcccacccgccgattcactcaccttggggcctcacgcggtcgcgcctccagcctcccctacccctactcccctcgcgcccagggaggagcccgagtcgcggcgagcgaagattccctccgattgctctcctcctagaacttccgatcggctcgtgatggccatgcagcagcacgcggcgtcggcgtcgagctccagcttggggctgcaccttctcgcctcgccctcgtccatcagggaggccacccacaccaaggttttcgtgggcgggctcgcctgggagaccagcagcgacaggctccggcgcttctacgagcgcttcggggacattctcgaggccgtcgtcatcaccgaccgccactctggccgctccaagggatacggattcgtgacattccgtgaagccgagtccgcgagcaaggcctgcgaggaccccacgccggtgatcgatggcaggcgcgccaattgtaacctggcatctttgggtcgagcccagcatcccgtgccccctgggcggccaagatcagctgggtcctatttgggtgtcccagttccaaaggccttctatttagggggttacagccaccaccgaccgtttccacttgggtactaccaaggatttcctgttccccagtacaggtaagataatttatggcatcatttgttagttttccaatgtaacattctttgtgacaaaacgttaaaaatgtcctgcacttacttttggagagtatatctgataatacggtgtttgctacttaaattagcttgtacatatggtatctcccctttcgcatgatgaaataatctgatccgaccatgctcatggaacacgatatgactgtttgaaagccaatagaaatacattcagttggttttttgcttttgcagttacccttcatatgggaccgaatacatctatccacagggtacattaaactcatattccggtcagcaatatcttcctatttatggagtctcagctgcagcgaacacatccaaccaagcatttagccagctgagtccatccgtttccggtggtggcaatggttatttgtcggttcatagttacaacgtgcctggaaatcaatatgtgcagctcactggatccaacttcagcggtgcatcaccaaccgctcgaccttccattcagacttcttttttagtaggtaatgtggtattcataccatgccgcagtatagtaggacctgtgtattctaaagaaactatgacatgcttggtcccaggggcggacccacgttgaaagtagtgggggcacaggcccctgctcaattttttggtttcagtggactttttatgttatttggtgtagctatagagctttattagttaatagaccttcacttaggcccctactcagaatttgggctgggttcacccctgttggtcccttctagaaatctggaaattatttaaggttcgtgtcatatttgtgcatccttggtagtttttagtttctgttcaatgtcacatgctcttctatccatcatgtttgttcttaggttgggcacattttcttcgggccaagattatagatgtgttttctaaattatatcattttatgatgaaatattttcgtttatgaataagttctttatgttcacaaattctttgttttactaactatacgtctatacataacaaacaagatctttcattccttttgtaacaattttcgagctaatttcataaggtccagaaagatcgaaaacacagaaacatgcttggcatatgcagatcattgtgtgtttttttttgcattcctagggcttatattattgattctctaccatgtgacaccagcctcttaaaaatgttcccttgtccagtcgtccttaagattacctgtacatatataggtagtgtttgtttatttgagttgaataagtcacattactcggactacatacactcagtagccaaggtacccttagattgcagcaggactaaaaagagcagtgttgctgtattcacagcatttgttcttgcctggcaagcaatcatccttgcattcataaggttgtcgttatcatggtcaacagatgtacctggaaaccatgaagttgcccctatggatggggcaagtgatccaagagtaacagttgctcttgcagtttcgctcagtttaaatcgcaagcgtgatggaaatgtagcttatgctggaatggagtccagcatatgtaagatggattaatccaatggagatcagccttcaggtgattgtgcatctgaaaattcgtgttggtgtgtggtccctagtcccagtcaccgtgcacagggtctgatgatcaagaagtgtgtcctgtcctgtacaagtctgcagtcatcaactcatcaccccgttgtctgcatgactagggcctgtttggtttggtgtctaacttgccacactttgcctaacttttctgtctaaggttagtttttcaattcgaaggactaaccttaggcaaagtgtggcagatttagccaccaaccaaacagcccctacattcatcagcggtcagcctttggaccaaactctggaagacctagctactctcttttcctgagagttaccagtaagtgtatccagttctgtatgcagtcatcatcgtgttgtttacaccactgggttgtagccagtgatgatatgatcattcgtctgtaccaaatttttattgttgcaactaaggtgtgatctagcgtgtagtgctctgtgtttggtggtttcaagtatagagcgcttctcttgtacttcaaaataaacccgtttacccatgatgatgctatatttagtagatttctcttctgattatgcttgtctctttaccaaagcatctctcggatagctatggcataaaaggcttgtacatgtttgaatgagcacacttatcaaacaatagaggttgtcttctttcatttgtttgatttgaaagtcgaggaagaaagtaagctcaccaatcattgacatttcaaactcattcgacatcaactcaacaaattacttgcaatgacaatcatttgtca

SEQ ID NO: 51248 - DNA, 3321 bp, Zea Mays
aggcaatcacaattccctttcccctcgccgccgcctcgctctctgccttttccacctcccccattcccacccgccgattcactcaccttggggcctcacgcggtcgcgcctccagcctcccctacccctactcccctcgcgcccagggaggagcccgagtcgcggcgagcgaagattccctccgattgctctcctcctagaacttccgatcggctcgtgatggccatgcagcagcacgcggcgtcggcgtcgagctccagcttggggctgcaccttctcgcctcgccctcgtccatcagggaggccacccacaccaaggttttcgtgggcgggctcgcctgggagaccagcagcgacaggctccggcgcttctacgagcgcttcggggacattctcgaggccgtcgtcatcaccgaccgccactctggccgctccaagggatacggattcgtgacattccgtgaagccgagtccgcgagcaaggcctgcgaggaccccacgccggtgatcgatggcaggcgcgccaattgtaacctggcatctttgggtcgagcccagcatcccgtgccccctgggcggccaagatcagctgggtcctatttgggtgtcccagttccaaaggccttctatttagggggttacagccaccaccgaccgtttccacttgggtactaccaaggatttcctgttccccagtacaggtaagataatttatggcatcatttgttagttttccaatgtaacattctttgtgacaaaacgttaaaaatgtcctgcacttacttttggagagtatatctgataatacggtgtttgctacttaaattagcttgtacatatggtatctcccctttcgcatgatgaaataatctgatccgaccatgctcatggaacacgatatgactgtttgaaagccaatagaaatacattcagttggttttttgcttttgcagttacccttcatatgggaccgaatacatctatccacagggtacattaaactcatattccggtcagcaatatcttcctatttatggagtctcagctgcagcgaacacatccaaccaagcatttagccagctgagtccatccgtttccggtggtggcaatggttatttgtcggttcatagttacaacgtgcctggaaatcaatatgtgcagctcactggatccaacttcagcggtgcatcaccaaccgctcgaccttccattcagacttcttttttagtaggtaatgtggtattcataccatgccgcagtatagtaggacctgtgtattctaaagaaactatgacatgcttggtcccaggggcggacccacgttgaaagtagtgggggcacaggcccctgctcaattttttggtttcagtggactttttatgttatttggtgtagctatagagctttattagttaatagaccttcacttaggcccctactcagaatttgggctgggttcacccctgttggtcccttctagaaatctggaaattatttaaggttcgtgtcatatttgtgcatccttggtagtttttagtttctgttcaatgtcacatgctcttctatccatcatgtttgttcttaggttgggcacattttcttcgggccaagattatagatgtgttttctaaattatatcattttatgatgaaatattttcgtttatgaataagttctttatgttcacaaattctttgttttactaactatacgtctatacataacaaacaagatctttcattccttttgtaacaattttcgagctaatttcataaggtccagaaagatcgaaaacacagaaacatgcttggcatatgcagatcattgtgtgtttttttttgcattcctagggcttatattattgattctctaccatgtgacaccagcctcttaaaaatgttcccttgtccagtcgtccttaagattacctgtacatatataggtagtgtttgtttatttgagttgaataagtcacattactcggactacatacactcagtagccaaggtaatcatcacgcaaacacaaatgaaactgtagacatttctttatgtttctagatttgagatttctattttctccatttgtgaataatcacgcattaattggcttctgcagcaacacccgttcctgcacatccacacctaataattccagccccctcaccccagtttacacaagctagtggttcagaccaaagtgcaagttgaactgtgcatccaaacatttgtaccttgaggtacccttagattgcagcaggactaaaaagagcagtgttgctgtattcacagcatttgttcttgcctggcaagcaatcatccttgcattcataaggttgtcgttatcatggtcaacagatgtacctggaaaccatgaagttgcccctatggatggggcaagtgatccaagagtaacagttgctcttgcagtttcgctcagtttaaatcgcaagcgtgatggaaatgtagcttatgctggaatggagtccagcatatgtaagatggattaatccaatggagatcagccttcaggtgattgtgcatctgaaaattcgtgttggtgtgtggtccctagtcccagtcaccgtgcacagggtctgatgatcaagaagtgtgtcctgtcctgtacaagtctgcagtcatcaactcatcaccccgttgtctgcatgactagggcctgtttggtttggtgtctaacttgccacactttgcctaacttttctgtctaaggttagtttttcaattcgaaggactaaccttaggcaaagtgtggcagatttagccaccaaccaaacagcccctacattcatcagcggtcagcctttggaccaaactctggaagacctagctactctcttttcctgagagttaccagtaagtgtatccagttctgtatgcagtcatcatcgtgttgtttacaccactgggttgtagccagtgatgatatgatcattcgtctgtaccaaatttttattgttgcaactaaggtgtgatctagcgtgtagtgctctgtgtttggtggtttcaagtatagagcgcttctcttgtacttcaaaataaacccgtttacccatgatgatgctatatttagtagatttctcttctgattatgcttgtctctttaccaaagcatctctcggatagctatggcataaaaggcttgtacatgtttgaatgagcacacttatcaaacaatagaggttgtcttctttcatttgtttgatttgaaagtcgaggaagaaagtaagctcaccaatcattgacatttcaaactcattcgacatcaactcaacaaattacttgcaatgacaatcatttgtca

SEQ ID NO: 51249 - DNA, 2186 bp, Zea Mays
aggcaatcacaattccctttcccctcgccgccgcctcgctctctgccttttccacctcccccattcccacccgccgattcactcaccttggggcctcacgcggtcgcgcctccagcctcccctacccctactcccctcgcgcccagggaggagcccgagtcgcggcgagcgaagattccctccgattgctctcctcctagaacttccgatcggctcgtgatggccatgcagcagcacgcggcgtcggcgtcgagctccagcttggggctgcaccttctcgcctcgccctcgtccatcagggaggccacccacaccaaggttttcgtgggcgggctcgcctgggagaccagcagcgacaggctccggcgcttctacgagcgcttcggggacattctcgaggccgtcgtcatcaccgaccgccactctggccgctccaagggatacggattcgtcggtgacattccgtgaagccgagtccgcgagcaaggcctgcgaggaccccacgccggtgatcgatggcaggcgcgccaattgtaacctggcatctttgggtcgagcccagcatcccgtgccccctgggcggccaagatcagctgggtcctatttgggtgtcccagttccaaaggccttctatttagggggttacagccaccaccgaccgtttccacttgggtactaccaaggatttcctgttccccagtacagttacccttcatatgggaccgaatacatctatccacagggtacattaaactcatattccggtcagcaatatcttcctatttatggagtctcagctgcagcgaacacatccaaccaagcatttagccagctgagtccatccgtttccggtggtggcaatggttatttgtcggttcatagttacaacgtgcctggaaatcaatatgtgcagctcactggatccaacttcagcggtgcatcaccaaccgctcgaccttccattcagacttcttttttagtagcaacacccgttcctgcacatccacacctaataattccagccccctcaccccagtttacacaagctagtggttcagaccaaagtgcaagttgaactgtgcatccaaacatttgtaccttgaggtacccttagattgcagcaggactaaaaagagcagtgttgctgtattcacagcatttgttcttgcctggcaagcaatcatccttgcattcataaggttgtcgttatcatggtcaacagatgtacctggaaaccatgaagttgcccctatggatggggcaagtgatccaagagtaacagttgctcttgcagtttcgctcagtttaaatcgcaagcgtgatggaaatgtagcttatgctggaatggagtccagcatatgtaagatggattaatccaatggagatcagccttcaggtgattgtgcatctgaaaattcgtgttggtgtgtggtccctagtcccagtcaccgtgcacagggtctgatgatcaagaagtgtgtcctgtcctgtacaagtctgcagtcatcaactcatcaccccgttgtctgcatgactagggcctgtttggtttggtgtctaacttgccacactttgcctaacttttctgtctaaggttagtttttcaattcgaaggactaaccttaggcaaagtgtggcagatttagccaccaaccaaacagcccctacattcatcagcggtcagcctttggaccaaactctggaagacctagctactctcttttcctgagagttaccagtaagtgtatccagttctgtatgcagtcatcatcgtgttgtttacaccactgggttgtagccagtgatgatatgatcattcgtctgtaccaaatttttattgttgcaactaaggtgtgatctagcgtgtagtgctctgtgtttggtggtttcaagtatagagcgcttctcttgtacttcaaaataaacccgtttacccatgatgatgctatatttagtagatttctcttctgattatgcttgtctctttaccaaagcatctctcggatagctatggcataaaaggcttgtacatgtttgaatgagcacacttatcaaacaatagaggttgtcttctttcatttgtttgatttgaaagtcgaggaagaaagtaagctcaccaatcattgacatttcaaactcattcgacatcaactcaacaaattacttgcaatgacaatcatttgtca

SEQ ID NO: 51250 - DNA, 3069 bp, Zea Mays
aggcaatcacaattccctttcccctcgccgccgcctcgctctctgccttttccacctcccccattcccacccgccgattcactcaccttggggcctcacgcggtcgcgcctccagcctcccctacccctactcccctcgcgcccagggaggagcccgagtcgcggcgagcgaagattccctccgattgctctcctcctagaacttccgatcggctcgtgatggccatgcagcagcacgcggcgtcggcgtcgagctccagcttggggctgcaccttctcgcctcgccctcgtccatcagggaggccacccacaccaaggttttcgtgggcgggctcgcctgggagaccagcagcgacaggctccggcgcttctacgagcgcttcggggacattctcgaggccgtcgtcatcaccgaccgccactctggccgctccaagggatacggattcgtgacattccgtgaagccgagtccgcgagcaaggcctgcgaggaccccacgccggtgatcgatggcaggcgcgccaattgtaacctggcatctttgggtcgagcccagcatcccgtgccccctgggcggccaagatcagctgggtcctatttgggtgtcccagttccaaaggccttctatttagggggttacagccaccaccgaccgtttccacttgggtactaccaaggatttcctgttccccagtacagttacccttcatatgggaccgaatacatctatccacagggtacattaaactcatattccggtcagcaatatcttcctatttatggagtctcagctgcagcgaacacatccaaccaagcatttagccagctgagtccatccgtttccggtggtggcaatggttatttgtcggttcatagttacaacgtgcctggaaatcaatatgtgcagctcactggatccaacttcagcggtgcatcaccaaccgctcgaccttccattcagacttcttttttagtaggtaatgtggtattcataccatgccgcagtatagtaggacctgtgtattctaaagaaactatgacatgcttggtcccaggggcggacccacgttgaaagtagtgggggcacaggcccctgctcaattttttggtttcagtggactttttatgttatttggtgtagctatagagctttattagttaatagaccttcacttaggcccctactcagaatttgggctgggttcacccctgttggtcccttctagaaatctggaaattatttaaggttcgtgtcatatttgtgcatccttggtagtttttagtttctgttcaatgtcacatgctcttctatccatcatgtttgttcttaggttgggcacattttcttcgggccaagattatagatgtgttttctaaattatatcattttatgatgaaatattttcgtttatgaataagttctttatgttcacaaattctttgttttactaactatacgtctatacataacaaacaagatctttcattccttttgtaacaattttcgagctaatttcataaggtccagaaagatcgaaaacacagaaacatgcttggcatatgcagatcattgtgtgtttttttttgcattcctagggcttatattattgattctctaccatgtgacaccagcctcttaaaaatgttcccttgtccagtcgtccttaagattacctgtacatatataggtagtgtttgtttatttgagttgaataagtcacattactcggactacatacactcagtagccaaggtaatcatcacgcaaacacaaatgaaactgtagacatttctttatgtttctagatttgagatttctattttctccatttgtgaataatcacgcattaattggcttctgcagcaacacccgttcctgcacatccacacctaataattccagccccctcaccccagtttacacaagctagtggttcagaccaaagtgcaagttgaactgtgcatccaaacatttgtaccttgaggtacccttagattgcagcaggactaaaaagagcagtgttgctgtattcacagcatttgttcttgcctggcaagcaatcatccttgcattcataaggttgtcgttatcatggtcaacagatgtacctggaaaccatgaagttgcccctatggatggggcaagtgatccaagagtaacagttgctcttgcagtttcgctcagtttaaatcgcaagcgtgatggaaatgtagcttatgctggaatggagtccagcatatgtaagatggattaatccaatggagatcagccttcaggtgattgtgcatctgaaaattcgtgttggtgtgtggtccctagtcccagtcaccgtgcacagggtctgatgatcaagaagtgtgtcctgtcctgtacaagtctgcagtcatcaactcatcaccccgttgtctgcatgactagggcctgtttggtttggtgtctaacttgccacactttgcctaacttttctgtctaaggttagtttttcaattcgaaggactaaccttaggcaaagtgtggcagatttagccaccaaccaaacagcccctacattcatcagcggtcagcctttggaccaaactctggaagacctagctactctcttttcctgagagttaccagtaagtgtatccagttctgtatgcagtcatcatcgtgttgtttacaccactgggttgtagccagtgatgatatgatcattcgtctgtaccaaatttttattgttgcaactaaggtgtgatctagcgtgtagtgctctgtgtttggtggtttcaagtatagagcgcttctcttgtacttcaaaataaacccgtttacccatgatgatgctatatttagtagatttctcttctgattatgcttgtctctttaccaaagcatctctcggatagctatggcataaaaggcttgtacatgtttgaatgagcacacttatcaaacaatagaggttgtcttctttcatttgtttgatttgaaagtcgaggaagaaagtaagctcaccaatcattgacatttcaaactcattcgacatcaactcaacaaattacttgcaatgacaatcatttgtca

SEQ ID NO: 51251 - DNA, 3059 bp, Zea Mays
aggcaatcacaattccctttcccctcgccgccgcctcgctctctgccttttccacctcccccattcccacccgccgattcactcaccttggggcctcacgcggtcgcgcctccagcctcccctacccctactcccctcgcgcccagggaggagcccgagtcgcggcgagcgaagattccctccgattgctctcctcctagaacttccgatcggctcgtgatggccatgcagcagcacgcggcgtcggcgtcgagctccagcttggggctgcaccttctcgcctcgccctcgtccatcagggaggccacccacaccaaggttttcgtgggcgggctcgcctgggagaccagcagcgacaggctccggcgcttctacgagcgcttcggggacattctcgaggccgtcgtcatcaccgaccgccactctggccgctccaagggatacggattcgtgacattccgtgaagccgagtccgcgagcaaggcctgcgaggaccccacgccggtgatcgatggcaggcgcgccaattgtaacctggcatctttgggtcgagcccagcatcccgtgccccctgggcggccaagatcagctgggtcctatttgggtgtcccagttccaaaggccttctatttagggggttacagccaccaccgaccgtttccacttgggtactaccaaggatttcctgttccccagtacagttacccttcatatgggaccgaatacatctatccacagggtacattaaactcatattccggtcagcaatatcttcctatttatggagtctcagctgcagcgaacacatccaaccaagcatttagccagctgagtccatccgtttccggtggtggcaatggttatttgtcggttcatagttacaacgtgcctggaaatcaatatgtgcagctcactggatccaacttcagcggtgcatcaccaaccgctcgaccttccattcagacttcttttttagtaggtaatgtggtattcataccatgccgcagtatagtaggacctgtgtattctaaagaaactatgacatgcttggtcccaggggcggacccacgttgaaagtagtgggggcacaggcccctgctcaattttttggtttcagtggactttttatgttatttggtgtagctatagagctttattagttaatagaccttcacttaggcccctactcagaatttgggctgggttcacccctgttggtcccttctagaaatctggaaattatttaaggttcgtgtcatatttgtgcatccttggtagtttttagtttctgttcaatgtcacatgctcttctatccatcatgtttgttcttaggttgggcacattttcttcgggccaagattatagatgtgttttctaaattatatcattttatgatgaaatattttcgtttatgaataagttctttatgttcacaaattctttgttttactaactatacgtctatacataacaaacaagatctttcattccttttgtaacaattttcgagctaatttcataaggtccagaaagatcgaaaacacagaaacatgcttggcatatgcagatcattgtgtgtttttttttgcattcctagggcttatattattgattctctaccatgtgacaccagcctcttaaaaatgttcccttgtccagtcgtccttaagattacctgtacatatataggtagtgtttgtttatttgagttgaataagtcacattactcggactacatacactcagtagccaaggtaatcatcacgcaaacacaaatgaaactgtagacatttctttatgtttctagatttgagatttctattttctccatttgtgaataatcacgcattaattggcttctgcagcaacacccgttcctgcacatccacacctaataattccagccccctcaccccagtttacacaagctagtggttcagaccaaagtgcaagttgaactgtgcatccaaacatttgtaccttgagattgcagcaggactaaaaagagcagtgttgctgtattcacagcatttgttcttgcctggcaagcaatcatccttgcattcataaggttgtcgttatcatggtcaacagatgtacctggaaaccatgaagttgcccctatggatggggcaagtgatccaagagtaacagttgctcttgcagtttcgctcagtttaaatcgcaagcgtgatggaaatgtagcttatgctggaatggagtccagcatatgtaagatggattaatccaatggagatcagccttcaggtgattgtgcatctgaaaattcgtgttggtgtgtggtccctagtcccagtcaccgtgcacagggtctgatgatcaagaagtgtgtcctgtcctgtacaagtctgcagtcatcaactcatcaccccgttgtctgcatgactagggcctgtttggtttggtgtctaacttgccacactttgcctaacttttctgtctaaggttagtttttcaattcgaaggactaaccttaggcaaagtgtggcagatttagccaccaaccaaacagcccctacattcatcagcggtcagcctttggaccaaactctggaagacctagctactctcttttcctgagagttaccagtaagtgtatccagttctgtatgcagtcatcatcgtgttgtttacaccactgggttgtagccagtgatgatatgatcattcgtctgtaccaaatttttattgttgcaactaaggtgtgatctagcgtgtagtgctctgtgtttggtggtttcaagtatagagcgcttctcttgtacttcaaaataaacccgtttacccatgatgatgctatatttagtagatttctcttctgattatgcttgtctctttaccaaagcatctctcggatagctatggcataaaaggcttgtacatgtttgaatgagcacacttatcaaacaatagaggttgtcttctttcatttgtttgatttgaaagtcgaggaagaaagtaagctcaccaatcattgacatttcaaactcattcgacatcaactcaacaaattacttgcaatgacaatcatttgtca

SEQ ID NO: 51252 - DNA, 2145 bp, Zea Mays
aggcaatcacaattccctttcccctcgccgccgcctcgctctctgccttttccacctcccccattcccacccgccgattcactcaccttggggcctcacgcggtcgcgcctccagcctcccctacccctactcccctcgcgcccagggaggagcccgagtcgcggcgagcgaagattccctccgattgctctcctcctagaacttccgatcggctcgtgatggccatgcagcagcacgcggcgtcggcgtcgagctccagcttggggctgcaccttctcgcctcgccctcgtccatcagggaggccacccacaccaaggttttcgtgggcgggctcgcctgggagaccagcagcgacaggctccggcgcttctacgagcgcttcggggacattctcgaggccgtcgtcatcaccgaccgccactctggccgctccaagggatacggattcgtgacattccgtgaagccgagtccgcgagcaaggcctgcgaggaccccacgccggtgatcgatggcaggcgcgccaattgtaacctggcatctttgggtcgagcccagcatcccgtgccccctgggcggccaagatcagctgggtcctatttgggtgtcccagttccaaaggccttctatttagggggttacagccaccaccgaccgtttccacttgggtactaccaaggatttcctgttccccagtacagggtacattaaactcatattccggtcagcaatatcttcctatttatggagtctcagctgcagcgaacacatccaaccaagcatttagccagctgagtccatccgtttccggtggtggcaatggttatttgtcggttcatagttacaacgtgcctggaaatcaatatgtgcagctcactggatccaacttcagcggtgcatcaccaaccgctcgaccttccattcagacttcttttttagtagcaacacccgttcctgcacatccacacctaataattccagccccctcaccccagtttacacaagctagtggttcagaccaaagtgcaagttgaactgtgcatccaaacatttgtaccttgaggtacccttagattgcagcaggactaaaaagagcagtgttgctgtattcacagcatttgttcttgcctggcaagcaatcatccttgcattcataaggttgtcgttatcatggtcaacagatgtacctggaaaccatgaagttgcccctatggatggggcaagtgatccaagagtaacagttgctcttgcagtttcgctcagtttaaatcgcaagcgtgatggaaatgtagcttatgctggaatggagtccagcatatgtaagatggattaatccaatggagatcagccttcaggtgattgtgcatctgaaaattcgtgttggtgtgtggtccctagtcccagtcaccgtgcacagggtctgatgatcaagaagtgtgtcctgtcctgtacaagtctgcagtcatcaactcatcaccccgttgtctgcatgactagggcctgtttggtttggtgtctaacttgccacactttgcctaacttttctgtctaaggttagtttttcaattcgaaggactaaccttaggcaaagtgtggcagatttagccaccaaccaaacagcccctacattcatcagcggtcagcctttggaccaaactctggaagacctagctactctcttttcctgagagttaccagtaagtgtatccagttctgtatgcagtcatcatcgtgttgtttacaccactgggttgtagccagtgatgatatgatcattcgtctgtaccaaatttttattgttgcaactaaggtgtgatctagcgtgtagtgctctgtgtttggtggtttcaagtatagagcgcttctcttgtacttcaaaataaacccgtttacccatgatgatgctatatttagtagatttctcttctgattatgcttgtctctttaccaaagcatctctcggatagctatggcataaaaggcttgtacatgtttgaatgagcacacttatcaaacaatagaggttgtcttctttcatttgtttgatttgaaagtcgaggaagaaagtaagctcaccaatcattgacatttcaaactcattcgacatcaactcaacaaattacttgcaatgacaatcatttgtca

SEQ ID NO: 51253 - DNA, 1668 bp, Zea Mays
cttcgacactgggtctgccctttattattactactagttacatcatgcttattctctgagggcggccaagatcagctgggtcctatttgggtgtcccagttccaaaggccttctatttagggggttacagccaccaccgaccgtttccacttgggtactaccaaggatttcctgttccccagtacagttacccttcatatgggaccgaatacatctatccacagggtacattaaactcatattccggtcagcaatatcttcctatttatggagtctcagctgcagcgaacacatccaaccaagcatttagccagctgagtccatccgtttccggtggtggcaatggttatttgtcggttcatagttacaacgtgcctggaaatcaatatgtgcagctcactggatccaacttcagcggtgcatcaccaaccgctcgaccttccattcagacttcttttttagtagcaacacccgttcctgcacatccacacctaataattccagccccctcaccccagtttacacaagctagtggttcagaccaaagtgcaagttgaactgtgcatccaaacatttgtaccttgaggtacccttagattgcagcaggactaaaaagagcagtgttgctgtattcacagcatttgttcttgcctggcaagcaatcatccttgcattcataaggttgtcgttatcatggtcaacagatgtacctggaaaccatgaagttgcccctatggatggggcaagtgatccaagagtaacagttgctcttgcagtttcgctcagtttaaatcgcaagcgtgatggaaatgtagcttatgctggaatggagtccagcatatgtaagatggattaatccaatggagatcagccttcaggtgattgtgcatctgaaaattcgtgttggtgtgtggtccctagtcccagtcaccgtgcacagggtctgatgatcaagaagtgtgtcctgtcctgtacaagtctgcagtcatcaactcatcaccccgttgtctgcatgactagggcctgtttggtttggtgtctaacttgccacactttgcctaacttttctgtctaaggttagtttttcaattcgaaggactaaccttaggcaaagtgtggcagatttagccaccaaccaaacagcccctacattcatcagcggtcagcctttggaccaaactctggaagacctagctactctcttttcctgagagttaccagtaagtgtatccagttctgtatgcagtcatcatcgtgttgtttacaccactgggttgtagccagtgatgatatgatcattcgtctgtaccaaatttttattgttgcaactaaggtgtgatctagcgtgtagtgctctgtgtttggtggtttcaagtatagagcgcttctcttgtacttcaaaataaacccgtttacccatgatgatgctatatttagtagatttctcttctgattatgcttgtctctttaccaaagcatctctcggatagctatggcataaaaggcttgtacatgtttgaatgagcacacttatcaaacaatagaggttgtcttctttcatttgtttgatttgaaagtcgaggaagaaagtaagctcaccaatcattgacatttcaaactcattcgacatcaactcaacaaattacttgcaatgacaatcatttgtca

SEQ ID NO: 51254 - DNA, 3891 bp, Zea Mays
cgcagactcgtccatgtttctctgaaacgaaccaaacagacaccgtagatccgagcgctcctccgtcctcccgggccacggcgatcatcaccgccgctgcgccacccatatccacagcagagccgctcgccctatagcttcacctcggccgcgcgtggggcggccatggaggactacccggaggagctgcggacgccgccggtgtcgctagtgtccatcgtggggtgcccagagcttcacccctcgatctcgacggcactcagctcccagcagcctcccatgaacacactggccctcccggacttcgccaaggcctctattctggcccgcagcgttaagccccgcgaccctctcgcaccgccgcaaccccccgcgggaatcctcaagaaggactggctacttaagcaccgcacccgcgtcccggccgccgtcgccgcgctgttccgtgccgaccaggtctccggcgaccccgcccagtggctccaggcctgctccgatctcgaaaacctcaagtctgcaattcaggggaaaaacactaaatcagtggtggtccttgtgcaggctcaagctaatgatgagctgagtgaggatgtaattgttgccctgagaaaacgtgctgaaatcgattccaagcacttggttgtgctagttgagcacgatgaagcagaatggaacagatctctgaacaaattgaagaatgtctttgtggagttatgtgcagcattctataaagaggaagggcgaaggataaaggctcgcattgagaaaaagaactttgcttctgttgagctgagcatccggtactgtttcaaggttgctatttatgcggagttcagaagggattggccagaagcattgaagttctatgaggaaggtgttcgtgttttgcgtgagatgattggaacttcgacaaggttgcctccaacccaacgcctggttgagataaaagcagttgccgagcaatttcactttaagatatcaaccttgctacttcatgccgggaaagtggtagaagcaatcacatggttccgtaagcatatcaaaagctatgaacgggttgttggaacaccagaagttgcttttcttcactgggaatggtttagcaggcagttccttgtctttggtgagctgatcgaaacaacatccacaactattccagatacactatctcctcgatttggcactgcagacaacacattgactgagtgggaatttcagccagcatactactatcagttagcggcaacttacttgagggagaagaggtatgccatcgaatgctcgtcatcaatggctaaccttacaacagaagttaatggagtacctgagtcagtaatgccttctgtatatgttggccaatatgtgcgcttgtttgagcaaggagatacagttagtctactaccctatgctttgtcagaagctgaaaggtttcaagattcttatgagataatagcattgttcagaaaagcttatgaatcatttcagagcctaggtgctacaagaatggcttctgcctgtagcagtggaatggccatagaatattatgcagctgctgattttagcaacgcaaaacagctttttgatagtgttgctggtctataccgtcaagagggttggaccagtttgctctgggagaacctaggatacttgagagagtgctcaatgaaacttaattctcccaaggattttatcagctattccctagagatggctgcattaccattattttctggtagtggagaggaaaatcgagaaaacaaaattaagagtgggcctgcaggttcccctaccatttccaggagagagaatatacagcaggaagttattaatgttttggaaagaaaacagtcatcagaaggaacatatgatggatttaataatgcgatagaagaagttactcaccttgatattgatcagataagtccgctaagaatggtgcttactgcatctgttgcttttcatgatcaatctgtaaaacctggttcacctctgcttgtcagcgtgtcactcttatctcatcttccttctccagttgtggttgatcagttggaggttcagttcaatcaatctgactgtaactttgtgatgcatagtgcacaggaagactcactcccttcatattcaaatttgcatggccaagttattcaagatacttcttctcttactctcttcaccaatagatggatgcggttgacacatgaagtaaaatcaggaaagagtggaaagctagaatgtttgtctgtgaaggcgacaataagcaaacaccttgtgatttgctgccatgctgaaagccctgcttccatggaagacttcccattatggaaatttgagaaccaagtggagacactgcccacaaaggacaccactcttgccttctctggacagaaacttattcaagttgacgagccagatgctcaagttgaccttgtcttaaattctgctggccctgctttagttggagagttatttactttaccagtgatcatagagtcaaaaggacatgcagtccattctggtgaactgaaaattaacctcattgatgctagaggtggtggtctgttgttgagtccgagggaagcagaagattctgaaagtcatcatgttgaacttcttggtgtctcaactgtgtctgaggataaagagtcaaaggaagaggctgatagcataagaaagatccagtattcatttggggttgtatctgttcccacattgagtgtgggtgattcctggtcatgcaaattagaaatcaaatggcatcgagcaaaatcagtcatgctttatgtttcacttggttactccctaggctcaagtgaagaagaagcattgcaccggcttaacgtccatagaagcttgcaaattgaagggcagatccccttattagttagtcatcagtttttgagatcatttaggcgagaaccgttgttgctatcagggatcaggtccttaggaagtgatgataaaaaatgttctcttgctatgaatgagtctaacatgctaattgtgactgcaagaaactgcactgaagtgcctttgtgtttgcattcaatgaccattcaacctgatggtgattcagagcagctgtgttcagtgcaacagatcagtggaatttccaatcgtcatgcaattgttgctcctagggaggaatataaaggaatattttcggtcaatccacgggctatcagtacaaacttcagactaggtgaaatttgcctgaattggtcaagagattcaagcctcggtgaggatcaagataggcttattatcatgaaagtacagttacctgaggtcaacattgaggagccgccgcttgttgtgggcatggagtgccctccctatgcaatcctcggcatccctttcactatctatgtgaagattcacaattcaacgtctttgcttcaggaaatcaagtactcccttgttgattctcagaatttcgttttttctggtgctcacaatcatgctgctttcattctaccgaaatcagagcacactgttagtcataagtttgtaccgcttggttctggctctcagcagttgccaaggatcacagtaacttcagtgcggtattctgctgcattgactccttcagcctcagcagcgactgtctttgtgtatcccagtgagcctaaattcaacttggaaactagccattcaacatccgatgaggtcgtgagttgagacctaagcagcctgaagtctcccctctcctgacacttagctcgacccgggcttcatgtgaggaaaatgaactttatgagtaatgccatggcgtatctattctgaggcatgacgatggtcgtatctattgaggtatggcgatggtcttaggacatgtacagtagtactgtagatgattttaaggtgtttaaagggagcatttgtaaaaaaaaa

SEQ ID NO: 51255 - DNA, 3863 bp, Zea Mays
gtccatgtttctctgaaacgaaccaaacagacaccgtagatccgagcgctcctccgtcctcccgggccacggcgatcatcaccgccgctgcgccacccatatccacagcagagccgctcgccctatagcttcacctcggccgcgcgtggggcggccatggaggactacccggaggagctgcggacgccgccggtgtcgctagtgtccatcgtggggtgcccagagcttcacccctcgatctcgacggcactcagctcccagcagcctcccatgaacacactggccctcccggacttcgccaaggcctctattctggcccgcagcgttaagccccgcgaccctctcgcaccgccgcaaccccccgcgggaatcctcaagaaggactggctacttaagcaccgcacccgcgtcccggccgccgtcgccgcgctgttccgtgccgaccaggtctccggcgaccccgcccagtggctccaggcctgctccgatctcgaaaacctcaagtctgcaattcaggggaaaaacactaaatcagtggtggtccttgtgcaggctcaagctaatgatgagctgagtgaggatgtaattgttgccctgagaaaacgtgctgaaatcgattccaagcacttggttgtgctagttgagcacgatgaagcagaatggaacagatctctgaacaaattgaagaatgtctttgtggagttatgtgcagcattctataaagaggaagggcgaaggataaaggctcgcattgagaaaaagaactttgcttctgttgagctgagcatccggtactgtttcaaggttgctatttatgcggagttcagaagggattggccagaagcattgaagttctatgaggaaggtgttcgtgttttgcgtgagatgattggaacttcgacaaggttgcctccaacccaacgcctggttgagataaaagcagttgccgagcaatttcactttaagatatcaaccttgctacttcatgccgggaaagtggtagaagcaatcacatggttccgtaagcatatcaaaagctatgaacgggttgttggaacaccagaagttgcttttcttcactgggaatggtttagcaggcagttccttgtctttggtgagctgatcgaaacaacatccacaactattccagatacactatctcctcgatttggcactgcagacaacacattgactgagtgggaatttcagccagcatactactatcagttagcggcaacttacttgagggagaagaggtatgccatcgaatgctcgtcatcaatggctaaccttacaacagaagttaatggagtacctgagtcagtaatgccttctgtatatgttggccaatatgtgcgcttgtttgagcaaggagatacagttagtctactaccctatgctttgtcagaagctgaaaggtttcaagattcttatgagataatagcattgttcagaaaagcttatgaatcatttcagagcctaggtgctacaagaatggcttctgcctgtagcagtggaatggccatagaatattatgcagctgctgattttagcaacgcaaaacagctttttgatagtgttgctggtctataccgtcaagagggttggaccagtttgctctgggagaacctaggatacttgagagagtgctcaatgaaacttaattctcccaaggattttatcagctattccctagagatggctgcattaccattattttctggtagtggagaggaaaatcgagaaaacaaaattaagagtgggcctgcaggttcccctaccatttccaggagagagaatatacagcaggaagttattaatgttttggaaagaaaacagtcatcagaaggaacatatgatggatttaataatgcgatagaagaagttactcaccttgatattgatcagaggaagactcactcccttcatattcaaatttgcatggccaagttattcaagatacttcttctcttactctcttcaccaatagatggatgcggttgacacatgaagtaaaatcaggaaagagtggaaagctagaatgtttgtctgtgaaggcgacaataagcaaacaccttgtgatttgctgccatgctgaaagccctgcttccatggaagacttcccattatggaaatttgagaaccaagtggagacactgcccacaaaggacaccactcttgccttctctggacagaaacttattcaagttgacgagccagatgctcaagttgaccttgtcttaaattctgctggccctgctttagttggagagttatttactttaccagtgatcatagagtcaaaaggacatgcagtccattctggtgaactgaaaattaacctcattgatgctagaggtggtggtctgttgttgagtccgagggaagcagaagattctgaaagtcatcatgttgaacttcttggtgtctcaactgtgtctgaggataaagagtcaaaggaagaggctgatagcataagaaagatccagtattcatttggggttgtatctgttcccacattgagtgtgggtgattcctggtcatgcaaattagaaatcaaatggcatcgagcaaaatcagtcatgctttatgtttcacttggttactccctaggctcaagtgaagaagaagcattgcaccggcttaacgtccatagaagcttgcaaattgaagggcagatccccttattagttagtcatcagtttttgagatcatttaggcgagaaccgttgttgctatcagggatcaggtccttaggaagtgatgataaaaaatgttctcttgctatgaatgagtctaacatgctaattgtgactgcaagaaactgcactgaagtgcctttgtgtttgcattcaatgaccattcaacctgatggtgattcagagcagctgtgttcagtgcaacagatcagtggaatttccaatcgtcatgcaattgttgctcctagggaggaatataaaggaatattttcggtcaatccacgggctatcagtacaaacttcagactaggtgaaatttgcctgaattggtcaagagattcaagcctcggtgaggatcaagataggcttattatcatgaaagtacagttacctgaggtcaacattgaggagccgccgcttgttgtgggcatggagtgccctccctatgcaatcctcggcatccctttcactatctatgtgaagattcacaattcaacgtctttgcttcaggaaatcaagtactcccttgttgattctcagaatttcgttttttctggtgctcacaatcatgctgctttcattctaccgaaatcagagcacactgttagtcataagtttgtaccgcttggttctggctctcagcagttgccaaggatcacagtaacttcagtgcggtattctgctgcattgactccttcagcctcagcagcgactgtctttgtgtatcccagtgagcctaaattcaacttggaaactagccattcaacatccgatgaggtcgtgagttgagacctaagcagcctgaagtctcccctctcctgacacttagctcgacccgggcttcatgtgaggtaaggtatgctactggaaagaccaccagcttgacatttcatgttgattgttgaagaaacgaatcagattcctgtcggcgagaaggtcgctgtgcaaaagttttggcattatatttcgaggtttcgattttgtagcgcttctcgattaaccacatatgtgtaacttatgattacttcattgtttttggttcaatggtgcaacatacacaggaagataggctcttgtaaattaccatcccaccagtaaagtgggggaacaaaccagccccatgtcagtttttactctttgatgcttgccaactcgtcaatttgt

SEQ ID NO: 51256 - DNA, 1552 bp, Zea Mays
tcttccaaaaatcaagcaaagaaaatattcgcagtgttgcgcacttcgcgtctcgataaagccgaccgcccgacccccaactgttccgtcaaagcagagtctgcccctccccgcgccgttctttttggttccccactccccagtccccgccgccgccgaaacccgcagatggaggtcgtcgtcgccgcgaagcagaaggcgaagaaacacatacacctcttctactgctcagaatgcgaggagctcgccctcaagatcgccgccagctccgacgccatcgagctccaatccatcaactggcggagcttcgacgacgggttcccgaacctgttcatcaacaaggcgcacgacatccgtgggcagcacgtggcgttcctggcctccttcagctcgccgtcggtcatattcgagcagatctccgtcatcttcgcgctgcccaagctattcattgcctcattcactctcgtgctgcctttcttccccacgggctcattcgagcgcgttgaggaggagggcgatgtcgccaccgcgttcaccctcgcgcgcattctctcgatgatccccaagtcgcgcggcgggcctaccagcgtcgtcatctacgacatccacgcgctccaggagaggttctacttcggggacgacgtcctgccatgcttcgagacagggatcccgctcctgctgcagcgcctccgccagctcccggacgcagaaaatatcaccattgcctttccagatgacggtgcgtggaagcggttccacaagctgttacagcactttccaatgatagtctgtaacaaggttcgggaaggtgacaagagaatagttcgtataaaggaaggactacctgaaggccgtcatgttgttattgttgatgatttagtgcaatctgggggaactcttagagaatgccagaaagttctagctttgcatggcgctgcaaaagtcagtgcttatgtgactcatgctgtgtttcctaagcagtcatatgaacgtttcatggcgtctagttctgctggggccaggtgacagatttgcttacttctggatcacggactcatgcccacacacagtaaaagctattgggcaaagacctccatttgaggttctgagcctcgctggctcaattgcagatgctcttcagatatgagcgtacactggtggaatgctcccgcttttcctaaatgtaagagttggtttccagttcctggaaaagcaaataatgtgtagtaagttaagtacctgaaggttccataaacagccctgtggtttgtaataaaatcaggcattggatactcaattgttgacagctgtgtatttgtcaatgttcacttctgtttgaagtgcgcgagaccagtgctttactttcctgacccgtcggagtatcggtttagcaacttcaggtactgggctttgttgtgaacaaatagtgcaatgtaactgaacatgaacctaattgaatttctattagattggatggtcatattgcaaccatgacatgttggcctccttgaattttactgttacatggatgcatcgagcaaattggtttgtg

SEQ ID NO: 51257 - DNA, 1542 bp, Zea Mays
tcttccaaaaatcaagcaaagaaaatattcgcagtgttgcgcacttcgcgtctcgataaagccgaccgcccgacccccaactgttccgtcaaagcagagtctgcccctccccgcgccgttctttttggttccccactccccagtccccgccgccgccgaaacccgcagatggaggtcgtcgtcgccgcgaagcagaaggcgaagaaacacatacacctcttctactgctcagaatgcgaggagctcgccctcaagatcgccgccagctccgacgccatcgagctccaatccatcaactggcggagcttcgacgacgggttcccgaacctgttcatcaacaaggcgcacgacatccgtgggcagcacgtggcgttcctggcctccttcagctcgccgtcggtcatattcgagcagatctccgtcatcttcgcgctgcccaagctattcattgcctcattcactctcgtgctgcctttcttccccacgggctcattcgagcgcgttgaggaggagggcgatgtcgccaccgcgttcaccctcgcgcgcattctctcgatgatccccaagtcgcgcggcgggcctaccagcgtcgtcatctacgacatccacgcgctccaggagaggttctacttcggggacgacgtcctgccatgcttcgagacagggatcccgctcctgctgcagcgcctccgccagctcccggacgcagaaaatatcaccattgcctttccagatgacggtgcgtggaagcggttccacaagctgttacagcactttccaatgatagtctgtaacaaggttcgggaaggtgacaagagaatagttcgtataaaggaaggactacctgaaggccgtcatgttgttattgttgatgatttagtgcaatctgggggaactcttagagaatgccagaaagttctagctttgcatggcgctgcaaaagtcagtgcttatgtgactcatgctgtgtttcctaagcagtcatatgaacgtttcatggcgtctagttctggtgacagatttgcttacttctggatcacggactcatgcccacacacagtaaaagctattgggcaaagacctccatttgaggttctgagcctcgctggctcaattgcagatgctcttcagatatgagcgtacactggtggaatgctcccgcttttcctaaatgtaagagttggtttccagttcctggaaaagcaaataatgtgtagtaagttaagtacctgaaggttccataaacagccctgtggtttgtaataaaatcaggcattggatactcaattgttgacagctgtgtatttgtcaatgttcacttctgtttgaagtgcgcgagaccagtgctttactttcctgacccgtcggagtatcggtttagcaacttcaggtactgggctttgttgtgaacaaatagtgcaatgtaactgaacatgaacctaattgaatttctattagattggatggtcatattgcaaccatgacatgttggcctccttgaattttactgttacatggatgcatcgagcaaattggtttgtg

SEQ ID NO: 51258 - DNA, 1045 bp, Zea Mays
aaatagcagcaggcatttgacatggaacccaaactcgcggtcgcggtgttcgtcctgttcctagcgtttgcagcctgttccgcgaaccaccaccgagacccctctgtcgtcggatactcccaggaagacctcgcactgcccagcagcctcttcagatcctggtccgtgaagcacggcaagctctacgccagcccgacggagaagctggagaggtacgagatattcaagcagaacctgatgcacatcgcggaaacgaacaggaagaacgggagctactggctgggcctgaaccagttcgccgacgtcgcccacgaggagttcaaggccagttatctgggactgaagcgagcactgccaagagcgggcgcgccacagacacgcaccccgacagcgttcaggtacgcggccgcagccgcaggcagcttgccctggtcagtcgactggaggtacaagggagccgtgacgccggtcaagaaccagggaaaatgcgggagctgctgggccttctcgtcggtggcagcagtcgaagggatcaaccagatcgtgacgggcaagctggtgtcgctctcggagcaggagctggtggactgcgacaccacgctggatcacggctgcgaaggggggaccatggacttggcgttcgcttacatgatggggagccaggggatccacgccgaggacgactacccgtacctcatggaagaaggctactgcaaagagaaacagcgagatcagcctgctgaaagcgctggcccatcagcctgtcagcgtcggcatagctgcagggagcagggacttccagttctacagagggggggtgtttgacggggcctgcagcgtcgagctcgaccatgcgctgacggccgtcgggtacggctcatcgtacggccagaactacatcaccatgaagaactcgtggggcaagaactggggggagcaaggctacgtcaggataaagatgggcaccgggaagccggagggtgtctgcggaatctataccatggcctcctatcccgtgaaaaatgcaacacgctggggtgcttaa

SEQ ID NO: 51259 - DNA, 1128 bp, Zea Mays
aaatagcagcaggcatttgacatggaacccaaactcgcggtcgcggtgttcgtcctgttcctagcgtttgcagcctgttccgcgaaccaccaccgagacccctctgtcgtcggatactcccaggaagacctcgcactgcccagcagcctcttcagatcctggtccgtgaagcacggcaagctctacgccagcccgacggagaagctggagaggtacgagatattcaagcagaacctgatgcacatcgcggaaacgaacaggaagaacgggagctactggctgggcctgaaccagttcgccgacgtcgcccacgaggagttcaaggccagttatctgggactgaagcgagcactgccaagagcgggcgcgccacagacacgcaccccgacagcgttcaggtacgcggccgcagccgcaggcagcttgccctggtcagtcgactggaggtacaagggagccgtgacgccggtcaagaaccagggaaaatgcgggagctgctgggccttctcgtcggtggcagcagtcgaagggatcaaccagatcgtgacgggcaagctggtgtcgctctcggagcaggagctggtggactgcgacaccacgctggatcacggctgcgaaggggggaccatggacttggcgttcgcttacatgatggggagccaggggatccacgccgaggacgactacccgtacctcatggaagaaggctactgcaaagagaaacagccatgtgtattgggaataaccgaacaagacctaactggattcgaggatgtcccggagaacagcgagatcagcctgctgaaagcgctggcccatcagcctgtcagcgtcggcatagctgcagggagcagggacttccagttctacagagggggggtgtttgacggggcctgcagcgtcgagctcgaccatgcgctgacggccgtcgggtacggctcatcgtacggccagaactacatcaccatgaagaactcgtggggcaagaactggggggagcaaggctacgtcaggataaagatgggcaccgggaagccggagggtgtctgcggaatctataccatggcctcctatcccgtgaaaaatgcaacacgctggggtgttaatcaagtattgctaacgaaggat

SEQ ID NO: 51260 - DNA, 1969 bp, Zea Mays
cgtccacttcacaaatttgcagtagagagtccagtccagactccatcgagttggtctttggtcgtgcatcgtgctgaactgctgacgcttcgcgcgggtccgaggtcaggcagcagcagcacggagtagcaccagggcgaccgcccaggttatcgtcggccgccggcgacctgtaccccggcgaggagatgcatctgagcgcgaacgaggggatcgagggtctgcgattcgcggtgacgggcgggcagggcttcgtcggagctgccctcagcctcgagctgctccgccgcggtgcccgcgaggtccggtccctcgatctccgcgcctcctcctcctggtcccagcagctcctcgacgccggcgtccgaatcatccaaggggacataagaaagaaggatgatgtgcggagggctttccgtggagtggactgtgttttccaccttgcttcttatggcatgtcagggaaggagatggtgcagactgcgagatctgatgaggttaatataaatgggacctgcaatgtactggacgcttgccatgagcaaggtgtcagaaggcttgtgtatgtaagcacatacaatgtggtatttggaggaaagccgattgtcaacggaaatgaggcgttgccttattttccgattgaagaccatgttgatgcttatgggcgcagcaaatcagttgctgaacagctggtactgaagagtaacgggcggccagctaatgataaaagtagtcgtctttatacatgtgcaattcgccctgctgctatatatggaccaggtgaagagcgtcattttccaagaatcctgtcccttgcaaagttgggattagctttcttcaaaattggggacccaggtgtcaagacagattgggtttatatagataatctagttcttgctctgatattggcaagcatgggacttttagatgacattcctgacaggaagggaactcctgtagcagctggtcaggcgtatttcatatgcgatggatcaccatgcaatacttttgaatttatcatcaagcccctttttcaaagtttgggttattccgttcctcaagtggtgctggatacctccgttgcccttgccgtttcaagaatatttttattcatatctacactgttctacccatggcttgatagtaaatggatgcctcagcctctaattctccccgctgaagtttacaaggttggtgtcacacactacttttcgttcttgaaagctagagaggagctcggctacgtgcccattgtgaggccccacgaaggcttggccgcaacgatctcgtactggcaagagcggaagagaatggagctggatggcccgaccatatttacttggctggccgtaacgatcgggatgctggccgtgttttctgccgcctgcctcccgccagtcggcccgttgaaatgggtgctcgacgtccacatgtttgttttccgctcgatgctcgtgatccggctggtcttggcggtagcgatcgcactgcatgctggcgaagccgtgtacgcctggttcttggcgagaagggttgacccgaggaacgctgccgggtggttctggcagaccttcgctctggggtacttctccctccggtaccttctcaagagaggcagagcgtgaattcgtgtttggttcacatgtacgtacactgcggatcctgtaacagtggttccaacttccaagcttcatgcttggtttttattgaggaggaggcgtcaggcgtatgagcaatccccagatcgtatccctcctgacatctgcctgtggtcggatcggatgtactttgtggtgatactgtgaactggtgaaagtttaacaggtcgctttcttggatgagctgtaatgtaactagccattgttagatccaaatgcaactgatgctccagcagaaatttggtggctgtcgcacatctaacgccgtatacgaaccgtatgatattattgatattgatacgtcgaagctg

SEQ ID NO: 51261 - DNA, 1738 bp, Zea Mays
cgtccacttcacaaatttgcagtagagagtccagtccagactccatcgagttggtctttggtcgtgcatcgtgctgaactgctgacgcttcgcgcgggtccgaggtcaggcagcagcagcacggagtagcaccagggcgaccgcccaggttatcgtcggccgccggcgacctgtaccccggcgaggagatgcatctgagcgcgaacgaggggatcgagggtctgcgattcgcggtgacgggcgggcagggcttcgtcggagctgccctcagcctcgagctgctccgccgcggtgcccgcgaggtccggtccctcgatctccgcgcctcctcctcctggtcccagcagctcctcgacgccggcgtccgaatcatccaaggggacataagaaagaaggatgatgtgcggagggctttccgtggagtggactgtgttttccaccttgcttcttatggcatgtcagggaaggagatggtgcagactgcgagatctgatgaggttaatataaatgggacctgcaatgtactggacgcttgccatgagcaaggtgtcagaaggcttgtgtatgtaagcacatacaatgtggtatttggaggaaagccgattgtcaacggaaatgaggcgttgccttattttccgattgaagaccatgttgatgcttatgggcgcagcaaatcagttgctgaacagctggtactgaagagtaacgggcggccagctaagagtgataaaagtagtcgtctttatacatgtgcaattcgccctgctgctatatatggaccaggtgaagagcgtcattttccaagaatcctgtcccttgcaaagttgggattagctttcttcaaaattggggacccaggtgtcaagacagattgggtttatatagataatctagttcttgctctgatattggcaagcatgggacttttagatgacattcctgacaggaagggaactcctgtagcagctggtcaggcgtatttcatatgcgatgctagagaggagctcggctacgtgcccattgtgaggccccacgaaggcttggccgcaacgatctcgtactggcaagagcggaagagaatggagctggatggcccgaccatatttacttggctggccgtaacgatcgggatgctggccgtgttttctgccgcctgcctcccgccagtcggcccgttgaaatgggtgctcgacgtccacatgtttgttttccgctcgatgctcgtgatccggctggtcttggcggtagcgatcgcactgcatgctggcgaagccgtgtacgcctggttcttggcgagaagggttgacccgaggaacgctgccgggtggttctggcagaccttcgctctggggtacttctccctccggtaccttctcaagagaggcagagcgtgaattcgtgtttggttcacatgtacgtacactgcggatcctgtaacagtggttccaacttccaagcttcatgcttggtttttattgaggaggaggcgtcaggcgtatgagcaatccccagatcgtatccctcctgacatctgcctgtggtcggatcggatgtactttgtggtgatactgtgaactggtgaaagtttaacaggtcgctttcttggatgagctgtaatgtaactagccattgttagatccaaatgcaactgatgctccagcagaaatttggtggctgtcgcacatctaacgccgtatacgaaccgtatgatattattgatattgatacgtcgaagctg

SEQ ID NO: 51262 - DNA, 1827 bp, Zea Mays
cctcacgcgccgcgtgcataagtgccaggcgtgccacagcacagcacaccacagaccacaccaccactacagccaccgttcgcgttcgcggagggagccttcggtttcgagcagcgtccttcgtggcccagccgggagagatggtgcggaggagaaacacggtagccgcgggcgtggtcccggcgtccgccgaccccgacaccatctccgactccggctcatctacgtccgcgccgccgccgcagccggggaggaagcagacttactccgccttgcaggttgcccgtgctggagcgccggccaccccgactcttgaagacgcgcagcctgtcgccgtcgagatgacgatcaacaactacctgcgcacctacggcaggatcccgatggcatgctgttgctcggaaggccaaggcccccacctggacctcaacgccctggcgccgccccaacgcgacccacctgtgatctgtgcctactgcaactgcgcattctgcttcggcgtgcacgagatcccttcgctagaccatggcccggggcatgtctacccggcgccgctcgtacccgtcaccctaaaccttctcacgccgccgccggtggggccgctgtaccgcgaccgccggggccccgcggccgcgccggcgccgctgctcgtctgctccagcgagcaacacttcaacgccactatcggcatgctgcagcggcggcagggcagcgcgccgccgctggtgtggaagtgtacttgctgtcttcgtgtgcagcccgtcgccgtgggcagcgaaggcgccaactcgccagatctgcatgctactcctccggcgcctcctcctgagccgtggacatacgctggcgcttactggaactatgtggagcccggggacgaggacatggtccgactccacttacattatgatcctctgaaactaagtcttgggcgccggtgaacgcagctagcgcggccgcggggtcgtgccggtcggagtcgtccttgatcggccggccggcagcggcaggtagagcggcgtttccttcgagaaagcatgcatggaataaaaatcatccgcgctacggcgctagccctatctatccagtcctatagcggtcatgttagtccagtgatgagtcgtgaatggagtcaacttctccatgaccttttgtcactaacagatgggtttggttttcatcaggcccatttgttaatgagaaagtctcatgaaactggctgcagagaaattgatcctgttagcctctgcagtcgccaacatctcagcttccattttttttgtgttcttcgttctctaatgtgtcgtctatatggagtcgacttcacggtggtttttttgtcactaacagatgggtctgatgttcatcaacccacttgcctgcagtgacaaagcggccctgtaaaagccgatagtagaggaatcgatcaggttagtctctgctgtctccagcatctttagttgatgtatgtttttggatttctctctaatgtgtgttatggactgtgagagagctgttatacagcaacaatgaatctatatgtcaacaatctctcacttattaggtttatttgtcaagtattgggcatgtttgatagagccttttctgctcctgattctatgtgcaaagtggttatctgagagaaatgttttttttctataataatgtaagaagtgatctattttgtgtgcggatagtgaattaggagtagctatttttttccagtttttatccttctattttattttaagtattcactttgcagaattttagcatagagttttttttctttatactgtttgacaacgctcctcctgaatttaaact

SEQ ID NO: 51263 - DNA, 250 bp, Zea Mays
tgccgagagcaaaacactggtcctcccagactggcaggtgactggcacagagagcaccagcttcccatccacaaagataaggattgggcttggagccttggaccacaacgttgcaaactggcactgcagccaaccagaggtgtggatgatttgcagggaatgaaccgggggcaaccttggccagctagcaaagacccagaaacgagcaacgcgacacgagaatcgtgcgtgatccgactcggaaaaccac

SEQ ID NO: 51264 - DNA, 1344 bp, Zea Mays
aagccttcgtctctgtgcccaaatgatctctcttcccgtctaaaagactgacgactaacgattagataggttgacggagactttggggcgagtaccgtctcctcctcctggttcctgctcccattcctatggtagcgtcctctcagctctgcgagcggcggcggctagaacttcttgttgtaccagaagacgcccttgcggtcctcgggctcgacgtagatgcactccctggcctcgcgccaggtcgccttggcaacaggggtcgggtcgaagtggtagtagtccccgaggatgggcctgatcgccttggtggcctccatggcgtggtagtgcggcatggtggagaagaggtggtgcgcgacgtgcgtgtccgtgatgttgtggaacacgcggttgaggatgccgtagtcgcggtccatggtggccagcgcgccgcgcagccagtcccactcgctcgagtcgtagtgggggagcgacgggtgggtgtgctgcaggtaggtgatgagcaccagccacgcgttcacgatcagcagcggcacggcgtacacgcgcaccacccaccagaccccgaacgccgccgccagcttgtacagcccgaacgccacggccacgacgccggcgtccgagacgaagatctgggcgcgctcccggtcgttgtagatggggccgtaggggtcgaagtggcaggcgaagcgcgggtacggccgccccgacgcgttggtcgccaggtacagcggccacccgagggtgagctgcaccacgatgtgcaccacccggccgaccggggttgttgtacacgtacggggtgtaccacggcagcgcctccttcttcttgggcacgaacacctcgtcgcgctccagggaccccgtgttggagtggtggcgccggtggctgtacttccacgagaagtagggcaccatgagcgacgagtgcagcaccaggccgaccacgtcgtccaggagcgagtagtccgagaaggcgtggtggccgcactcgtgcgcgatgacccacacgccggtgcacacgcacccctgcgcgatccagtacagcggccaggcggcgtagcggagcgggcttgggagcgccggtatgatggccagcgcgaagtagaggagcgccgcggcgatcaccaggtcgtggaccacgtacgagaaggacttgagcaccgagcgctcgaagcagtgtggcgggatggccttcttgatctgacccagagtgaacggaggcttctccaccggcgaccgctgcatcgcggcgccaccggtagctcgggcgagctgctcctgcttctcccgctccttctcggtcatcctgccgccggcacccatcttgctcctgactga

SEQ ID NO: 51265 - DNA, 985 bp, Zea Mays
gaccagacccgaacaaagcagagcagcggacagatcaaatcaggacaggcatgctgaactaggcgaggtggactgggcgagcgagcgagatggagtggacgacggtggagacgagggacggcgcgaagctgagcgtgcggctgttcaagccccccgcgtccggaacggggttggagccggagccgagggaggatgtggcggtggtgctggtgcatccctacaccatcctcggcggcgtgcagggcctgctgcgggggatggcggagggcgtcgcgcggcggggttacaccgccgtcaccttcgacatgcgcggcgcgggccggtccacggggcgggcgtcgctcacgggctccaccgaagtcggggacgtcgtcgccgtctgccgatgggtcgcagagaacatcaagccgcgcggcatcctcctcgtcggatcctcagctgttgataaagtggatgaagtgattggttacgttagcatcgggtacccctttggtctgatggcctcagtcctattcggaaggcataatgatgctatactcaagtctgaaaaaccaaagcttttcatcatggggaccaaagatggcttcaccagtgtgaaacaactgcaaaacaagctcaaatctgcagctggacgggctgatacacacttgattgaaggagctgggcacttccaaatggagggccctgcttttgatgcccagatggtagaaattattattaaattcattaattccttgccaaaatagcatttatggtgactgtttgagagtttgcaaaaattctagcgatgagcaaagcttgttatttaaatacagccacgatggtttgtattttctcatcctgcatatgtgtgctctctggtgttattgaaacagtgtaactgtgtgtgttgtatcttaatatattctgatcccgcacctccccaaaaaacaaagccgatacaatctcaagttcaaaatattctggttttattccagatatttca

SEQ ID NO: 51266 - DNA, 2238 bp, Zea Mays
ccagcactagtcctgtactcccgtgcgctagtgcgctcggcgctgcccccgtccgcccgcagtccgtccccgctcgccgcccatgcgctcgccggccgcccctcggcgctcccccatctcctcccgctccgcccccgccctccgtctggtagtccgtcgccgctcctcccgcacgccagcacgacctagtagacggctcgaagcgaagacggtcccatttccagtctccgtgagatggatttagaggtatccgagggttcaggtactaatgccacctcggatgaccaatcggtgcaaacgctgcctagaagggcaaagcttttggagtattttcaaccggagttagttgaggtcaatggcgtgatgaaggctatttgcaaatattgcggggcgatgttgaggagttcaagcacaaatagccttagaaaccacgttgcggatacatgtcctaaaatttcagttgaggaccgcaagcaattcattgctacaatggaaaaaggaccagcggaagcttcatttgtgtttgactctcaaaaggctcgtgagtgtatggttaagtggtgcatcagtgccgaggtcgcattcaacaagtttgacgatcctttctttgctcagtggatggagtcaatgcagccatcattcagcggtgttgggcgtcaaacaatgcaaaatgattgtattaccagattcaagatgatgaggcaagagctaagaaatgagctacaaagtcttaactctcggatttgcttgacaactaatctttggacctcaaatcagaagttgggttatctttgcttgacagcccactacattaatgcagactttatcttgaaaaaaaagattattgcgttcaaatatttgaaatatccacatacaggcctagcaatcaaagaaggaattacagagtgtctcaaagagtgggggataaaagagaagatgtttactatcacattagataatgtttctaacaatctgtcagtgcgtgaccttcgagaaagtgggctatttggaggcgatcttcgtattgtccaatgttgtgcacacatattgattctcttagttcaagatggaatggcaattgctcatggagcaatctataagattcgtgagctggtcagacatatcaattcctcaccctcccgcatacaagcttttaatgggattgctgagaggtctggattgccttcaaaggatagattaattcttgacgttccaaaccgttggaattcgacacacgacatgattatggaggccattgagtacaaggttgtcttgaaaagatatgctgaagaacaacttgagccttcaccaaatgatgaagagtggacaaattctgaggcaattggagagtttcttgaggcatttgagaaagctacaaaagcattctcgacacatagaagtccaacatctcatttgtttttacataatgtgctatgtatccatcgaactctgagaaatacaaattggcaaatcaattgtgtgcttaaggattcggcacgggcgatggatgctaagttcgataaatactgggagaagggcaagtataacatgacacttgtcttagccaccatacttgatccatcaaagaagatggattttttggacttcttttatgagaagatgtctcaatattttgttgacatccagataaacgtggtcttggttaaacaatgtctcaccaaattatttgaaaaatatgcaacacttgttcaaatagataataaaagttcaccttttattgatataaggactagtaatttaggctcaacagttcttggaaaaagaaggttggatgaagaattttctcaatggtcccaaataagaggaagacgttttccaaagtctgagcttgacacatacttagaggaagaacttgtgagaatagatgaaagatttgaaattctaaattggtggaggacaaatgcaaacaaatacccggtgctttcagctatggcgcgtgatattttagcaatacctttgagcactgttccttcggagtttgcgttcagcgctggtggtcgtattcttgatgataatcgaagcacaatgacaccagaaacacttgaatgctttgtatgctgtaaggattggttatatgaatacccaaatattcaagcttagttgatctgacttccttcaaacatgttgaacagtacggcattcaaggaaactgcttccttcggatcctttctcaagtgtgcctgctccaaaagcgacagtccgctgtccacaattgat

SEQ ID NO: 51267 - DNA, 2208 bp, Zea Mays
ccagcactagtcctgtactcccgtgcgctagtgcgctcggcgctgcccccgtccgcccgcagtccgtccccgctcgccgcccatgcgctcgccggccgcccctcggcgctcccccatctcctcccgctccgcccccgccctccgtctggtagtccgtcgccgctcctcccgcacgccagcacgacctagtagacggctcgaagcgaagacggtcccatttccagtctccgtgagatggatttagaggtatccgagggttcaggtactaatgccacctcggatgaccaatcggtgcaaacgctgcctagaagggcaaagcttttggagtattttcaaccggagttagttgaggtcaatggcgtgatgaaggctatttgcaaatattgcggggcgatgttgaggagttcaagcacaaatagccttagaaaccacgttgcggatacatgtcctaaaatttcagttgaggaccgcaagcaattcattgctacaatggaaaaaggaccagcggaagcttcatttgtgtttgactctcaaaaggctcgtgagtgtatggttaagtggtgcatcagtgccgaggtcgcattcaacaagtttgacgatcctttctttgctcagtggatggagtcaatgcagccatcattcagcggtgttgggcgtcaaacaatgcaaaatgattgtattaccagattcaagatgatgaggcaagagctaagaaatgagctacaaagtcttaactctcggatttgcttgacaactaatctttggacctcaaatcagaagttgggttatctttgcttgacagcccactacattaatgcagactttatcttgaaaaaaaagattattgcgttcaaatatttgaaatatccacatacaggcctagcaatcaaagaaggaattacagagtgtctcaaagagtgggggataaaagagaagatgtttactatcacattagataatgtttctaacaatctgtcagtgcgtgaccttcgagaaagtgggctatttggaggcgatcttcgtattgtccaatgttgtgcacacatattgattctcttagttcaagatggaatggcaattgctcatggagcaatctataagattcgtgagctggtcagacatatcaattcctcaccctcccgcatacaagcttttaatgggattgctgagaggtctggattgccttcaaaggatagattaattcttgacgttccaaaccgttggaattcgacacacgacatgattatggaggccattgagtacaaggttgtcttgaaaagatatgctgaagaacaacttgagccttcaccaaatgatgaagagtggacaaattctgaggcaattggagagtttcttgaggcatttgagaaagctacaaaagcattctcgacacatagaagtccaacatctcatttgtttttacataatgtgctatgtatccatcgaactctgagaaatacaaattggcaaatcaattgtgtgcttaaggattcggcacgggcgatggatgctaagttcgataaatactgggagaagggcaagtataacatgacacttgtcttagccaccatacttgatccatcaaagaagatggattttttggacttcttttatgagaagatgtctcaatattttgttgacatccagataaacgtggtcttggttaaacaatgtctcaccaaattatttgaaaaatatgcaacacttgttcaaatagataataaaagttcaccttttattgatataaggactagtaatttaggctcaacagttcttggaaaaagaaggttggatgaagaattttctcaatggtcccaaataagaggaagacgttttccaaagtctgagcttgacacatacttagaggaagaacttgtgagaatagatgaaagatttgaaattctaaattggtggaggacaaatgcaaacaaatacccggtgctttcagctatggcgcgtgatattttagcaatacctttgagcactgttccttcggagtttgcgttcagcgctggtggtcgtattcttgatgataatcgaagcacaatgacaccagaaacacttgaatgctttgtatgctgtaaggattggttatatgaatacccaaatattcaagcttagttgatctgacttccttcaaacatgttgaacagtacggcattcaaggttcatgtgatgatccataattatggattgatgtgttgacag

SEQ ID NO: 51268 - DNA, 2486 bp, Zea Mays
ccagcactagtcctgtactcccgtgcgctagtgcgctcggcgctgcccccgtccgcccgcagtccgtccccgctcgccgcccatgcgctcgccggccgcccctcggcgctcccccatctcctcccgctccgcccccgccctccgtctggtagtccgtcgccgctcctcccgcacgccagcacgacctagtagacggctcgaagcgaagacggtcccatttccagtctccgtgagatggatttagaggtatccgagggttcaggtactaatgccacctcggatgaccaatcggtgcaaacgctgcctagaagggcaaagcttttggagtattttcaaccggagttagttgaggtcaatggcgtgatgaaggctatttgcaaatattgcggggcgatgttgaggagttcaagcacaaatagccttagaaaccacgttgcggatacatgtcctaaaatttcagttgaggaccgcaagcaattcattgctacaatggaaaaaggaccagcggaagcttcatttgtgtttgactctcaaaaggctcgtgagtgtatggttaagtggtgcatcagtgccgaggtcgcattcaacaagtttgacgatcctttctttgctcagtggatggagtcaatgcagccatcattcagcggtgttgggcgtcaaacaatgcaaaatgattgtattaccagattcaagatgatgaggcaagagctaagaaatgagctacaaagtcttaactctcggatttgcttgacaactaatctttggacctcaaatcagaagttgggttatctttgcttgacagcccactacattaatgcagactttatcttgaaaaaaaagattattgcgttcaaatatttgaaatatccacatacaggcctagcaatcaaagaaggaattacagagtgtctcaaagagtgggggataaaagagaagatgtttactatcacattagataatgtttctaacaatctgtcagtgcgtgaccttcgagaaagtgggctatttggaggcgatcttcgtattgtccaatgttgtgcacacatattgattctcttagttcaagatggaatggcaattgctcatggagcaatctataagattcgtgagctggtcagacatatcaattcctcaccctcccgcatacaagcttttaatgggattgctgagaggtctggattgccttcaaaggatagattaattcttgacgttccaaaccgttggaattcgacacacgacatgattatggaggccattgagtacaaggttgtcttgaaaagatatgctgaagaacaacttgagccttcaccaaatgatgaagagtggacaaattctgaggcaattggagagtttcttgaggcatttgagaaagctacaaaagcattctcgacacatagaagtccaacatctcatttgtttttacataatgtgctatgtatccatcgaactctgagaaatacaaattggcaaatcaattgtgtgcttaaggattcggcacgggcgatggatgctaagttcgataaatactgggagaagggcaagtataacatgacacttgtcttagccaccatacttgatccatcaaagaagatggattttttggacttcttttatgagaagatgtctcaatattttgttgacatccagataaacgtggtcttggttaaacaatgtctcaccaaattatttgaaaaatatgcaacacttgttcaaatagataataaaagttcaccttttattgatataaggactagtaatttaggctcaacagttcttggaaaaagaaggttggatgaagaattttctcaatggtcccaaataagaggaagacgttttccaaagtctgagcttgacacatacttagaggaagaacttgtgagaatagatgaaagatttgaaattctaaattggtggaggacaaatgcaaacaaatacccggtgctttcagctatggcgcgtgatattttagcaatacctttgagcactgttccttcggagtttgcgttcagcgctggtggtcgtattcttgatgataatcgaagcacaatgacaccagaaacacttgaatgctttgtatgctcttagttgatctgacttccttcaaacatgttgaacagtacggcattcaagggagatttatgcatcattctgcgggctcctgtagctgcttagggatgacccttccactgctgctcgcttcaagcttgatcagatactctttctactgatacgcaaggtgtaaaactgccgtgttatgtggtagattggtgtgtgtactgttttctttatgtgtaaaactgtctgcttgatcaggggtgagtattgttttctttatcactctggattcatggtaatgagttcctatttcagtatttcttgccaaaaagattgttgtgcattaaggatatttgacagatgttctttgttatttctctcaagacctgaaagtttatcaaccaaatctgccactgtatgcagttctctgt

SEQ ID NO: 51269 - DNA, 2581 bp, Zea Mays
ccagcactagtcctgtactcccgtgcgctagtgcgctcggcgctgcccccgtccgcccgcagtccgtccccgctcgccgcccatgcgctcgccggccgcccctcggcgctcccccatctcctcccgctccgcccccgccctccgtctggtagtccgtcgccgctcctcccgcacgccagcacgacctagtagacggctcgaagcgaagacggtcccatttccagtctccgtgagatggatttagaggtatccgagggttcaggtactaatgccacctcggatgaccaatcggtgcaaacgctgcctagaagggcaaagcttttggagtattttcaaccggagttagttgaggtcaatggcgtgatgaaggctatttgcaaatattgcggggcgatgttgaggagttcaagcacaaatagccttagaaaccacgttgcggatacatgtcctaaaatttcagttgaggaccgcaagcaattcattgctacaatggaaaaaggaccagcggaagcttcatttgtgtttgactctcaaaaggctcgtgagtgtatggttaagtggtgcatcagtgccgaggtcgcattcaacaagtttgacgatcctttctttgctcagtggatggagtcaatgcagccatcattcagcggtgttgggcgtcaaacaatgcaaaatgattgtattaccagattcaagatgatgaggcaagagctaagaaatgagctacaaagtcttaactctcggatttgcttgacaactaatctttggacctcaaatcagaagttgggttatctttgcttgacagcccactacattaatgcagactttatcttgaaaaaaaagattattgcgttcaaatatttgaaatatccacatacaggcctagcaatcaaagaaggaattacagagtgtctcaaagagtgggggataaaagagaagatgtttactatcacattagataatgtttctaacaatctgtcagtgcgtgaccttcgagaaagtgggctatttggaggcgatcttcgtattgtccaatgttgtgcacacatattgattctcttagttcaagatggaatggcaattgctcatggagcaatctataagattcgtgagctggtcagacatatcaattcctcaccctcccgcatacaagcttttaatgggattgctgagaggtctggattgccttcaaaggatagattaattcttgacgttccaaaccgttggaattcgacacacgacatgattatggaggccattgagtacaaggttgtcttgaaaagatatgctgaagaacaacttgagccttcaccaaatgatgaagagtggacaaattctgaggcaattggagagtttcttgaggcatttgagaaagctacaaaagcattctcgacacatagaagtccaacatctcatttgtttttacataatgtgctatgtatccatcgaactctgagaaatacaaattggcaaatcaattgtgtgcttaaggattcggcacgggcgatggatgctaagttcgataaatactgggagaagggcaagtataacatgacacttgtcttagccaccatacttgatccatcaaagaagatggattttttggacttcttttatgagaagatgtctcaatattttgttgacatccagataaacgtggtcttggttaaacaatgtctcaccaaattatttgaaaaatatgcaacacttgttcaaatagataataaaagttcaccttttattgatataaggactagtaatttaggctcaacagttcttggaaaaagaaggttggatgaagaattttctcaatggtcccaaataagaggaagacgttttccaaagtctgagcttgacacatacttagaggaagaacttgtgagaatagatgaaagatttgaaattctaaattggtggaggacaaatgcaaacaaatacccggtgctttcagctatggcgcgtgatattttagcaatacctttgagcactgttccttcggagtttgcgttcagcgctggtggtcgtattcttgatgataatcgaagcacaatgacaccagaaacacttgaatgctttgtatgctgtaaggattggttatatgaatacccaaatattcaagcttagttgatctgacttccttcaaacatgttgaacagtacggcattcaagggagatttatgcatcattctgcgggctcctgtagctgcttagggatgacccttccactgctgctcgcttcaagcttgatcagatactctttctactgatacgcaaggccaaataaaatccaagaatcaaggttgcaatggatttcctcgggtaacatgctggctgtggattataaaatctggtgaaaaccaaacgcggccttagattgagcacaggttgtcaatcaggatcaggtttgctgaaatccggcttacataatttgtccttctgtaaatatgtccgtgcctagatcatttccccctctgtctgtcggcagatggcagtggcatgctgatggaaaatgcagtgccttcatgggtgtggtccaaatctgtatcgctttatttgcaaaatctgctatctgcatccagctgat

SEQ ID NO: 51270 - DNA, 2660 bp, Zea Mays
ccagcactagtcctgtactcccgtgcgctagtgcgctcggcgctgcccccgtccgcccgcagtccgtccccgctcgccgcccatgcgctcgccggccgcccctcggcgctcccccatctcctcccgctccgcccccgccctccgtctggtagtccgtcgccgctcctcccgcacgccagcacgacctagtagacggctcgaagcgaagacggtcccatttccagtctccgtgagatggatttagaggtatccgagggttcaggtactaatgccacctcggatgaccaatcggtgcaaacgctgcctagaagggcaaagcttttggagtattttcaaccggagttagttgaggtcaatggcgtgatgaaggctatttgcaaatattgcggggcgatgttgaggagttcaagcacaaatagccttagaaaccacgttgcggatacatgtcctaaaatttcagttgaggaccgcaagcaattcattgctacaatggaaaaaggaccagcggaagcttcatttgtgtttgactctcaaaaggctcgtgagtgtatggttaagtggtgcatcagtgccgaggtcgcattcaacaagtttgacgatcctttctttgctcagtggatggagtcaatgcagccatcattcagcggtgttgggcgtcaaacaatgcaaaatgattgtattaccagattcaagatgatgaggcaagagctaagaaatgagctacaaagtcttaactctcggatttgcttgacaactaatctttggacctcaaatcagaagttgggttatctttgcttgacagcccactacattaatgcagactttatcttgaaaaaaaagattattgcgttcaaatatttgaaatatccacatacaggcctagcaatcaaagaaggaattacagagtgtctcaaagagtgggggataaaagagaagatgtttactatcacattagataatgtttctaacaatctgtcagtgcgtgaccttcgagaaagtgggctatttggaggcgatcttcgtattgtccaatgttgtgcacacatattgattctcttagttcaagatggaatggcaattgctcatggagcaatctataagattcgtgagctggtcagacatatcaattcctcaccctcccgcatacaagcttttaatgggattgctgagaggtctggattgccttcaaaggatagattaattcttgacgttccaaaccgttggaattcgacacacgacatgattatggaggccattgagtacaaggttgtcttgaaaagatatgctgaagaacaacttgagccttcaccaaatgatgaagagtggacaaattctgaggcaattggagagtttcttgaggcatttgagaaagctacaaaagcattctcgacacatagaagtccaacatctcatttgtttttacataatgtgctatgtatccatcgaactctgagaaatacaaattggcaaatcaattgtgtgcttaaggattcggcacgggcgatggatgctaagttcgataaatactgggagaagggcaagtataacatgacacttgtcttagccaccatacttgatccatcaaagaagatggattttttggacttcttttatgagaagatgtctcaatattttgttgacatccagataaacgtggtcttggttaaacaatgtctcaccaaattatttgaaaaatatgcaacacttgttcaaatagataataaaagttcaccttttattgatataaggactagtaatttaggctcaacagttcttggaaaaagaaggttggatgaagaattttctcaatggtcccaaataagaggaagacgttttccaaagtctgagcttgacacatacttagaggaagaacttgtgagaatagatgaaagatttgaaattctaaattggtggaggacaaatgcaaacaaatacccggtgctttcagctatggcgcgtgatattttagcaatacctttgagcactgttccttcggagtttgcgttcagcgctggtggtcgtattcttgatgataatcgaagcacaatgacaccagaaacacttgaatgctttgtatgctgtaaggattggttatatgaatacccaaatattcaagcttagttgatctgacttccttcaaacatgttgaacagtacggcattcaagggagatttatgcatcattctgcgggctcctgtagctgcttagggatgacccttccactgctgctcgcttcaagcttgatcagatactctttctactgatacgcaaggtgtaaaactgccgtgttatgtggtagattggtgtgtgtactgttttctttatgtgtaaaactgtctgcttgatcaggggccaaataaaatccaagaatcaaggttgcaatggatttcctcgggtaacatgctggctgtggattataaaatctggtgaaaaccaaacgcggccttagattgagcacaggttgtcaatcaggatcaggtttgctgaaatccggcttacataatttgtccttctgtaaatatgtccgtgcctagatcatttccccctctgtctgtcggcagatggcagtggcatgctgatggaaaatgcagtgccttcatgggtgtggtccaaatctgtatcgctttatttgcaaaatctgctatctgcatccagctgat

SEQ ID NO: 51271 - DNA, 397 bp, Zea Mays
ctgagtttcactcaaggaagttaggatgcagtcctgaaccacgccagcagtagttcggcacagctagcatgtggttcatgtccttcaacctgtgtttggcgctgctagtttatgcagacattgccgcgttcttctccctgcaccagggtggggaaacccttatgttattgaccgtagcatccttgaccttgcaaggccaaggtgcagttgctgcaagctcgagaggtgtggcggccggtcccgtagagtggctcgttttggggctccgtgccggccggcccttctcagcctgatgtctgtccgatgtgcagaccggggtatgcaatctttctcatgtacagattgatcttttccttcgtgtgctgggtggatgtgttctgttttgttcgtttccggc

SEQ ID NO: 51272 - DNA, 615 bp, Zea Mays
ttgggcaaatatatacgcgatgattgattaaatcgaattgttgaatggattcaaacaaatggcaagcgatgatacaagtgttaatccctctctcagggggaagaacatcagcggcatgcatcaattcgttaaattaaggagaaagagggaacaaagaaaaagaggacaaaaggtgtgtcgaatcaaaaacatgcccacgcatcggaatgcgcgcagccatgtcactctctctcccgcttcgtctcttcctcggcctccgggcgaccggccgcggccggctcactgaatgtagtaggcgaagaaggaggcgacggcggccccgagggcggcgccgacggcgggcgcgacggcggaggagccgctggtggggcccggagccggagcctccgcggcgagcgccacggtggccgccgaggcggcgacgaggacggcgcaggcgatcttcttcatctccatccctgaatgcggcggcggcggcgggcgggacggaacggaacggaacggaggcgaggaagaaggacgggcgcggcgagcaagctggctgctggctggctggctagctagctctgtgctcccgtcgattgcctgggaatggagggcacggcagggcgggag

SEQ ID NO: 51273 - DNA, 1771 bp, Zea Mays
cccagatgtacaacctgtaggggttgcagcgcggcgccggcgcgtcgggtcgtgcccatcacgttgtctccactccgtcgcctctcctctcctctccgtccctgcgccacgcgggggagattaaagcgaagcgcctccccgctcacctctcctctcgtcgtgcgttggatcaaagtatcaaaccaatctcccctcgccgtccggccggcgtgcgcgcggggcctctttttttggagccttgcgccgcggcccgttcctcctgtccgaaataatccgcctcgacgtgttcgcctccccctccccctccctctctcccctcccctcgcgactcgtctcgtgcgtgactgcgtgctcgctctccttttcgctgcgctcatctcggtatctgtgccagcgctcgcctctccccgccggcccgccctccttcctttccttgtctagccgaaggccgaagccactgcgcgcgcgtgcgtgcgacgatgtcgtcggcggtggaggccatctcctgccccaaggtcgacgtccccgccggcccggagccgggggagccggccaaggaagcggcgccgcccgcggagcactgcgacacggcgcccaacggcaagtgcgcgccgcgttgtcacggggaggaggaggaggaggaggaggacgaggaggacgaggagaaggcccccaaggccatcgacctcggtcccatggtcagcatcaaggagcagctcgagaaggacaaggacgacgagagcctgcggcgatggaaggagcagctcctcggcggcgtggacttgaactccgtgggagagacgctggagccggacgtgaagataatgagcctgtccatcctgtcgcccgggcggcccgacatcgtgctgccgctgccggtggagcccaacggcaagggcgtgtggttcaccctcaaggaaggctccccgtaccggctcaagttcaccttctccgtcagcaacaacatcgtctccggcctccgctacaccaacaccgtctggaagacggggctcaaagttgacagagccaaggagatgctcggcacgttcagcccccagctggagccctacacgtacgtgacgccggaggacaccaccccgtcgggaatgtttgcccgggggtcctactctgccaggaccaagttcctcgacgacgaccgcaagtgctacctggagatcaactacaccttcgacatccgccgggagtggccgtcgacgagctgaccatccttccctccctccatcggtggcctgagcagaccagtcgtttcgttctgtgttcttccttttctatgttgcctcgtcctgtcctgtcactaggttttttgtttgttcaccgtcagcttgttcgctgcagcagtccaaacagctgcaacagtgtcggcttgtagccagccgaacacgccccgtgttgctgcgtgcgtgacgcacggtgcgtctatgtgccctttcccatgcgccagttgtctgctgtgttgacaccgttactagacagtgcaaatgtcaggtcggtctaccggactgtgcgtgcgtcagcgtgttcaacttgtcgatcagggtctcgttttttccgaaccgcctgttgagttaagacttcagagcaatgaagctgcgttctgcgtagtaatgccaccgtgatcgtgacctgttgtgcttcgagagttcgactgtagcattgaaatcaagtgtagcatgcttcgagtcctatttttgcgatcaatgttacaaatggccaaaaaaacgaagtatattgtttggagtccaaaaaatcc

SEQ ID NO: 51274 - DNA, 1483 bp, Zea Mays
actcgtctcgtgcgtgactgcgtgctcgctctccttttcgctgcgctcatctcggtatctgtgccagcgctcgcctctccccgccggcccgccctccttcctttccttgtctagccgaaggccgaagccactgcgcgcgcgtgcgtgcgacgatgtcgtcggcggtggaggccatctcctgccccaaggtcgacgtccccgccggcccggagccgggggagccggccaaggaagcggcgccgcccgcggagcactgcgacacggcgcccaacggcaagtgcgcgccgcgttgtcacggggaggaggaggaggaggaggaggacgaggaggacgaggagaaggcccccaaggccatcgacctcggtcccatggtcagcatcaaggagcagctcgagaaggacaaggacgacgagagcctgcggcgatggaaggagcagctcctcggcggcgtggacttgaactccgtgggagagacgctggagccggacgtgaagataatgagcctgtccatcctgtcgcccgggcggcccgacatcgtgctgccgctgccggtggagcccaacggcaagggcgtgtggttcaccctcaaggaaggctccccgtaccggctcaagttcaccttctccgtcagcaacaacatcgtctccggcctccgctacaccaacaccgtctggaagacggggctcaaagttgacagagccaaggagatgctcggcacgttcagcccccagctggagccctacacgtacgtgacgccggaggacaccaccccgtcgggaatgtttgcccgggggtcctactctgccaggaccaagttcctcgacgacgaccgcaagtgctacctggagatcaactacaccttcgacatccgccgggagtggccgtcgacgagctgaccatccttccctccctccatcggtggcctgagcagaccagtcgtttcgttctgtgttcttccttttctatgttgcctcgtcctgtcctgtcactaggttttttgtttgttcaccgtcagcttgttcgctgcggcttctacagtatttttctctctatggattgcagctgcagcagtccaaacagctgcaacagtgtcggcttgtagccagccgaacacgccccgtgttgctgcgtgcgtgacgcacggtgcgtctatgtgccctttcccatgcgccagttgtctgctgtgttgacaccgttactagacagtgcaaatgtcaggtcggtctaccggactgtgcgtgcgtcagcgtgttcaacttgtcgatcagggtctcgttttttccgaaccgcctgttgagttaagacttcagagcaatgaagctgcgttctgcgtagtaatgccaccgtgatcgtgacctgttgtgcttcgagagttcgactgtagcattgaaatcaagtgtagcatgcttcgagtcctatttttgcgatcaatgttacaaatggccaaaaaaacgaagtatattgtttggagtccaaaaaatcc

SEQ ID NO: 51275 - DNA, 2966 bp, Zea Mays
atacagtactgctgcatacaggaaggtggaaaaaaagagcagcagattccacgattccaatggcttaaccccgaggaaacctaattcggcgacaggaaggtgggaaaaacagcagcagtttcaacggttccaatggcttaaccccgaggaaacctaattcggcgacaggaaggtgaataaacaaacgcgagaaaccgaccccaccctgcccttacctcctcttctcgtctccaccacttcccctctgcgcctcggcccccacgaaatctggagaccaggacgccattgctcaccttttccgtccagcgcaaggaaaccgcgcgccagagagggggctccattacatccaggtcgcgtgaccgctctgatctggattcgtcttgcagccgcttcaggcgcgcgtggaatcgccccgtggccggcggggatgtccggattcgtcggggtcgtcgtgtccgacccttcgctgcaggggcagttcacgcaggtcgagctccgatcgctcaaggccaagttcgtgtctctgaagagagattccggccatgtcaccactaagaacctgccggggctgatgaagaagctgagggggctcaatgaggtggtctccgaggaggagatcgcggccttcctgtcggagtcgtaccctgatagcgatcacgagattgaattcgaatccttcctccgggagtatcttaatctgcaggctcaggtgagtgccaaggaaggtggtgccggcggtggcaggggtggcaagccgtcgtttctcaagtccagcatcactacgctgctgcacaatctcaaccaggcagagaaatcttcgtatgtcgcacacatcaatacttacctccgtgaagacccattcctgaagaagtacttgcccatcgaaccgtctggaaatcagctgttcgatctcatccgggatggggttctgctctgcaaactgatcaatgtagctgtacctgggaccattgatgagagagcgataaataagaaaagagttcttaacccatgggagagaaacgaaaaccacacactctgcctcaattctgccaaggccattggatgtactgttgtcaacattggcacacaggatttggtggagggaaggcctcatttagttcttggattgatatcacaaatcataaagattcaacttttagctgatctgaatctcaagaagacaccgcagctggtggagctatttgatgacagcaaggatatagatgaggttttgagcttgtcaccagaaaagatgctacttcggtggatgaaccatcatctgaaaaaagctggctacaagaaaactgttaacaatttctcttcagatgtcaaggatggtgaagcctatgcttaccttttgaaagctcttgctccagagcattcccctgaaactacattggacaccaaggatccgaacgaaagggcaaaactagtacttgaacaagcagagaagttggactgtaagagatacttgaccccaaaggatatcactgagggatctgccaatctaaatcttgcatttgttgcacaaatattccagcacaggaatggtctgaccagtgacaccaaacaagttaccctcacacagacagcaacacatgatgatgttctattatctagagaagaaagagcctttcgaatgtggatcaacagccttggggttgaatcatatgtgaacaatgtcttcgaagatgttcgcaacggatgggtacttcttgaagtgcttgacaaggtgtctcatggatctgtcaattggaagctggcatcaaaacctccaattaaattgccatttagaaaactggagaattgcaaccaagttgtaaaaattgggaagcagttaaagttttctttagtaaatctagctggaaacgatattgttcagggaaacaagaaattgattgttgcacttctgtggcaattgatgagattcaatatcctccagctgttaaacaaactgagattccactcccaagggtccgaaggaaaagaaatttctgatgccgatattctaaactgggccaactgcaaagtgaaggcatccggaagaacatctcgtatagaaagtttcaaggacaagagcttatcgaatggaatgttcttccttgatcttcttagcacagtacagccaagggttgtgaactggaaagttgttactaaaggggaaactgatgaggacaagaagctgaatgctacctacatcattagtgttgcaaggaagattggatgctctgtgtttctgttgccagaggacatcattgaggtgaatcagaagatgatcctaacacttactgctagcattatgtattggagcctacagaaacagccccagtcacagtctgaattgacagaacaatcagaaccatctagcatgacttctgacgcagcctctgaagttgcctcggaggatggtgcttcaacgacagcaccgtccgagtcagaagaggtgaactcgctgtctgatagcatatcgaatttgacaacggatgatgctacttcaaacgccccatctgctgaaaacggaaatggtgtggcagggtcctgatggttatgattatgcaaaccctgttctttttttccccatacagtgctgttacaggaaatagtgctttcatgatgcccaaagttgtcgctaccagaagcgatatttttaatacttctgcttcctgagcatggtagcttgatagatacaacagtcacagatagatatagatgccttttgttcattggatccgcttatactatagtgggggaagataatagtatgtgtcgctggctgggtattttctgtatttctggcatacacccatgcaaaatttactacctcctctgtatcttatcggtcaattcgttcatatgtttattggactagtcaaagcttgtaatgctgttgctgctctgaaccgtgcctgtacataacatatgcttaaaaaggttttgcattgtcctttagtttctgtttgtactgc

SEQ ID NO: 51276 - DNA, 2903 bp, Zea Mays
atacagtactgctgcatacaggaaggtggaaaaaaagagcagcagattccacgattccaatggcttaaccccgaggaaacctaattcggcgacaggaaggtgggaaaaacagcagcagtttcaacggttccaatggcttaaccccgaggaaacctaattcggcgacaggaaggtgaataaacaaacgcgagaaaccgaccccaccctgcccttacctcctcttctcgtctccaccacttcccctctgcgcctcggcccccacgaaatctggagaccaggacgccattgctcaccttttccgtccagcgcaaggaaaccgcgcgccagagagggcgcgcgtggaatcgccccgtggccggcggggatgtccggattcgtcggggtcgtcgtgtccgacccttcgctgcaggggcagttcacgcaggtcgagctccgatcgctcaaggccaagttcgtgtctctgaagagagattccggccatgtcaccactaagaacctgccggggctgatgaagaagctgagggggctcaatgaggtggtctccgaggaggagatcgcggccttcctgtcggagtcgtaccctgatagcgatcacgagattgaattcgaatccttcctccgggagtatcttaatctgcaggctcaggtgagtgccaaggaaggtggtgccggcggtggcaggggtggcaagccgtcgtttctcaagtccagcatcactacgctgctgcacaatctcaaccaggcagagaaatcttcgtatgtcgcacacatcaatacttacctccgtgaagacccattcctgaagaagtacttgcccatcgaaccgtctggaaatcagctgttcgatctcatccgggatggggttctgctctgcaaactgatcaatgtagctgtacctgggaccattgatgagagagcgataaataagaaaagagttcttaacccatgggagagaaacgaaaaccacacactctgcctcaattctgccaaggccattggatgtactgttgtcaacattggcacacaggatttggtggagggaaggcctcatttagttcttggattgatatcacaaatcataaagattcaacttttagctgatctgaatctcaagaagacaccgcagctggtggagctatttgatgacagcaaggatatagatgaggttttgagcttgtcaccagaaaagatgctacttcggtggatgaaccatcatctgaaaaaagctggctacaagaaaactgttaacaatttctcttcagatgtcaaggatggtgaagcctatgcttaccttttgaaagctcttgctccagagcattcccctgaaactacattggacaccaaggatccgaacgaaagggcaaaactagtacttgaacaagcagagaagttggactgtaagagatacttgaccccaaaggatatcactgagggatctgccaatctaaatcttgcatttgttgcacaaatattccagcacaggaatggtctgaccagtgacaccaaacaagttaccctcacacagacagcaacacatgatgatgttctattatctagagaagaaagagcctttcgaatgtggatcaacagccttggggttgaatcatatgtgaacaatgtcttcgaagatgttcgcaacggatgggtacttcttgaagtgcttgacaaggtgtctcatggatctgtcaattggaagctggcatcaaaacctccaattaaattgccatttagaaaactggagaattgcaaccaagttgtaaaaattgggaagcagttaaagttttctttagtaaatctagctggaaacgatattgttcagggaaacaagaaattgattgttgcacttctgtggcaattgatgagattcaatatcctccagctgttaaacaaactgagattccactcccaagggtccgaaggaaaagaaatttctgatgccgatattctaaactgggccaactgcaaagtgaaggcatccggaagaacatctcgtatagaaagtttcaaggacaagagcttatcgaatggaatgttcttccttgatcttcttagcacagtacagccaagggttgtgaactggaaagttgttactaaaggggaaactgatgaggacaagaagctgaatgctacctacatcattagtgttgcaaggaagattggatgctctgtgtttctgttgccagaggacatcattgaggtgaatcagaagatgatcctaacacttactgctagcattatgtattggagcctacagaaacagccccagtcacagtctgaattgacagaacaatcagaaccatctagcatgacttctgacgcagcctctgaagttgcctcggaggatggtgcttcaacgacagcaccgtccgagtcagaagaggtgaactcgctgtctgatagcatatcgaatttgacaacggatgatgctacttcaaacgccccatctgctgaaaacggaaatggtgtggcagggtcctgatggttatgattatgcaaaccctgttctttttttccccatacagtgctgttacaggaaatagtgctttcatgatgcccaaagttgtcgctaccagaagcgatatttttaatacttctgcttcctgagcatggtagcttgatagatacaacagtcacagatagatatagatgccttttgttcattggatccgcttatactatagtgggggaagataatagtatgtgtcgctggctgggtattttctgtatttctggcatacacccatgcaaaatttactacctcctctgtatcttatcggtcaattcgttcatatgtttattggactagtcaaagcttgtaatgctgttgctgctctgaaccgtgcctgtacataacatatgcttaaaaaggttttgcattgtcctttagtttctgtttgtactgc

SEQ ID NO: 51277 - DNA, 2941 bp, Zea Mays
atacagtactgctgcatacaggaaggtggaaaaaaagagcagcagattccacgattccaatggcttaaccccgaggaaacctaattcggcgacaggaaggtgggaaaaacagcagcagtttcaacggttccaatggcttaaccccgaggaaacctaattcggcgacaggaaggtgaataaacaaacgcgagaaaccgaccccaccctgcccttacctcctcttctcgtctccaccacttcccctctgcgcctcggcccccacgaaatctggagaccaggacgccattgctcaccttttccgtccagcgcaaggaaaccgcgcgccagagagggtgagggattgccgtcaccaatccggaagccgcttcaggcgcgcgtggaatcgccccgtggccggcggggatgtccggattcgtcggggtcgtcgtgtccgacccttcgctgcaggggcagttcacgcaggtcgagctccgatcgctcaaggccaagttcgtgtctctgaagagagattccggccatgtcaccactaagaacctgccggggctgatgaagaagctgagggggctcaatgaggtggtctccgaggaggagatcgcggccttcctgtcggagtcgtaccctgatagcgatcacgagattgaattcgaatccttcctccgggagtatcttaatctgcaggctcaggtgagtgccaaggaaggtggtgccggcggtggcaggggtggcaagccgtcgtttctcaagtccagcatcactacgctgctgcacaatctcaaccaggcagagaaatcttcgtatgtcgcacacatcaatacttacctccgtgaagacccattcctgaagaagtacttgcccatcgaaccgtctggaaatcagctgttcgatctcatccgggatggggttctgctctgcaaactgatcaatgtagctgtacctgggaccattgatgagagagcgataaataagaaaagagttcttaacccatgggagagaaacgaaaaccacacactctgcctcaattctgccaaggccattggatgtactgttgtcaacattggcacacaggatttggtggagggaaggcctcatttagttcttggattgatatcacaaatcataaagattcaacttttagctgatctgaatctcaagaagacaccgcagctggtggagctatttgatgacagcaaggatatagatgaggttttgagcttgtcaccagaaaagatgctacttcggtggatgaaccatcatctgaaaaaagctggctacaagaaaactgttaacaatttctcttcagatgtcaaggatggtgaagcctatgcttaccttttgaaagctcttgctccagagcattcccctgaaactacattggacaccaaggatccgaacgaaagggcaaaactagtacttgaacaagcagagaagttggactgtaagagatacttgaccccaaaggatatcactgagggatctgccaatctaaatcttgcatttgttgcacaaatattccagcacaggaatggtctgaccagtgacaccaaacaagttaccctcacacagacagcaacacatgatgatgttctattatctagagaagaaagagcctttcgaatgtggatcaacagccttggggttgaatcatatgtgaacaatgtcttcgaagatgttcgcaacggatgggtacttcttgaagtgcttgacaaggtgtctcatggatctgtcaattggaagctggcatcaaaacctccaattaaattgccatttagaaaactggagaattgcaaccaagttgtaaaaattgggaagcagttaaagttttctttagtaaatctagctggaaacgatattgttcagggaaacaagaaattgattgttgcacttctgtggcaattgatgagattcaatatcctccagctgttaaacaaactgagattccactcccaagggtccgaaggaaaagaaatttctgatgccgatattctaaactgggccaactgcaaagtgaaggcatccggaagaacatctcgtatagaaagtttcaaggacaagagcttatcgaatggaatgttcttccttgatcttcttagcacagtacagccaagggttgtgaactggaaagttgttactaaaggggaaactgatgaggacaagaagctgaatgctacctacatcattagtgttgcaaggaagattggatgctctgtgtttctgttgccagaggacatcattgaggtgaatcagaagatgatcctaacacttactgctagcattatgtattggagcctacagaaacagccccagtcacagtctgaattgacagaacaatcagaaccatctagcatgacttctgacgcagcctctgaagttgcctcggaggatggtgcttcaacgacagcaccgtccgagtcagaagaggtgaactcgctgtctgatagcatatcgaatttgacaacggatgatgctacttcaaacgccccatctgctgaaaacggaaatggtgtggcagggtcctgatggttatgattatgcaaaccctgttctttttttccccatacagtgctgttacaggaaatagtgctttcatgatgcccaaagttgtcgctaccagaagcgatatttttaatacttctgcttcctgagcatggtagcttgatagatacaacagtcacagatagatatagatgccttttgttcattggatccgcttatactatagtgggggaagataatagtatgtgtcgctggctgggtattttctgtatttctggcatacacccatgcaaaatttactacctcctctgtatcttatcggtcaattcgttcatatgtttattggactagtcaaagcttgtaatgctgttgctgctctgaaccgtgcctgtacataacatatgcttaaaaaggttttgcattgtcctttagtttctgtttgtactgc

SEQ ID NO: 51278 - DNA, 2622 bp, Zea Mays
caatggcttaaccccgaggaaacctaattcggcgacaggaagccgcttcaggcgcgcgtggaatcgccccgtggccggcggggatgtccggattcgtcggggtcgtcgtgtccgacccttcgctgcaggggcagttcacgcaggtcgagctccgatcgctcaaggccaagttcgtgtctctgaagagagattccggccatgtcaccactaagaacctgccggggctgatgaagaagctgagggggctcaatgaggtggtctccgaggaggagatcgcggccttcctgtcggagtcgtaccctgatagcgatcacgagattgaattcgaatccttcctccgggagtatcttaatctgcaggctcaggtgagtgccaaggaaggtggtgccggcggtggcaggggtggcaagccgtcgtttctcaagtccagcatcactacgctgctgcacaatctcaaccaggcagagaaatcttcgtatgtcgcacacatcaatacttacctccgtgaagacccattcctgaagaagtacttgcccatcgaaccgtctggaaatcagctgttcgatctcatccgggatggggttctgctctgcaaactgatcaatgtagctgtacctgggaccattgatgagagagcgataaataagaaaagagttcttaacccatgggagagaaacgaaaaccacacactctgcctcaattctgccaaggccattggatgtactgttgtcaacattggcacacaggatttggtggagggaaggcctcatttagttcttggattgatatcacaaatcataaagattcaacttttagctgatctgaatctcaagaagacaccgcagctggtggagctatttgatgacagcaaggatatagatgaggttttgagcttgtcaccagaaaagatgctacttcggtggatgaaccatcatctgaaaaaagctggctacaagaaaactgttaacaatttctcttcagatgtcaaggatggtgaagcctatgcttaccttttgaaagctcttgctccagagcattcccctgaaactacattggacaccaaggatccgaacgaaagggcaaaactagtacttgaacaagcagagaagttggactgtaagagatacttgaccccaaaggatatcactgagggatctgccaatctaaatcttgcatttgttgcacaaatattccagcacaggaatggtctgaccagtgacaccaaacaagttaccctcacacagacagcaacacatgatgatgttctattatctagagaagaaagagcctttcgaatgtggatcaacagccttggggttgaatcatatgtgaacaatgtcttcgaagatgttcgcaacggatgggtacttcttgaagtgcttgacaaggtgtctcatggatctgtcaattggaagctggcatcaaaacctccaattaaattgccatttagaaaactggagaattgcaaccaagttgtaaaaattgggaagcagttaaagttttctttagtaaatctagctggaaacgatattgttcagggaaacaagaaattgattgttgcacttctgtggcaattgatgagattcaatatcctccagctgttaaacaaactgagattccactcccaagggtccgaaggaaaagaaatttctgatgccgatattctaaactgggccaactgcaaagtgaaggcatccggaagaacatctcgtatagaaagtttcaaggacaagagcttatcgaatggaatgttcttccttgatcttcttagcacagtacagccaagggttgtgaactggaaagttgttactaaaggggaaactgatgaggacaagaagctgaatgctacctacatcattagtgttgcaaggaagattggatgctctgtgtttctgttgccagaggacatcattgaggtgaatcagaagatgatcctaacacttactgctagcattatgtattggagcctacagaaacagccccagtcacagtctgaattgacagaacaatcagaaccatctagcatgacttctgacgcagcctctgaagttgcctcggaggatggtgcttcaacgacagcaccgtccgagtcagaagaggtgaactcgctgtctgatagcatatcgaatttgacaacggatgatgctacttcaaacgccccatctgctgaaaacggaaatggtgtggcagggtcctgatggttatgattatgcaaaccctgttctttttttccccatacagtgctgttacaggaaatagtgctttcatgatgcccaaagttgtcgctaccagaagcgatatttttaatacttctgcttcctgagcatggtagcttgatagatacaacagtcacagatagatatagatgccttttgttcattggatccgcttatactatagtgggggaagataatagtatgtgtcgctggctgggtattttctgtatttctggcatacacccatgcaaaatttactacctcctctgtatcttatcggtcaattcgttcatatgtttattggactagtcaaagcttgtaatgctgttgctgctctgaaccgtgcctgtacataacatatgcttaaaaaggttttgcattgtcctttagtttctgtttgtactgc

SEQ ID NO: 51279 - DNA, 2647 bp, Zea Mays
aaaacagcagcagtttcaacggttccaatggcttaaccccgaggaaacctaattcggcgacaggaagccgcttcaggcgcgcgtggaatcgccccgtggccggcggggatgtccggattcgtcggggtcgtcgtgtccgacccttcgctgcaggggcagttcacgcaggtcgagctccgatcgctcaaggccaagttcgtgtctctgaagagagattccggccatgtcaccactaagaacctgccggggctgatgaagaagctgagggggctcaatgaggtggtctccgaggaggagatcgcggccttcctgtcggagtcgtaccctgatagcgatcacgagattgaattcgaatccttcctccgggagtatcttaatctgcaggctcaggtgagtgccaaggaaggtggtgccggcggtggcaggggtggcaagccgtcgtttctcaagtccagcatcactacgctgctgcacaatctcaaccaggcagagaaatcttcgtatgtcgcacacatcaatacttacctccgtgaagacccattcctgaagaagtacttgcccatcgaaccgtctggaaatcagctgttcgatctcatccgggatggggttctgctctgcaaactgatcaatgtagctgtacctgggaccattgatgagagagcgataaataagaaaagagttcttaacccatgggagagaaacgaaaaccacacactctgcctcaattctgccaaggccattggatgtactgttgtcaacattggcacacaggatttggtggagggaaggcctcatttagttcttggattgatatcacaaatcataaagattcaacttttagctgatctgaatctcaagaagacaccgcagctggtggagctatttgatgacagcaaggatatagatgaggttttgagcttgtcaccagaaaagatgctacttcggtggatgaaccatcatctgaaaaaagctggctacaagaaaactgttaacaatttctcttcagatgtcaaggatggtgaagcctatgcttaccttttgaaagctcttgctccagagcattcccctgaaactacattggacaccaaggatccgaacgaaagggcaaaactagtacttgaacaagcagagaagttggactgtaagagatacttgaccccaaaggatatcactgagggatctgccaatctaaatcttgcatttgttgcacaaatattccagcacaggaatggtctgaccagtgacaccaaacaagttaccctcacacagacagcaacacatgatgatgttctattatctagagaagaaagagcctttcgaatgtggatcaacagccttggggttgaatcatatgtgaacaatgtcttcgaagatgttcgcaacggatgggtacttcttgaagtgcttgacaaggtgtctcatggatctgtcaattggaagctggcatcaaaacctccaattaaattgccatttagaaaactggagaattgcaaccaagttgtaaaaattgggaagcagttaaagttttctttagtaaatctagctggaaacgatattgttcagggaaacaagaaattgattgttgcacttctgtggcaattgatgagattcaatatcctccagctgttaaacaaactgagattccactcccaagggtccgaaggaaaagaaatttctgatgccgatattctaaactgggccaactgcaaagtgaaggcatccggaagaacatctcgtatagaaagtttcaaggacaagagcttatcgaatggaatgttcttccttgatcttcttagcacagtacagccaagggttgtgaactggaaagttgttactaaaggggaaactgatgaggacaagaagctgaatgctacctacatcattagtgttgcaaggaagattggatgctctgtgtttctgttgccagaggacatcattgaggtgaatcagaagatgatcctaacacttactgctagcattatgtattggagcctacagaaacagccccagtcacagtctgaattgacagaacaatcagaaccatctagcatgacttctgacgcagcctctgaagttgcctcggaggatggtgcttcaacgacagcaccgtccgagtcagaagaggtgaactcgctgtctgatagcatatcgaatttgacaacggatgatgctacttcaaacgccccatctgctgaaaacggaaatggtgtggcagggtcctgatggttatgattatgcaaaccctgttctttttttccccatacagtgctgttacaggaaatagtgctttcatgatgcccaaagttgtcgctaccagaagcgatatttttaatacttctgcttcctgagcatggtagcttgatagatacaacagtcacagatagatatagatgccttttgttcattggatccgcttatactatagtgggggaagataatagtatgtgtcgctggctgggtattttctgtatttctggcatacacccatgcaaaatttactacctcctctgtatcttatcggtcaattcgttcatatgtttattggactagtcaaagcttgtaatgctgttgctgctctgaaccgtgcctgtacataacatatgcttaaaaaggttttgcattgtcctttagtttctgtttgtactgc

SEQ ID NO: 51280 - DNA, 2717 bp, Zea Mays
gagaaaccgaccccaccctgcccttacctcctcttctcgtctccaccacttcccctctgcgcctcggcccccacgaaatctggagaccaggacgccattgctcaccttttccgtccagcgcaaggaaaccgcgcgccagagaggccgcttcaggcgcgcgtggaatcgccccgtggccggcggggatgtccggattcgtcggggtcgtcgtgtccgacccttcgctgcaggggcagttcacgcaggtcgagctccgatcgctcaaggccaagttcgtgtctctgaagagagattccggccatgtcaccactaagaacctgccggggctgatgaagaagctgagggggctcaatgaggtggtctccgaggaggagatcgcggccttcctgtcggagtcgtaccctgatagcgatcacgagattgaattcgaatccttcctccgggagtatcttaatctgcaggctcaggtgagtgccaaggaaggtggtgccggcggtggcaggggtggcaagccgtcgtttctcaagtccagcatcactacgctgctgcacaatctcaaccaggcagagaaatcttcgtatgtcgcacacatcaatacttacctccgtgaagacccattcctgaagaagtacttgcccatcgaaccgtctggaaatcagctgttcgatctcatccgggatggggttctgctctgcaaactgatcaatgtagctgtacctgggaccattgatgagagagcgataaataagaaaagagttcttaacccatgggagagaaacgaaaaccacacactctgcctcaattctgccaaggccattggatgtactgttgtcaacattggcacacaggatttggtggagggaaggcctcatttagttcttggattgatatcacaaatcataaagattcaacttttagctgatctgaatctcaagaagacaccgcagctggtggagctatttgatgacagcaagatgaggttttgagcttgtcaccagaaaagatgctacttcggtggatgaaccatcatctgaaaaaagctggctacaagaaaactgttaacaatttctcttcagatgtcaaggatggtgaagcctatgcttaccttttgaaagctcttgctccagagcattcccctgaaactacattggacaccaaggatccgaacgaaagggcaaaactagtacttgaacaagcagagaagttggactgtaagagatacttgaccccaaaggatatcactgagggatctgccaatctaaatcttgcatttgttgcacaaatattccagcacaggaatggtctgaccagtgacaccaaacaagttaccctcacacagacagcaacacatgatgatgttctattatctagagaagaaagagcctttcgaatgtggatcaacagccttggggttgaatcatatgtgaacaatgtcttcgaagatgttcgcaacggatgggtacttcttgaagtgcttgacaaggtgtctcatggatctgtcaattggaagctggcatcaaaacctccaattaaattgccatttagaaaactggagaattgcaaccaagttgtaaaaattgggaagcagttaaagttttctttagtaaatctagctggaaacgatattgttcagggaaacaagaaattgattgttgcacttctgtggcaattgatgagattcaatatcctccagctgttaaacaaactgagattccactcccaagggtccgaaggaaaagaaatttctgatgccgatattctaaactgggccaactgcaaagtgaaggcatccggaagaacatctcgtatagaaagtttcaaggacaagagcttatcgaatggaatgttcttccttgatcttcttagcacagtacagccaagggttgtgaactggaaagttgttactaaaggggaaactgatgaggacaagaagctgaatgctacctacatcattagtgttgcaaggaagattggatgctctgtgtttctgttgccagaggacatcattgaggtgaatcagaagatgatcctaacacttactgctagcattatgtattggagcctacagaaacagccccagtcacagtctgaattgacagaacaatcagaaccatctagcatgacttctgacgcagcctctgaagttgcctcggaggatggtgcttcaacgacagcaccgtccgagtcagaagaggtgaactcgctgtctgatagcatatcgaatttgacaacggatgatgctacttcaaacgccccatctgctgaaaacggaaatggtgtggcagggtcctgatggttatgattatgcaaaccctgttctttttttccccatacagtgctgttacaggaaatagtgctttcatgatgcccaaagttgtcgctaccagaagcgatatttttaatacttctgcttcctgagcatggtagcttgatagatacaacagtcacagatagatatagatgccttttgttcattggatccgcttatactatagtgggggaagataatagtatgtgtcgctggctgggtattttctgtatttctggcatacacccatgcaaaatttactacctcctctgtatcttatcggtcaattcgttcatatgtttattggactagtcaaagcttgtaatgctgttgctgctctgaaccgtgcctgtacataacatatgcttaaaaaggttttgcattgtcctttagtttctgtttgtactgc

SEQ ID NO: 51281 - DNA, 2675 bp, Zea Mays
ccgaccccaccctgcccttacctcctcttctcgtctccaccacttcccctctgcgcctcggcccccacgaaatctggagaccaggacgccattgctcaccttttccgtccagcgcaaggaaaccgcgcgccagagaggccgcttcaggcgcgcgtggaatcgccccgtggccggcggggatgtccggattcgtcggggtcgtcgtgtccgacccttcgctgcaggggcagttcacgcaggtcgagctccgatcgctcaaggccaagttcgtgtctctgaagagagattccggccatgtcaccactaagaacctgccggggctgatgaagaagctgagggggctcaatgaggtggtctccgaggaggagatcgcggccttcctgtcggagtcgtaccctgatagcgatcacgagattgaattcgaatccttcctccgggagtatcttaatctgcaggctcaggtgagtgccaaggaaggtggtgccggcggtggcaggggtggcaagccgtcgtttctcaagtccagcatcactacgctgctgcacaatctcaaccaggcagagaaatcttcgtatgtcgcacacatcaatacttacctccgtgaagacccattcctgaagaagtacttgcccatcgaaccgtctggaaatcagctgttcgatctcatccgggatggggttctgctctgcaaactgatcaatgtagctgtacctgggaccattgatgagagagcgataaataagaaaagagttcttaacccatgggagagaaacgaaaaccacacactctgcctcaattctgccaaggccattggatgtactgttgtcaacattggcacacaggatttggtggagggaaggcctcatttagttcttggattgatatcacaaatcataaagattcaacttttagctgatctgaatctcaagaagacaccgcagctggtggagctatttgatgacagcaaggatatagatgaggttttgagcttgtcaccagaaaagatgctacttcggtggatgaaccatcatctgaaaaaagctggctacaagaaaactgttaacaatttctcttcagatgtcaagagcattcccctgaaactacattggacaccaaggatccgaacgaaagggcaaaactagtacttgaacaagcagagaagttggactgtaagagatacttgaccccaaaggatatcactgagggatctgccaatctaaatcttgcatttgttgcacaaatattccagcacaggaatggtctgaccagtgacaccaaacaagttaccctcacacagacagcaacacatgatgatgttctattatctagagaagaaagagcctttcgaatgtggatcaacagccttggggttgaatcatatgtgaacaatgtcttcgaagatgttcgcaacggatgggtacttcttgaagtgcttgacaaggtgtctcatggatctgtcaattggaagctggcatcaaaacctccaattaaattgccatttagaaaactggagaattgcaaccaagttgtaaaaattgggaagcagttaaagttttctttagtaaatctagctggaaacgatattgttcagggaaacaagaaattgattgttgcacttctgtggcaattgatgagattcaatatcctccagctgttaaacaaactgagattccactcccaagggtccgaaggaaaagaaatttctgatgccgatattctaaactgggccaactgcaaagtgaaggcatccggaagaacatctcgtatagaaagtttcaaggacaagagcttatcgaatggaatgttcttccttgatcttcttagcacagtacagccaagggttgtgaactggaaagttgttactaaaggggaaactgatgaggacaagaagctgaatgctacctacatcattagtgttgcaaggaagattggatgctctgtgtttctgttgccagaggacatcattgaggtgaatcagaagatgatcctaacacttactgctagcattatgtattggagcctacagaaacagccccagtcacagtctgaattgacagaacaatcagaaccatctagcatgacttctgacgcagcctctgaagttgcctcggaggatggtgcttcaacgacagcaccgtccgagtcagaagaggtgaactcgctgtctgatagcatatcgaatttgacaacggatgatgctacttcaaacgccccatctgctgaaaacggaaatggtgtggcagggtcctgatggttatgattatgcaaaccctgttctttttttccccatacagtgctgttacaggaaatagtgctttcatgatgcccaaagttgtcgctaccagaagcgatatttttaatacttctgcttcctgagcatggtagcttgatagatacaacagtcacagatagatatagatgccttttgttcattggatccgcttatactatagtgggggaagataatagtatgtgtcgctggctgggtattttctgtatttctggcatacacccatgcaaaatttactacctcctctgtatcttatcggtcaattcgttcatatgtttattggactagtcaaagcttgtaatgctgttgctgctctgaaccgtgcctgtacataacatatgcttaaaaaggttttgcattgtcctttagtttctgtttgtactgc

SEQ ID NO: 51282 - DNA, 2542 bp, Zea Mays
ccccaccctgcccttacctcctcttctcgtctccaccacttcccctctgcgcctcggcccccacgaaatctggagaccaggacgccattgctcaccttttccgtccagcgcaaggaaaccgcgcgccagagaggccgcttcaggcgcgcgtggaatcgccccgtggccggcggggatgtccggattcgtcggggtcgtcgtgtccgacccttcgctgcaggggcagttcacgcaggtcgagctccgatcgctcaaggccaagttcgtgtctctgaagagagattccggccatgtcaccactaagaacctgccggggctgatgaagaagctgagggggctcaatgaggtggtctccgaggaggagatcgcggccttcctgtcggagtcgtaccctgatagcgatcacgagattgaattcgaatccttcctccgggagtatcttaatctgcaggctcaggtgagtgccaaggaaggtggtgccggcggtggcaggggtggcaagccgtcgtttctcaagtccagcatcactacgctgctgcacaatctcaaccaggcagagaaatcttcgtatgtcgcacacatcaatacttacctccgtgaagacccattcctgaagaagtacttgcccatcgaaccgtctggaaatcagctgttcgatctcatccgggatggggttctgctctgcctcatttagttcttggattgatatcacaaatcataaagattcaacttttagctgatctgaatctcaagaagacaccgcagctggtggagctatttgatgacagcaaggatatagatgaggttttgagcttgtcaccagaaaagatgctacttcggtggatgaaccatcatctgaaaaaagctggctacaagaaaactgttaacaatttctcttcagatgtcaaggatggtgaagcctatgcttaccttttgaaagctcttgctccagagcattcccctgaaactacattggacaccaaggatccgaacgaaagggcaaaactagtacttgaacaagcagagaagttggactgtaagagatacttgaccccaaaggatatcactgagggatctgccaatctaaatcttgcatttgttgcacaaatattccagcacaggaatggtctgaccagtgacaccaaacaagttaccctcacacagacagcaacacatgatgatgttctattatctagagaagaaagagcctttcgaatgtggatcaacagccttggggttgaatcatatgtgaacaatgtcttcgaagatgttcgcaacggatgggtacttcttgaagtgcttgacaaggtgtctcatggatctgtcaattggaagctggcatcaaaacctccaattaaattgccatttagaaaactggagaattgcaaccaagttgtaaaaattgggaagcagttaaagttttctttagtaaatctagctggaaacgatattgttcagggaaacaagaaattgattgttgcacttctgtggcaattgatgagattcaatatcctccagctgttaaacaaactgagattccactcccaagggtccgaaggaaaagaaatttctgatgccgatattctaaactgggccaactgcaaagtgaaggcatccggaagaacatctcgtatagaaagtttcaaggacaagagcttatcgaatggaatgttcttccttgatcttcttagcacagtacagccaagggttgtgaactggaaagttgttactaaaggggaaactgatgaggacaagaagctgaatgctacctacatcattagtgttgcaaggaagattggatgctctgtgtttctgttgccagaggacatcattgaggtgaatcagaagatgatcctaacacttactgctagcattatgtattggagcctacagaaacagccccagtcacagtctgaattgacagaacaatcagaaccatctagcatgacttctgacgcagcctctgaagttgcctcggaggatggtgcttcaacgacagcaccgtccgagtcagaagaggtgaactcgctgtctgatagcatatcgaatttgacaacggatgatgctacttcaaacgccccatctgctgaaaacggaaatggtgtggcagggtcctgatggttatgattatgcaaaccctgttctttttttccccatacagtgctgttacaggaaatagtgctttcatgatgcccaaagttgtcgctaccagaagcgatatttttaatacttctgcttcctgagcatggtagcttgatagatacaacagtcacagatagatatagatgccttttgttcattggatccgcttatactatagtgggggaagataatagtatgtgtcgctggctgggtattttctgtatttctggcatacacccatgcaaaatttactacctcctctgtatcttatcggtcaattcgttcatatgtttattggactagtcaaagcttgtaatgctgttgctgctctgaaccgtgcctgtacataacatatgcttaaaaaggttttgcattgtcctttagtttctgtttgtactgc

SEQ ID NO: 51283 - DNA, 2676 bp, Zea Mays
ctcgtctccaccacttcccctctgcgcctcggcccccacgaaatctggagaccaggacgccattgctcaccttttccgtccagcgcaaggaaaccgcgcgccagagaggccgcttcaggcgcgcgtggaatcgccccgtggccggcggggatgtccggattcgtcggggtcgtcgtgtccgacccttcgctgcaggggcagttcacgcaggtcgagctccgatcgctcaaggccaagttcgtgtctctgaagagagattccggccatgtcaccactaagaacctgccggggctgatgaagaagctgagggggctcaatgaggtggtctccgaggaggagatcgcggccttcctgtcggagtcgtaccctgatagcgatcacgagattgaattcgaatccttcctccgggagtatcttaatctgcaggctcaggtgagtgccaaggaaggtggtgccggcggtggcaggggtggcaagccgtcgtttctcaagtccagcatcactacgctgctgcacaatctcaaccaggcagagaaatcttcgtatgtcgcacacatcaatacttacctccgtgaagacccattcctgaagaagtacttgcccatcgaaccgtctggaaatcagctgttcgatctcatccgggatggggttctgctctgcaaactgatcaatgtagctgtacctgggaccattgatgagagagcgataaataagaaaagagttcttaacccatgggagagaaacgaaaaccacacactctgcctcaattctgccaaggccattggatgtactgttgtcaacattggcacacaggatttggtggagggaaggcctcatttagttcttggattgatatcacaaatcataaagctgatctgaatctcaagaagacaccgcagctggtggagctatttgatgacagcaaggatatagatgaggttttgagcttgtcaccagaaaagatgctacttcggtggatgaaccatcatctgaaaaaagctggctacaagaaaactgttaacaatttctcttcagatgtcaaggatggtgaagcctatgcttaccttttgaaagctcttgctccagagcattcccctgaaactacattggacaccaaggatccgaacgaaagggcaaaactagtacttgaacaagcagagaagttggactgtaagagatacttgaccccaaaggatatcactgagggatctgccaatctaaatcttgcatttgttgcacaaatattccagcacaggaatggtctgaccagtgacaccaaacaagttaccctcacacagacagcaacacatgatgatgttctattatctagagaagaaagagcctttcgaatgtggatcaacagccttggggttgaatcatatgtgaacaatgtcttcgaagatgttcgcaacggatgggtacttcttgaagtgcttgacaaggtgtctcatggatctgtcaattggaagctggcatcaaaacctccaattaaattgccatttagaaaactggagaattgcaaccaagttgtaaaaattgggaagcagttaaagttttctttagtaaatctagctggaaacgatattgttcagggaaacaagaaattgattgttgcacttctgtggcaattgatgagattcaatatcctccagctgttaaacaaactgagattccactcccaagggtccgaaggaaaagaaatttctgatgccgatattctaaactgggccaactgcaaagtgaaggcatccggaagaacatctcgtatagaaagtttcaaggacaagagcttatcgaatggaatgttcttccttgatcttcttagcacagtacagccaagggttgtgaactggaaagttgttactaaaggggaaactgatgaggacaagaagctgaatgctacctacatcattagtgttgcaaggaagattggatgctctgtgtttctgttgccagaggacatcattgaggtgaatcagaagatgatcctaacacttactgctagcattatgtattggagcctacagaaacagccccagtcacagtctgaattgacagaacaatcagaaccatctagcatgacttctgacgcagcctctgaagttgcctcggaggatggtgcttcaacgacagcaccgtccgagtcagaagaggtgaactcgctgtctgatagcatatcgaatttgacaacggatgatgctacttcaaacgccccatctgctgaaaacggaaatggtgtggcagggtcctgatggttatgattatgcaaaccctgttctttttttccccatacagtgctgttacaggaaatagtgctttcatgatgcccaaagttgtcgctaccagaagcgatatttttaatacttctgcttcctgagcatggtagcttgatagatacaacagtcacagatagatatagatgccttttgttcattggatccgcttatactatagtgggggaagataatagtatgtgtcgctggctgggtattttctgtatttctggcatacacccatgcaaaatttactacctcctctgtatcttatcggtcaattcgttcatatgtttattggactagtcaaagcttgtaatgctgttgctgctctgaaccgtgcctgtacataacatatgcttaaaaaggttttgcattgtcctttagtttctgtttgtactgc

SEQ ID NO: 51284 - DNA, 2455 bp, Zea Mays
cttcgttcccctacctctgcgccggaaactgcagttgttcgccagaacctgccggggctgatgaagaagctgagggggctcaatgaggtggtctccgaggaggagatcgcggccttcctgtcggagtcgtaccctgatagcgatcacgagattgaattcgaatccttcctccgggagtatcttaatctgcaggctcaggtgagtgccaaggaaggtggtgccggcggtggcaggggtggcaagccgtcgtttctcaagtccagcatcactacgctgctgcacaatctcaaccaggcagagaaatcttcgtatgtcgcacacatcaatacttacctccgtgaagacccattcctgaagaagtacttgcccatcgaaccgtctggaaatcagctgttcgatctcatccgggatggggttctgctctgcaaactgatcaatgtagctgtacctgggaccattgatgagagagcgataaataagaaaagagttcttaacccatgggagagaaacgaaaaccacacactctgcctcaattctgccaaggccattggatgtactgttgtcaacattggcacacaggatttggtggagggaaggcctcatttagttcttggattgatatcacaaatcataaagattcaacttttagctgatctgaatctcaagaagacaccgcagctggtggagctatttgatgacagcaaggatatagatgaggttttgagcttgtcaccagaaaagatgctacttcggtggatgaaccatcatctgaaaaaagctggctacaagaaaactgttaacaatttctcttcagatgtcaaggatggtgaagcctatgcttaccttttgaaagctcttgctccagagcattcccctgaaactacattggacaccaaggatccgaacgaaagggcaaaactagtacttgaacaagcagagaagttggactgtaagagatacttgaccccaaaggatatcactgagggatctgccaatctaaatcttgcatttgttgcacaaatattccagcacaggaatggtctgaccagtgacaccaaacaagttaccctcacacagacagcaacacatgatgatgttctattatctagagaagaaagagcctttcgaatgtggatcaacagccttggggttgaatcatatgtgaacaatgtcttcgaagatgttcgcaacggatgggtacttcttgaagtgcttgacaaggtgtctcatggatctgtcaattggaagctggcatcaaaacctccaattaaattgccatttagaaaactggagaattgcaaccaagttgtaaaaattgggaagcagttaaagttttctttagtaaatctagctggaaacgatattgttcagggaaacaagaaattgattgttgcacttctgtggcaattgatgagattcaatatcctccagctgttaaacaaactgagattccactcccaagggtccgaaggaaaagaaatttctgatgccgatattctaaactgggccaactgcaaagtgaaggcatccggaagaacatctcgtatagaaagtttcaaggacaagagcttatcgaatggaatgttcttccttgatcttcttagcacagtacagccaagggttgtgaactggaaagttgttactaaaggggaaactgatgaggacaagaagctgaatgctacctacatcattagtgttgcaaggaagattggatgctctgtgtttctgttgccagaggacatcattgaggtgaatcagaagatgatcctaacacttactgctagcattatgtattggagcctacagaaacagccccagtcacagtctgaattgacagaacaatcagaaccatctagcatgacttctgacgcagcctctgaagttgcctcggaggatggtgcttcaacgacagcaccgtccgagtcagaagaggtgaactcgctgtctgatagcatatcgaatttgacaacggatgatgctacttcaaacgccccatctgctgaaaacggaaatggtgtggcagggtcctgatggttatgattatgcaaaccctgttctttttttccccatacagtgctgttacaggaaatagtgctttcatgatgcccaaagttgtcgctaccagaagcgatatttttaatacttctgcttcctgagcatggtagcttgatagatacaacagtcacagatagatatagatgccttttgttcattggatccgcttatactatagtgggggaagataatagtatgtgtcgctggctgggtattttctgtatttctggcatacacccatgcaaaatttactacctcctctgtatcttatcggtcaattcgttcatatgtttattggactagtcaaagcttgtaatgctgttgctgctctgaaccgtgcctgtacataacatatgcttaaaaaggttttgcattgtcctttagtttctgtttgtactgc

SEQ ID NO: 51285 - DNA, 2442 bp, Zea Mays
cttcgttcccctacctctgcgccggaaactgcagttgttcgccagaacctgccggggctgatgaagaagctgagggggctcaatgaggtggtctccgaggaggagatcgcggccttcctgtcggagtcgtaccctgatagcgatcacgagattgaattcgaatccttcctccgggagtatcttaatctgcaggctcaggtgagtgccaaggaaggtggtgccggcggtggcaggggtggcaagccgtcgtttctcaagtccagcatcactacgctgctgcacaatctcaaccaggcagagaaatcttcgtatgtcgcacacatcaatacttacctccgtgaagacccattcctgaagaagtacttgcccatcgaaccgtctggaaatcagctgttcgatctcatccgggatggggttctgctctgcaaactgatcaatgtagctgtacctgggaccattgatgagagagcgataaataagaaaagagttcttaacccatgggagagaaacgaaaaccacacactctgcctcaattctgccaaggccattggatgtactgttgtcaacattggcacacaggatttggtggagggaaggcctcatttagttcttggattgatatcacaaatcataaagctgatctgaatctcaagaagacaccgcagctggtggagctatttgatgacagcaaggatatagatgaggttttgagcttgtcaccagaaaagatgctacttcggtggatgaaccatcatctgaaaaaagctggctacaagaaaactgttaacaatttctcttcagatgtcaaggatggtgaagcctatgcttaccttttgaaagctcttgctccagagcattcccctgaaactacattggacaccaaggatccgaacgaaagggcaaaactagtacttgaacaagcagagaagttggactgtaagagatacttgaccccaaaggatatcactgagggatctgccaatctaaatcttgcatttgttgcacaaatattccagcacaggaatggtctgaccagtgacaccaaacaagttaccctcacacagacagcaacacatgatgatgttctattatctagagaagaaagagcctttcgaatgtggatcaacagccttggggttgaatcatatgtgaacaatgtcttcgaagatgttcgcaacggatgggtacttcttgaagtgcttgacaaggtgtctcatggatctgtcaattggaagctggcatcaaaacctccaattaaattgccatttagaaaactggagaattgcaaccaagttgtaaaaattgggaagcagttaaagttttctttagtaaatctagctggaaacgatattgttcagggaaacaagaaattgattgttgcacttctgtggcaattgatgagattcaatatcctccagctgttaaacaaactgagattccactcccaagggtccgaaggaaaagaaatttctgatgccgatattctaaactgggccaactgcaaagtgaaggcatccggaagaacatctcgtatagaaagtttcaaggacaagagcttatcgaatggaatgttcttccttgatcttcttagcacagtacagccaagggttgtgaactggaaagttgttactaaaggggaaactgatgaggacaagaagctgaatgctacctacatcattagtgttgcaaggaagattggatgctctgtgtttctgttgccagaggacatcattgaggtgaatcagaagatgatcctaacacttactgctagcattatgtattggagcctacagaaacagccccagtcacagtctgaattgacagaacaatcagaaccatctagcatgacttctgacgcagcctctgaagttgcctcggaggatggtgcttcaacgacagcaccgtccgagtcagaagaggtgaactcgctgtctgatagcatatcgaatttgacaacggatgatgctacttcaaacgccccatctgctgaaaacggaaatggtgtggcagggtcctgatggttatgattatgcaaaccctgttctttttttccccatacagtgctgttacaggaaatagtgctttcatgatgcccaaagttgtcgctaccagaagcgatatttttaatacttctgcttcctgagcatggtagcttgatagatacaacagtcacagatagatatagatgccttttgttcattggatccgcttatactatagtgggggaagataatagtatgtgtcgctggctgggtattttctgtatttctggcatacacccatgcaaaatttactacctcctctgtatcttatcggtcaattcgttcatatgtttattggactagtcaaagcttgtaatgctgttgctgctctgaaccgtgcctgtacataacatatgcttaaaaaggttttgcattgtcctttagtttctgtttgtactgc

SEQ ID NO: 51286 - DNA, 4068 bp, Zea Mays
cctacacctgcgactataatccccctcatcgccagccccctcgtctcgtctcccccctccgcttcgcccatctcatcgccatctcactcccgaacccacttcctttccttcccgcgtctaattgagcgccaaagcggggggcatttgaattccccggaacttccacttccagtggcttctcgaaccttccggaggcgctgccggccggccggctccggctctacttcttccccctagggtttcgcgtttccctcggggatgggggacgcccccgccgccgcggcggcagcgtcgcccgcttgtgccgcgcagaagcggagacgcggcgatgatggcgcggggctgaggcgggtggcggagatcgtgatggtgttggccgcggccggggaggtgcgcggcgggatggagcccacggcggcggagcgggcactcgcggccgaggcacgggagacgctggccgccgccgttgccgagggggccgtgcggcccaaggatctgttctcggtggaggcggtgcgcgcggtcgtcgaggatctcgggctcaaccgcgccaaggacccagctgccatggggtttcgcccgcccaaggcctccatcgccgataggcttatgcttactaagcgcaagatggaagaagtgaaggaagctccagtgcaatcaacagttagcgcacctcaaacagtcgtttcaagtggaatgtctgacttccatggtttgaatggggctactaagtttggtgttggagttcctagggacccaccagttccatctataaccgctagtgccccattaacctctacatccccagctaccttgaaaccaccagaatcatttcctgtaaaaccagtttccaactcatcggttgttcctgtactctattctggtccatcaaaccttaaatcggacaaaaatgtcagtggtcctctgaatttagcacacactggagcaactgttgtccactcaaacaagtcaactgtagatgcatctgctaggtccagtgtaaatgcttccaatcagatggtgaaaaaccaggacacaaaaccagtgacagttcaagccatggcaggtaatcctgctacggggcatcgtgctacacctactttcatcaatcacaatgagatagcaaagaatgttcaacagtttctgcaccaacctgcaaacaatcctagctggactccaccatcaactgattacatgcattctcgcttgagttgtcaaatatgcaaagttgttatcattggtacagacagtttacttgtttgtgatgcttgtgagaggggagtacatttgaaatgccttcagcagtatggcaataagggtgtccctaaagctgagtggcattgttctgcatgcctgactcagagtaagggcaaacccttaccaccaaaatatggcaaggttacaagaactgtagttgcatcaaaggctgctccacctggtggtggggcacagctttctttgcagggatcagcagaaaacatggcttcaaaggaaaatcaccaaaagttggctgcaaatgggaatcttatgaaaccaatctctattcaaggtggtagcacagcacccaacagtaatgtattggcactgagtgccatcacggctggttcacaatcacaattagtttctaccttgagaccatcaagagttgttaaagctgaaatgttctctattggaaaagaaggaactgggcaaccgtgcaatactacaatacaaccagctgtgagatcatcccctcttaacaaaagattgagaagtgattcctctttgaaccctgcagattccgcaaatgatatcatgcatggtaagtatactacagaaatttccggtgctgaagcaaaggtcaagtctgaagtgaactatgaggcctctgtgagtagagatgaggaattggttgatagtagtggaacatcaattgaaactgaacaaacaaaggttggtgctagtgaagaaaagcccaggacacaatcaacctttgagacagataaagtgaaagatggggggacgactaccaacacaggaacagcaacagatcaatgcagcaacttcggtactgaagaaaatctccccggtgaaataacttctgaggcacataaaatcactgacgtgaagatgactagcaatactggaacatctgtacagcaaagcaacattgatagtattgaagagaaggccagccagatcgatgcagtttctgatccacatgcacatataatccaagatatgggaatggacaccaacaatggaccaccagtagctgaaagcggcagtcctgttgctgaagaaaagccccccgaacaatcctcttcaattggtgatgtgtgtgtcaccgctaatgctggaattccaacagatcaaacacaacatccaaatgggtcaactgaaaatgtagtcaggaaatctcccaacagagaactatatgaagagaaatcaggcaggctgtaatgtagtctcacccaaaggacaaaactttatgttttcatgaagatgaagcagtgggttgtgacacagaagcaatagaaaaggcaaactaatttagtaggaggttgcaccaattttcgtttttttttcagatggaactatgctgaatctaccatttatttaccaacatcagtgatcaactgtgttctcgacattctcttggataacattatacatttagccatcgccaaccatttttacaggatgtttattctatgccccttggaaacatgctcaccagacctactccagtcttgttcaggctttgtttggtagcaagtgtaatggagggggttaggattccttactattgaaaattgaatagtaagggattctagccccctcaatcccctctattacactcgctcccaaataaggacagaaggtttcaccacattttctgcaaaaatagttacgttcctgctgacgtaagggttactaaattctgcaggaatccactgtcgccctgtgtggtaagagaatcctagaacacaggagactgtgcctgattgccacaatctgtacaagaattcattcacatatcacagtcttcaacgggacaggcctttggattttgatgaggcaaaccaatatctagagaaatgtgaaagagataaatcgcgtgttcttgttcattgcatgactggaaaaaacaggtctgctgctattgttgcagccttcttgatgaagtctagagggtggagacttgcacaatcttttcaatgggtgaaagatcgaagaccacaggttcaactgacagatgcttctcagaaggagcttttggagtatgagctgaagcttttcggacccagtactcaaaccttggttcccactgaatcatttgcttctcttggatttggttatacaaaaccagcaggtgacatgcaaacgcctgtgttcaaccaaacgaccatgccatccatattcgagcgattcaacccaaatgatcgccccaccaatttcacttttggagttgagaggaaagcagaagctaaccctcgagataacaatagtgatggcagggtaaacccaacttcaacggagaacctgatggacagctcttaagatgatttcacgatgtcgctgttgaatctccttgttccagaagtaaacccgctgtaatctgcatgtcgcggaagtaaacctactgctcggtgcctcggtgcaccgaatacttatccggtgtctaggtttcagggaggttttgcccttgtcgcatgagaaatggttctctggaaaccgatctttgctttagaatgactgtatgaaatagatgtttgtggctcatctatctgttcctttctcgtatagtttctgattgctacatatgaataaggcatagtgcttaccagtcgggtcgtttgtttggtcatgtatatatgtagtcgtccgtaaaaggagagagatggagagatttttcaggtcggcagctggtggtgacgtgatgagttttagatctttagtctaacgcaacaggagattaagaatctagattatcacctttttagttcgaaggtttgagaattaatgacagattgataaataaggtaaacagttatttatttatttatttatttattttagtttgtg

SEQ ID NO: 51287 - DNA, 4042 bp, Zea Mays
ctacacctgcgactataatccccctcatcgccagccccctcgtctcgtctcccccctccgcttcgcccatctcatcgccatctcactcccgaacccacttcctttccttcccgcgtctaattgagcgccaaagcggggggcatttgaattccccggaacttccacttccagtggcttctcgaaccttccggaggcgctgccggccggccggctccggctctacttcttccccctagggtttcgcgtttccctcggggatgggggacgcccccgccgccgcggcggcagcgtcgcccgcttgtgccgcgcagaagcggagacgcggcgatgatggcgcggggctgaggcgggtggcggagatcgtgatggtgttggccgcggccggggaggtgcgcggcgggatggagcccacggcggcggagcgggcactcgcggccgaggcacgggagacgctggccgccgccgttgccgagggggccgtgcggcccaaggatctgttctcggtggaggcggtgcgcgcggtcgtcgaggatctcgggctcaaccgcgccaaggacccagctgccatggggtttcgcccgcccaaggcctccatcgccgataggcttatgcttactaagcgcaagatggaagaagtgaaggaagctccagtgcaatcaacagttagcgcacctcaaacagtcgtttcaagtggaatgtctgacttccatggtttgaatggggctactaagtttggtgttggagttcctagggacccaccagttccatctataaccgctagtgccccattaacctctacatccccagctaccttgaaaccaccagaatcatttcctgtaaaaccagtttccaactcatcggttgttcctgtactctattctggtccatcaaaccttaaatcggacaaaaatgtcagtggtcctctgaatttagcacacactggagcaactgttgtccactcaaacaagtcaactgtagatgcatctgctaggtccagtgtaaatgcttccaatcagatggtgaaaaaccaggacacaaaaccagtgacagttcaagccatggcaggtaatcctgctacggggcatcgtgctacacctactttcatcaatcacaatgagatagcaaagaatgttcaacagtttctgcaccaacctgcaaacaatcctagctggactccaccatcaactgattacatgcattctcgcttgagttgtcaaatatgcaaagttgttatcattggtacagacagtttacttgtttgtgatgcttgtgagaggggagtacatttgaaatgccttcagcagtatggcaataagggtgtccctaaagctgagtggcattgttctgcatgcctgactcagagtaagggcaaacccttaccaccaaaatatggcaaggttacaagaactgtagttgcatcaaaggctgctccacctggtggtggggcacagctttctttgcagggatcagcagaaaacatggcttcaaaggaaaatcaccaaaagttggctgcaaatgggaatcttatgaaaccaatctctattcaaggtggtagcacagcacccaacagtaatgtattggcactgagtgccatcacggctggttcacaatcacaattagtttctaccttgagaccatcaagagttgttaaagctgaaatgttctctattggaaaagaaggaactgggcaaccgtgcaatactacaatacaaccagctgtgagatcatcccctcttaacaaaagattgagaagtgattcctctttgaaccctgcagattccgcaaatgatatcatgcatggtaagtatactacagaaatttccggtgctgaagcaaaggtcaagtctgaagtgaactatgaggcctctgtgagtagagatgaggaattggttgatagtagtggaacatcaattgaaactgaacaaacaaaggttggtgctagtgaagaaaagcccaggacacaatcaacctttgagacagataaagtgaaagatggggggacgactaccaacacaggaacagcaacagatcaatgcagcaacttcggtactgaagaaaatctccccggtgaaataacttctgaggcacataaaatcactgacgtgaagatgactagcaatactggaacatctgtacagcaaagcaacattgatagtattgaagagaaggccagccagatcgatgcagtttctgatccacatgcacatataatccaagatatgggaatggacaccaacaatggaccaccagtagctgaaagcggcagtcctgttgctgaagaaaagccccccgaacaatcctcttcaattggtgatgtgtgtgtcaccgctaatgctggaattccaacagatcaaacacaacatccaaatgggtcaactgaaaatgtagtcaggaaatctcccaacagagaactatatgaagagaaatcaggcaggctgtaatgtagtctcacccaaaggacaaaactttatgttttcatgaagatgaagcagtgggttgtgacacagaagcaatagaaaaggcaaactaatttagtaggaggttgcaccaattttcgtttttttttcagatggaactatgctgaatctaccatttatttaccaacatcagtgatcaactgtgttctcgacattctcttggataacattatacatttagccatcgccaaccatttttacaggatgtttattctatgccccttggaaacatgctcaccagacctactccagtcttgttcaggctttgtttggtagcaagtgtaatggagggggttaggattccttactattgaaaattgaatagtaagggattctagccccctcaatcccctctattacactcgctcccaaataaggacagaaggtttcaccacattttctgcaaaaatagttacgttcctgctgacgtaagggttactaaattctgcaggaatccactgtcgccctgtgtgactgtgcctgattgccacaatctgtacaagaattcattcacatatcacagtcttcaacgggacaggcctttggattttgatgaggcaaaccaatatctagagaaatgtgaaagagataaatcgcgtgttcttgttcattgcatgactggaaaaaacaggtctgctgctattgttgcagccttcttgatgaagtctagagggtggagacttgcacaatcttttcaatgggtgaaagatcgaagaccacaggttcaactgacagatgcttctcagaaggagcttttggagtatgagctgaagcttttcggacccagtactcaaaccttggttcccactgaatcatttgcttctcttggatttggttatacaaaaccagcaggtgacatgcaaacgcctgtgttcaaccaaacgaccatgccatccatattcgagcgattcaacccaaatgatcgccccaccaatttcacttttggagttgagaggaaagcagaagctaaccctcgagataacaatagtgatggcagggtaaacccaacttcaacggagaacctgatggacagctcttaagatgatttcacgatgtcgctgttgaatctccttgttccagaagtaaacccgctgtaatctgcatgtcgcggaagtaaacctactgctcggtgcctcggtgcaccgaatacttatccggtgtctaggtttcagggaggttttgcccttgtcgcatgagaaatggttctctggaaaccgatctttgctttagaatgactgtatgaaatagatgtttgtggctcatctatctgttcctttctcgtatagtttctgattgctacatatgaataaggcatagtgcttaccagtcgggtcgtttgtttggtcatgtatatatgtagtcgtccgtaaaaggagagagatggagagatttttcaggtcggcagctggtggtgacgtgatgagttttagatctttagtctaacgcaacaggagattaagaatctagattatcacctttttagttcgaaggtttgagaattaatgacagattgataaataaggtaaacagttatttatttatttatttatttattttagtttgtg

SEQ ID NO: 51288 - DNA, 1628 bp, Zea Mays
aatccgtgtcaagcctcaagcgtgaagctatccgtacgatcggataacgaggcggtcccacctcccacggacatccccgtccccaccgatttgtttgtcatcactcgtcactcatcactcatcagctattcttctcttctcctggacaactcaagctcaaaacccaaaatcgaccttgtcgacccggatccgagctaggcacccgcacgaccacccgcctcctgccggtcaccgggacctagcatcgccgggcggcggcgggggaggggaaggtaggcgatgaggaaacgtgagcgggagaacccgtgcgggatctgcgggcactaccacaagtacgaggagggggaggtatgcggggtgtgcggccaccgctggaaaccgtcggacggggagggcgccccgtcgaggcacgagtccgccttccccacagaggtgctcaaggactttctcttcctcgggagctacgacaacgcctcacgctccgaggtcctcagaacgctcagtatctcccacatccttaattatttgcttaacagactgtgcctgattgccacaatctgtacaagaattcattcacatatcacagtcttcaacgggacaggcctttggattttgatgaggcaaaccaatatctagagaaatgtgaaagagataaatcgcgtgttcttgttcattgcatgactggaaaaaacaggtctgctgctattgttgcagccttcttgatgaagtctagagggtggagacttgcacaatcttttcaatgggtgaaagatcgaagaccacaggttcaactgacagatgcttctcagaaggagcttttggagtatgagctgaagcttttcggacccagtactcaaaccttggttcccactgaatcatttgcttctcttggatttggttatacaaaaccagcaggtgacatgcaaacgcctgtgttcaaccaaacgaccatgccatccatattcgagcgattcaacccaaatgatcgccccaccaatttcacttttggagttgagaggaaagcagaagctaaccctcgagataacaatagtgatggcagggtaaacccaacttcaacggagaacctgatggacagctcttaagatgatttcacgatgtcgctgttgaatctccttgttccagaagtaaacccgctgtaatctgcatgtcgcggaagtaaacctactgctcggtgcctcggtgcaccgaatacttatccggtgtctaggtttcagggaggttttgcccttgtcgcatgagaaatggttctctggaaaccgatctttgctttagaatgactgtatgaaatagatgtttgtggctcatctatctgttcctttctcgtatagtttctgattgctacatatgaataaggcatagtgcttaccagtcgggtcgtttgtttggtcatgtatatatgtagtcgtccgtaaaaggagagagatggagagatttttcaggtcggcagctggtggtgacgtgatgagttttagatctttagtctaacgcaacaggagattaagaatctagattatcacctttttagttcgaaggtttgagaattaatgacagattgataaataaggtaaacagttatttatttatttatttatttattttagtttgtg

SEQ ID NO: 51289 - DNA, 2827 bp, Zea Mays
aatccgtgtcaagcctcaagcgtgaagctatccgtacgatcggataacgaggcggtcccacctcccacggacatccccgtccccaccgatttgtttgtcatcactcgtcactcatcactcatcagctattcttctcttctcctggacaactcaagctcaaaacccaaaatcgaccttgtcgacccggatccgagctaggcacccgcacgaccacccgcctcctgccggtcaccgggacctagcatcgccgggcggcggcgggggaggggaaggtaggcgatgaggaaacgtgagcgggagaacccgtgcgggatctgcgggcactaccacaagtacgaggagggggaggtatgcggggtgtgcggccaccgctggaaaccgtcggacggggagggcgccccgtcgaggcacgagtccgccttccccacagaggtgctcaaggactttctcttcctcgggagctacgacaacgcctcacgctccgaggtcctcagaacgctcagtatctcccacatccttaatgtacgtattcaagccctattttctagatgatccacatccccttccttgtttgtgattattaaatccggcgtcttcaaagctggagatcgattccccgtccaaatagaactaaagaagctggtgagcgatagcagtacagtaccgctggcgctatctagggtttggcattttatgaccatccatggtctattcaggacagtttggtcaatctatagcttgtcatcttctacaggatagaccacagactattaatttgtactgctgttgcttgaaaggttacatttgtaggtttagtttatagcaaacagaacgagaatgtgtttttgtacagtcttgttaattatttactcaagtggaaagcgggttcaagtgaagaaagaacaagcagaacatgggaaggcaactaatatgaggactttatttgaacagttaaactggatgcgaaactcaaacaggggtatttgacaattgaatgatgtggactgtggagcttgattgattaggaagaagaaaaccagttcacttgtgataattggtagttagcgaatatttaaggaacgaggcgtagcctgcggtgatgattacgcatatttagcttcttattcgactagtattcctatggtatcagaaattaacaggacctgatatggaagtggcttgattgttcacctgagataatttggaacaggcgtgatggttatggaatgatgctaattaattttcgtgacacggtgctaagtatggttcattatgttccataaatgtcaaccatgttacaactgctagttgaatttgacatataatcttcatagtagatagatggatgctgtttggttcagtggcatactctgtttcaaattatagtctgttttggcttttctagatacatatgtatctggacatagcatatatctaggtgcggagcaaaagctatgtaactacaaaagaaaaaaaacgacctaatttgggacagagggaatagttatgttgctgtcatgttgatgatgtacaacatgttcacgtctattattatttctggctagtttctcaatatggttactatcttgtgaatctgtaggctcaggtacctgacagtcaaccttttgtatattcctgcctcactgttaaaatcagatgttgcccttgactgtttagcacttgcttcagtatgataattgaagattaattactatgtttagtatttgcttaacagactgtgcctgattgccacaatctgtacaagaattcattcacatatcacagtcttcaacgggacaggcctttggattttgatgaggcaaaccaatatctagagaaatgtgaaagagataaatcgcgtgttcttgttcattgcatgactggaaaaaacaggtctgctgctattgttgcagccttcttgatgaagtctagagggtggagacttgcacaatcttttcaatgggtgaaagatcgaagaccacaggttcaactgacagatgcttctcagaaggagcttttggagtatgagctgaagcttttcggacccagtactcaaaccttggttcccactgaatcatttgcttctcttggatttggttatacaaaaccagcaggtgacatgcaaacgcctgtgttcaaccaaacgaccatgccatccatattcgagcgattcaacccaaatgatcgccccaccaatttcacttttggagttgagaggaaagcagaagctaaccctcgagataacaatagtgatggcagggtaaacccaacttcaacggagaacctgatggacagctcttaagatgatttcacgatgtcgctgttgaatctccttgttccagaagtaaacccgctgtaatctgcatgtcgcggaagtaaacctactgctcggtgcctcggtgcaccgaatacttatccggtgtctaggtttcagggaggttttgcccttgtcgcatgagaaatggttctctggaaaccgatctttgctttagaatgactgtatgaaatagatgtttgtggctcatctatctgttcctttctcgtatagtttctgattgctacatatgaataaggcatagtgcttaccagtcgggtcgtttgtttggtcatgtatatatgtagtcgtccgtaaaaggagagagatggagagatttttcaggtcggcagctggtggtgacgtgatgagttttagatctttagtctaacgcaacaggagattaagaatctagattatcacctttttagttcgaaggtttgagaattaatgacagattgataaataaggtaaacagttatttatttatttatttatttattttagtttgtg

SEQ ID NO: 51290 - DNA, 1578 bp, Zea Mays
aatccgtgtcaagcctcaagcgtgaagctatccgtacgatcggataacgaggcggtcccacctcccacggacatccccgtccccaccgatttgtttgtcatcactcgtcactcatcactcatcagctattcttctcttctcctggacaactcaagctcaaaacccaaaatcgaccttgtcgacccggatccgagctaggcacccgcacgaccacccgcctcctgccggtcaccgggacctagcatcgccgggcggcggcgggggaggggaaggtaggcgatgaggaaacgtgagcgggagaacccgtgcgggatctgcgggcactaccacaagtacgaggagggggaggtatgcggggtgtgcggccaccgctggaaaccgtcggacggggagggcgccccgtcgaggcacgagtccgccttccccacagaggtgctcaaggactttctcttcctcgggagctacgacaacgcctcacgctccgagactgtgcctgattgccacaatctgtacaagaattcattcacatatcacagtcttcaacgggacaggcctttggattttgatgaggcaaaccaatatctagagaaatgtgaaagagataaatcgcgtgttcttgttcattgcatgactggaaaaaacaggtctgctgctattgttgcagccttcttgatgaagtctagagggtggagacttgcacaatcttttcaatgggtgaaagatcgaagaccacaggttcaactgacagatgcttctcagaaggagcttttggagtatgagctgaagcttttcggacccagtactcaaaccttggttcccactgaatcatttgcttctcttggatttggttatacaaaaccagcaggtgacatgcaaacgcctgtgttcaaccaaacgaccatgccatccatattcgagcgattcaacccaaatgatcgccccaccaatttcacttttggagttgagaggaaagcagaagctaaccctcgagataacaatagtgatggcagggtaaacccaacttcaacggagaacctgatggacagctcttaagatgatttcacgatgtcgctgttgaatctccttgttccagaagtaaacccgctgtaatctgcatgtcgcggaagtaaacctactgctcggtgcctcggtgcaccgaatacttatccggtgtctaggtttcagggaggttttgcccttgtcgcatgagaaatggttctctggaaaccgatctttgctttagaatgactgtatgaaatagatgtttgtggctcatctatctgttcctttctcgtatagtttctgattgctacatatgaataaggcatagtgcttaccagtcgggtcgtttgtttggtcatgtatatatgtagtcgtccgtaaaaggagagagatggagagatttttcaggtcggcagctggtggtgacgtgatgagttttagatctttagtctaacgcaacaggagattaagaatctagattatcacctttttagttcgaaggtttgagaattaatgacagattgataaataaggtaaacagttatttatttatttatttatttattttagtttgtg

SEQ ID NO: 51291 - DNA, 1598 bp, Zea Mays
aatccgtgtcaagcctcaagcgtgaagctatccgtacgatcggataacgaggcggtcccacctcccacggacatccccgtccccaccgatttgtttgtcatcactcgtcactcatcactcatcagctattcttctcttctcctggacaactcaagctcaaaacccaaaatcgaccttgtcgacccggatccgagctaggcacccgcacgaccacccgcctcctgccggtcaccgggacctagcatcgccgggcggcggcgggggaggggaaggtaggcgatgaggaaacgtgagcgggagaacccgtgcgggatctgcgggcactaccacaagtacgaggagggggaggtatgcggggtgtgcggccaccgctggaaaccgtcggacggggagggcgccccgtcgaggcacgagtccgccttccccacagaggtgctcaaggactttctcttcctcgggagctacgacaacgcctcacgctccgaggtcctcagaacgctcagtatctcccacatccttaatactgtgcctgattgccacaatctgtacaagaattcattcacatatcacagtcttcaacgggacaggcctttggattttgatgaggcaaaccaatatctagagaaatgtgaaagagataaatcgcgtgttcttgttcattgcatgactggaaaaaacaggtctgctgctattgttgcagccttcttgatgaagtctagagggtggagacttgcacaatcttttcaatgggtgaaagatcgaagaccacagcttctcagaaggagcttttggagtatgagctgaagcttttcggacccagtactcaaaccttggttcccactgaatcatttgcttctcttggatttggttatacaaaaccagcaggtgacatgcaaacgcctgtgttcaaccaaacgaccatgccatccatattcgagcgattcaacccaaatgatcgccccaccaatttcacttttggagttgagaggaaagcagaagctaaccctcgagataacaatagtgatggcagggtaaacccaacttcaacggagaacctgatggacagctcttaagatgatttcacgatgtcgctgttgaatctccttgttccagaagtaaacccgctgtaatctgcatgtcgcggaagtaaacctactgctcggtgcctcggtgcaccgaatacttatccggtgtctaggtttcagggaggttttgcccttgtcgcatgagaaatggttctctggaaaccgatctttgctttagaatgactgtatgaaatagatgtttgtggctcatctatctgttcctttctcgtatagtttctgattgctacatatgaataaggcatagtgcttaccagtcgggtcgtttgtttggtcatgtatatatgtagtcgtccgtaaaaggagagagatggagagatttttcaggtcggcagctggtggtgacgtgatgagttttagatctttagtctaacgcaacaggagattaagaatctagattatcacctttttagttcgaaggtttgagaattaatgacagattgataaataaggtaaacagttatttatttatttatttatttattttagtttgtg

SEQ ID NO: 51292 - DNA, 1043 bp, Zea Mays
gtcctctgcatgtcatcctaacaaattccatttttctacctgcctgttgaaagaaatgtgaaagagataaatcgcgtgttcttgttcattgcatgactggaaaaaacaggtctgctgctattgttgcagccttcttgatgaagtctagagggtggagacttgcacaatcttttcaatgggtgaaagatcgaagaccacaggttcaactgacagatgcttctcagaaggagcttttggagtatgagctgaagcttttcggacccagtactcaaaccttggttcccactgaatcatttgcttctcttggatttggttatacaaaaccagcaggtgacatgcaaacgcctgtgttcaaccaaacgaccatgccatccatattcgagcgattcaacccaaatgatcgccccaccaatttcacttttggagttgagaggaaagcagaagctaaccctcgagataacaatagtgatggcagggtaaacccaacttcaacggagaacctgatggacagctcttaagatgatttcacgatgtcgctgttgaatctccttgttccagaagtaaacccgctgtaatctgcatgtcgcggaagtaaacctactgctcggtgcctcggtgcaccgaatacttatccggtgtctaggtttcagggaggttttgcccttgtcgcatgagaaatggttctctggaaaccgatctttgctttagaatgactgtatgaaatagatgtttgtggctcatctatctgttcctttctcgtatagtttctgattgctacatatgaataaggcatagtgcttaccagtcgggtcgtttgtttggtcatgtatatatgtagtcgtccgtaaaaggagagagatggagagatttttcaggtcggcagctggtggtgacgtgatgagttttagatctttagtctaacgcaacaggagattaagaatctagattatcacctttttagttcgaaggtttgagaattaatgacagattgataaataaggtaaacagttatttatttatttatttatttattttagtttgtg

SEQ ID NO: 51293 - DNA, 2807 bp, Zea Mays
gtcatagagagccacaggccacaggcaggcaggaggatcggacgagtcagcgaggaagctgcctgctttcagatagagagagttattaagatggcgttgcttcggctgcttgccatctccctgctcttcgcagtggccactcctgtcagggacatcgcccacgatgcctgctcgtcagaagtgaaggatttccagcacctgaacaacagctcggggctccacctgacgctgcaccacccgcagagcccctgctccccggcgccgctgcccgccgacctccccttctccgcggtgctcgcccacgacggcgcgcgcgtcgcgtcgctcgccgcacgcctcgccaagacgccgtcctctcggcccaccttgcttgacgagagccgcgcggggtcgtcgtcgtcgtcgtcccccgatgacgagtcgtccctcgcgtccgtgccgctcggcccgggcacgtccgtcggcgtgggcaactacgtcacccgcatgggcctcggcgttctccatcctggacacgtgcttccagggccaggcggcgcggctgcgcgtgcccgaggtcaccatggccttcgcgggcggcgcggcgctcaagctggccgccaggaacctgctggtggacgtggacagcgccaccacgtgcctggccttcgcgcccgcccggagcgccgccatcatcgggaacacgcagcagcagacgttcagcgtcgtctacgacgtcaagaacagcaagatcgggttcgccgccggcggctgcagctgagaagcgacacctacatacacgcgcatgcacagaccgactcggtaactaaaactaaaacgaacagcgcatgcatgcatctaccgtccggtttcgtctgaaaccatcattaatttcgatcgtccactccacgcacagcaagttctttacggagcttgccgcatatgatatgtacatggtgacaagataaggtacaggagaattgatgaaagaagcgttgccggccagtcgtcgttgcacgagaacaaacacataaattaaaacattattacaggagtagggtatttattgtattgttcaggccagaaaaatatgtggaaagtgggtctttaacttaattcggaagaagcatatagcactccaaaaaaaaaaaaagattcatattcatcacatagccaacagatagcatgtagtagctgttcatgcatgttattcttttggcaagtcctggtcaggaagtactatttactgtgtgtaggacgaataaactgaagtgatgtgtatgtttctgatttctttcgtacttgcaaccccgggcccacgtggtttttttactcccttctatatatactgtggaaaatattgtaacccacgcacaagacacacactcctatgctatatatgttctatgcacaagacacactttgttaacgaacaaagagatcgatgatgcaaatatttatcactatatatatatggctattgttagtttcgtgccttttgcacgatgaatataatggttgaacatgcatgggacgaacaggtggttagcaaatctgtacaagaattcattcacatatcacagtcttcaacgggacaggcctttggattttgatgaggcaaaccaatatctagagaaatgtgaaagagataaatcgcgtgttcttgttcattgcatgactggaaaaaacaggtccgctgctattgttgcagccttcttgatgaagtctagagggtggagacttgcacagtcttttcaatgggtgaaagaccgaagaccacaggttcaactgacagatgcttctcagaaggagcttttggagtatgagctgaagcttttcggacccagtactcaaaccttggttcccactgaatcatttgcttctcttggatttggttatacaaaaccagcaggtgacatgcaaacgcctgtgttcaaccaaacgaccatgccatccatattcgagcgattcaacccaaatgatcgccccgccaatttcacttttggagttgagaggaaagcagaagctaaccctcaagataacaatagtgatggcagggtaaacccaacttcaacggagaacctgatggacagctcttaagatgatttcacgatgtcgctgttcaatctccttgttccagaagtaaacccgctgtaatctgcatgtcgcggaagtaaacctactgctcggtgcctcggcgcaccgaatacttatccggtgtctaggtttcagggaggttttgcccttgtcggatgagaaatggttctctggaaaccgatctttgctttagaatgactgtatgaaatagatgtttgtggctcatctatctgttcctttctcgtatagtttctgattgctattatatggataaggcatagtgcttactgcttaccagtcgggtcgtttatttggtcatgtatatatgtagtcgtccgtaaaaggagaggagagatttttcaggtcggcagctggtggtgacgtgatgagttttagatctttagtccaatgcaacaggagattaagaatctagattatcgcctttttagttcgaaggtttgagaattaatgacagattgataaggtaaacagttatttatttatttattttagtttgtgaacccaactgagtcaattttagagacctttagtcaggtgcattttactcttttactttctcaatatgatgtgtagactactctagaatttctacggatacaatcacgagcgatgtacctgacaatcatgagagatagcgtcatagcaatgtacctgacgagtgatgtagtcatgtacctggacggatcgtcgaccaactggacaaactcagg

SEQ ID NO: 51294 - DNA, 3276 bp, Zea Mays
gtcatagagagccacaggccacaggcaggcaggaggatcggacgagtcagcgaggaagctgcctgctttcagatagagagagttattaagatggcgttgcttcggctgcttgccatctccctgctcttcgcagtggccactcctgtcagggacatcgcccacgatgcctgctcgtcagaagtgaaggatttccagcacctgaacaacagctcggggctccacctgacgctgcaccacccgcagagcccctgctccccggcgccgctgcccgccgacctccccttctccgcggtgctcgcccacgacggcgcgcgcgtcgcgtcgctcgccgcacgcctcgccaagacgccgtcctctcggcccaccttgcttgacgagagccgcgcggggtcgtcgtcgtcgtcgtcccccgatgacgagtcgtccctcgcgtccgtgccgctcggcccgggcacgtccgtcggcgtgggcaactacgtcacccgcatgggcctcggcgttctccatcctggacacgtgcttccagggccaggcggcgcggctgcgcgtgcccgaggtcaccatggccttcgcgggcggcgcggcgctcaagctggccgccaggaacctgctggtggacgtggacagcgccaccacgtgcctggccttcgcgcccgcccggagcgccgccatcatcgggaacacgcagcagcagacgttcagcgtcgtctacgacgtcaagaacagcaagatcgggttcgccgccggcggctgcagctgagaagcgacacctacatacacgcgcatgcacagaccgactcggtaactaaaactaaaacgaacagcgcatgcatgcatctaccgtccggtttcgtctgaaaccatcattaatttcgatcgtccactccacgcacagcaagttctttacggagcttgccgcatatgatatgtacatggtgacaagataaggtacaggagaattgatgaaagaagcgttgccggccagtcgtcgttgcacgagaacaaacacataaattaaaacattattacaggagtagggtatttattgtattgttcaggccagaaaaatatgtggaaagtgggtctttaacttaattcggaagaagcatatagcactccaaaaaaaaaaaaagattcatattcatcacatagccaacagatagcatgtagtagctgttcatgcatgttattcttttggcaagtcctggtcaggaagtactatttactgtgtgtaggacgaataaactgaagtgatgtgtatgtttctgatttctttcgtacttgcaaccccgggcccacgtggtttttttactcccttctatatatactgtggaaaatattgtaacccacgcacaagacacacactcctatgctatatatgttctatgcacaagacacactttgttaacgaacaaagagatcgatgatgcaaatatttatcactatatatatatggctattgttagtttcgtgccttttgcacgatgaatataatggttgaacatgcatgggacgaacaggtggttagcaaatctgtacaagaattcattcacatatcacagtcttcaacgggacaggcctttggattttgatgaggcaaaccaatatctaggtattatctgtttgctctttcagcatttcggagtggaattgtgtacagttagtcgtgaactacatttttccttgtagagttgcccctgtaaaaagcgtgttgctacctgattgaattcgagtagatgtcctctgcatgtcatcctaacaaattccatttttctacctgcctgttgaagtaatgggtttatttgtacctgttttttgattgcttcttccgttcaacctggttgttgtctcttttaagctgggatggacatttgtatatgtacttttgtgttccaggttattttttgtttgtattttgtacataagccttcttcccacatgcttctttctgaagtttccacggataaaaattactttcatggaaaagggaaggggctgtaatatacttctcaagtactgagctattatacctctttattgtcactaatatggtattgtgatttccttctctgcaatttcagagaaatgtgaaagagataaatcgcgtgttcttgttcattgcatgactggaaaaaacaggtccgctgctattgttgcagccttcttgatgaagtctagagggtggagacttgcacagtcttttcaatgggtgaaagaccgaagaccacaggttcaactgacagatgcttctcagaaggagcttttggagtatgagctgaagcttttcggacccagtactcaaaccttggttcccactgaatcatttgcttctcttggatttggttatacaaaaccagcaggtgacatgcaaacgcctgtgttcaaccaaacgaccatgccatccatattcgagcgattcaacccaaatgatcgccccgccaatttcacttttggagttgagaggaaagcagaagctaaccctcaagataacaatagtgatggcagggtaaacccaacttcaacggagaacctgatggacagctcttaagatgatttcacgatgtcgctgttcaatctccttgttccagaagtaaacccgctgtaatctgcatgtcgcggaagtaaacctactgctcggtgcctcggcgcaccgaatacttatccggtgtctaggtttcagggaggttttgcccttgtcggatgagaaatggttctctggaaaccgatctttgctttagaatgactgtatgaaatagatgtttgtggctcatctatctgttcctttctcgtatagtttctgattgctattatatggataaggcatagtgcttactgcttaccagtcgggtcgtttatttggtcatgtatatatgtagtcgtccgtaaaaggagaggagagatttttcaggtcggcagctggtggtgacgtgatgagttttagatctttagtccaatgcaacaggagattaagaatctagattatcgcctttttagttcgaaggtttgagaattaatgacagattgataaggtaaacagttatttatttatttattttagtttgtgaacccaactgagtcaattttagagacctttagtcaggtgcattttactcttttactttctcaatatgatgtgtagactactctagaatttctacggatacaatcacgagcgatgtacctgacaatcatgagagatagcgtcatagcaatgtacctgacgagtgatgtagtcatgtacctggacggatcgtcgaccaactggacaaactcagg

SEQ ID NO: 51295 - DNA, 1816 bp, Zea Mays
ctaccctaccccacatgccagtcacacgatccgcgcgcacgccgcttgactttactcgaccggagcggagcgcgcagagcacctcactctcgtcgcgtccacccacagatctcaccgccaaagatggcccgctgcggtgatagagacatcgtcacggcggcgatggcgcggcagccctggcgccgccgccacggatggcagctccccctacacccgcttcagctggtggccgcagcggtattcgcgcttctcgtggccgcgttctacgtcgtcctggggccctacatcgggaacaccctcgccggcaatatcctcctaatcaccttctctttctcggccgcagcgacagcggcgctctacgtgcgctgcacagcggtggacccgtcagaccggactgacgcgaagaagaccaagcggcggcggcagctcgctcggggcggtgggggcacggcgaagttgccgcggctgcggtatggctacatcctgtggcgctacgcggtgcggttgctgcggcgggttgaggcgcgggtcaccaaccgctgggtgcggcggagctacctggagcagtggaacaccagcgttcagctcgatcccatgctccccttcgccttcaccagcctcgatgacatcgtctcgccatgcgccactgccgacgggcacgacatctctttctgccccatctgcgactgcgagtggctaaacaattgcattggaagaaggaactatgcaacgtttattctgcttatgttctttgtcttgctgatgcttgtcattgagggaggaacagcaattgcgatcttcatccgctgttttgtcgacagcaaaggggtgaaaatggaaatggagcacaggctgcacctgaggctcccaaaaggagctcatgcagcactatcagtggtttttgtcatcttcacaatttacagcactgcagcactgggccagctcttctttttccacatggttctcattagaaagggcatgaggacctacgactacattcttgcgatgagagaagcaggagcagcatttgacccattcgaagactctgattctgacgagagcatcgactttgactcaccggagaagccatctttcttttcaagggtcttttgcagaaaagatgaagtgaatgaaagtgcgcggaagctgtcgatcagggtcgagagcgaccaaatggatgcttcaggaaggaaggatgacatccaaatcaacccatggacattgatcaagatgagcaaagagaaggcgatggctgccgctgagcgcgcacgtgagcggatcagacagaagctgccaacatcacccatgaaaccactgccggtggagacaaagcgaggccctctgaacccagagagaaaacacatcacgaccgggaaagagatcgtaccggtcttcaccaagagctggctgtcggtgtcgcccacagcgaggatctcgagccccaggaggcgattctcagggtcatcgtcgcctaagccgcagagatacaggagcaacttcgacctgaggctcgccgaggtgtcgagggatctggagacccacatctcgaagcaagtgctgtgctccgtcgtcatgaagggtgtcgaggacgaaggctattcgtcgtaatttaggtggggtgttgtatgcttagtccacaatattcattggtattttttggttcttgagaatgatgtgctgtgctttcttagcatgacgatgtgaattcccattacatagttattagcatgattttttatctgtttggtaaaatgtgtttgttggcgtcgatctggaattctggacagcgtcaaccactggggtgtagacatcttag

SEQ ID NO: 51296 - DNA, 3751 bp, Zea Mays
ttgtgatgattgtgtagttttggaactcaaagttcacagggcaacctgatgataagcataggtaggaattaataaagttatatattgcatagttatatgtaatatataaggagtaaaagtatggaatgtgaccagaggtatgttaagagaaaaaacacaatagatgatatatgatatgctcagtttgttctactaagcataagataaaggcaatatatatgtactcctaattgcaatgagccatcaagatcgcagaggagctgcctcgaagaattcggtttcttttgttgccaattagtgctaggaccagccttcctaattgacttttagttcctccaatgaaattttccatgtcacattagcaattgatttcactatcctttttttcctatctaaaattctgaacagttcagtttagaaggaaaaaaagggttcctgcttcaccatcatagggcacaggcttgggaatatccttcttttgtttcgttctctattgcctctatggctctggtaagaattgggaatgtatagacatggacatgaatataagttggctaacataagcatatcgccatcagatcataccattttgatagctccttgttagactgtataggcctgtatggccttgggccgtgtgtgcccatgtaagccaactaggcgtgcattagggtttgccttcatggcttccctatatgtattggttccttgactctcagataatcaattaaccaatcattcccataatcccgtctttcatggtatcaaagaaggtcgctcctgcgccctctcttccgcactctttacctagtcgtcgccgccatctgatctttgccggcgcggtatcccttttctttgccctcctctcccatggctccctcccatgaagaagtcgtccgtgaagaagcctctcgtcttgctgctgaggccgccattgcacggcaagtggcggaggctgagctcgttcgtctcctcactgaggcagaccggctcgccacagaagttgcatgtgcccgacaagaggccaatcgcgctcgtcgcgccctggtcggccaggatcccctgtacccccaaccgacgacgcgctggccacgttcgtcgctgcccagtcacaagttgtggttgtcgccctccatgcccagaccgtcgccgtcctcaatatcaaggctctcataccggtcgtcctcgacaacatttcgccgaactacactcgatggaaggccctcctcaacaacaccgacaagtacgagctttccgaccacgtcgtggaagacatccgcccggaggtcgttgttgatccctgaaagggaaataggcttacaccttttcctaattgattttggtggttgaattgcccaacacaaataattgaactaattagtttgctctagattatacattgtacaggtgccaaaggttcaacacaaaccaatcaaaagaacaagttaggcttcaaaagaaaggagcaaaaaggaaaccgaagtgtgccctggtctggcacaccggacagtccggtgcaccaccggacaatgtttggtgcaccagggtgaatcagctcaaactcttcagcttcgggtttcccaggcacagctccgctataattcaccggactgtccagtgtgtcaccggactgtccggtgcaccagcggagcaacggctatctgcgcgcaatggtcgactctgcaaagtgaacagtacaattcagatgtcagagcagacggtcagaggagcaccgaactgttcggtgtgacaccggactgtccggtgccacatgaggacaaagcctccaacggtcgaccagctccagggcctaacgacaagatgacgtggcggcgcaccggacactgtccggtggcgcaccggactgtccagtgcgcccatcgccaacagccttctccaacggctacaatttggttggtggctataaataccaccccaaccggccacttcaaagtgtgggagcccaagcaaacattccaagtcatctagttgacatactcaagccctcccaaccacatatattcattgatccatcctatgtgcaagatttaggccactacaaccaacacaagtgccacaaaaagagagctagcaaaagaaagcctctcgtgtgagtctagcaagagtgacttgtgagaatcattgagagttagtgagcactacatcttgtgatcatttgtgcgtggagttttgactcccattgaacttcctccaaagttttggaggcttgtaaaagctaacaagagacaccaaagagtgtggtggtccttgcggggtcttaagtgatccttgagaagaagagctcgccggtctttggtgatcggtggagagagggaaagggttgaaaaagacccgtccttagtggactcctcaacggggactaggccttcgagggcctcggtaaaacaaatcacccatgtctcgtgtgtttattgcttgtgatttgtttgttctttcccttttctaagttttcttgcactattctttgctaatactatttggtgttgctttaagttaaattctcatttagtaaagcaacaccttgcaagaaagaacttgtgttattactcttcttatctaagccctcgtaatttattctcatagacttattagtagtattgattcatcaattccgcattatttgaaagcaatacttcttagcgaaggacttagtttttatactccgacaattgtgtatcttgttctaaccactaatcaagggatctagttgtgggataaagttttaattttcagatttcgcctatccaccccccctctaggcgactttcaatcccattggcggcgcatggactgcaccgtgcgctcctggctctacgacagcgtcgcccccgacctcatcgagatcgcctccaaagcccagcacacggcgtgctccatctggcttggccttgaagatcagttcgtcgacaactgagaaactcgcgccttgattctcgacatcgagttccgcaccttcgtgcaaggcaacgtctccatctcagactactgcagtcgccttaaaaacatggcagatgcccttggtgatataggcgaggtagtcccggaacgcacacttgtgctagcggtgatgcgcagcctcaacgagcggttctcccacatggctatcttcctcaaacgccagaagcccctcccgtcctttgcggaggtcccgcaacgacctgcaactcgaagagatcgagaaggctgccaaacccggctccgcggccttgggctctggttgtcaccacggctactgttggtcatactctgtccgccccccggggcatcgtccctcctaccacaaatgtgccatccaagaaccagggatcctccacctgggaagaacaagaagcacaccttcgtctatcccgcgcaacaccaacatcagtttccccacgatcaacaacccgtggaatggcaccctgcagcggtggggccgacgctgccgctgctcgccctgggcctccttggcgcacacccgggcagctcctagaccccgcgcccgcaggcattcctggcgcatggcgctcccacaccggcgtctccccatatggctccatcctctacggttatgctccgcctggcttcggcaacccaactccacagtagctagctctaccccactcccccggcactatctaggaccagaacactctcgccgccgcgttcaacaccacgtctctccatccaccgccatcgacggagtggtacatggactctggagccgacagtcacatgacctctacccctg

SEQ ID NO: 51297 - DNA, 2223 bp, Zea Mays
ctcaggacttgacatagaatttgaccgacagacaatgcctcgctatttgttgccattgaaattcactgtcaccaaatagagattgattcaacaaattaactgtaagcagaactgggcactggcggcaaaactgggcactggcggcggctatggaggcaaaactaggcactgacggttcggcggctgtggaggcttagaatttagggtttgaggaatgaggacggctaaaggcccgagaaggccattaacatctagaacgtccaaaatgtcgtaaaacgtccaaaacgccgtagaacgtccgtaaaacatccaaaacggacactctaacactttttcgtaaaacgtgcgggcgttctaatccttaatcgtgttttaccgtttcagcgacgcttaaacgtcgtttaagcgatgcttcaataacaatgcgtacctcaggttgttgccagcgtcaccccgatttcaggaactccccctaggtttgatgctcttgatcagcaggtcgagttgataaccccaaggggtcgacgctctacagcgctatggttgcatgatggatgttagcagaaatggcgggaaaaacaaagtagatcaaccaacaaatcacagagcacgacacatagatttacgtggaaacccttcaatgcgaagggaaaaaccacgggcaccagccaggcgaaaccttcactatatgtggagtgtttacagaacgttgtccgtagacggcggcttacaagaggagtaaataaagatgacgcatagcaaaccataattagggtcactaatatataccgcggggttgtgtaaacactcaacaaccaacacggccttcatatgcagaatttggatcacaaactcaacgatgggcgggcatacccagtgttgtaggcttcccgcactgtgcggggtctggggaagggtatctttaagcgccaagccttacccgcataatatgcagaggctggggctcgaacccgagaccttccggttacagacggtaggctctaccgctgcatcaggcccgcccttcacaaactcaacgatggaaataaattttttttgaagcagggattcataacacaagtcagagctacagtccaattgaacaaatacaagaggcgcaagaagagtaatgcgtgcaatcttccttcagcatatattgataggtttgcagcacatgcagacaatagtgtttgcattcagtaggaacaggcttttaggtgcttccaatggtaaaaacagcacgcggaattattcataagcttcttcttgttgacagtgggattcgtgccatgcttacatattatacaaggaatgtatgagagcaatgggatccaggagatatgcagatgcatggtggtttgttctggcatgtgtttgaaagcactataagattgagggtgatttctgttggcagtggcatgagaatgaagtgattcttgagttgttatctcccaacaagtacctttacaaagtttcagacttgtgcacctaaatctaatcacactaatccattattgtcaagctctgaacattggcagcagcatgcgcaaattggctaagcatccgcttttagtccatctcagagaggcaactacatcagaatagtctgggcaaccatgaagataaaagcctgtcgatgtacaacaaaggagttgccagagctgcagggagttgaatgtggaacaactggtgataaagacaaatggagcaaggtcaaggcatagcactgaagaatcacaagtgccatgggataccggtggtttagcgtctttgcatcaacttgagggcaagtcgaatttttatggaggggaaaacgtgaggaatcatcctaggtatgagctggagttacaccatgagccatgttgcctagtggcccaaccgcccaagcaagaagcaactgaagggcaacaccacaagaagagcagctgcatcagaaaggagaactcaatgaactgaatacagagacatgtcctgttcatcttcctactccggttcctgtccctctaacccttctccctcggtctagagctatattccttccccaattccgattcaccatcccgctgccaagaggctgtgtaatccagtttgtacccaaactgctatgccatcaatggaggggtgcactagcgcataactcccaatctcagatcaaaatcgcccaatccacgaatcaaacacgggttgaagtggttaaaggagaaaggaagggatgaaacgtac

SEQ ID NO: 51298 - DNA, 133 bp, Zea Mays
gaagcgtttggtgtgatcggcttgcctccctcggcgcctcgtctcctaacgcttacgcttcccttgcttcgtttccgcctactccttcctccctatactctagtttgcccttgcctctgctagtgctcggtaa

SEQ ID NO: 51299 - DNA, 2315 bp, Zea Mays
ctctaattgggcatgcagcctgaaaccttgcctttctttcttcggttcttccattacccccaggccccagcgtgcgtggtctccttcctctcgtggcgacgaccgagcggccgtcgctgcctacgtgcccagtcctgttcgtcccttcgccggcgacggccacgacctggttataggcaaagtttgtcctgaactgttcatcatggtggaaggctgggtagttatatgcacacatatcagcaaggtgaagtaataagggcgaaggtgaactctctcacttccattgagacagaactacccttcagttactacagccttccatactgtcgtcccagagatggggttaagaagagtgctgaaaacttaggcgagcttctgatgggtgatcaaatagataattctccgtaccgtttccgtgtaaatgtcaacgaatctctgtatctgtgtactacaaccccacttgacgaggctaatgtgaagctcctcaagcagcgtagccatgatctataccaggtgaacatgattcttgacaatcttcctgtgaggaggttcacagagcagaatggaataaccatccagtggacaggctatccagttggttatattccagaaggcacttctgatgtctacatcatcaatcacctgaaatttaaggtcttggtccataagtatgaaggaggcgaagtaaaggtagttgggactggggaaggaatggaagtgatctcagagactgacaaagatgccaattctggatatgagattgtgggatttgaagttgtcccatgcagcgtgaagcgtgatcctgaatccatattgaagcttaatatgtatgataaagtcgatcctgtgaactgccctgtggagttggaaaaatctcaattggttagggagaaagagaagattacttttacttatgaggttgaatttgtaaacagtgatatcaggtggccatcacggtgggatgcatacctgaagatggagggttcgaagattcactggttttcaattatgaactcattgatggtaattctatttttggctggcattgtatttgtcatattcttgcgtacagtgaggagggacttgactcggtatgaagagttggataaggaggcccaagctcagatgaatgaggagctctctggttggaagcttgttgttggagatgtcttcagagaaccaacctcaccgaagctgctctgtgtcatgattggcgatggggttcagattttgggctctggaggactttaaaaggaacgtccgagggatggaggtctgtctcctggtcaactgcttgtttcttccctggcattgtcttcattgtcctcactgtgttaaacttcatgctgtggacaagaaatagtactggagcccttcccatctcacttttctttggccttttgtccttgtggttctgtgtctccgtgccacttacccttttaggtggtttctttggcacaagggctgagccaatagaattccctgttcgaaccaatcagataccaagagaaatccctacgaagaagtactcattgctcttcatacttggtgctggaactctaccttttggaacactcttcatcgagctcttcttcattctttctagtatttggcttggaaggttctattacgtgtttggcttcctccttgtcgtgcttcttttgctgattgtggtgtgtgctgaggtatcagttgttcttacctacatgcatctctgcgcggaggactggaggtggtggtggaaagctttctttgcttctggaacagtggccctttatgtgttcctttactctatcaactacttggtgtttgatctcagaagcttgagtgggccagtttctgctattctctacattggatactctttcgttgtctcccttgccattatgctagcgactggtaccgttggcttcctgacgtcgttctcttttgtccactaccttttctcatcagtcaagattgattgaagatccagggttgtctttacacaaaatcacctgtgagctcaaatgatatgaccattgcatcttgaaggcctttcacagagcagtgctgtttgtaatgtagcttattaccgagagtctgagactactgtaccttgtaatgaatagtatatttcagcagatgtgttttgaagtttgtcacactttgctacagcattttgttgacctgccaatactgtaggaaaagtcttgcgtttattatcccatggtgccattttgttgtctgtttctttctgcaagattggcttgcagctggagaactatacgttcttatggtataatatacatgtgcaaaatgtttcccatgcgcaa

SEQ ID NO: 51300 - DNA, 2463 bp, Zea Mays
cggttcttccattacccccaggccccagcgtgcgtggtctccttcctctcgtggcgacgaccgagcggccgtcgctgcctacgtgcccagtcctgttcgtcccttcgccggcgacggccacgacctggcaaagtttgtcctgaactgttcatcatggtggaaggctgggtattctctgctttgttagtggtgtttctagcgttcacaacaccttgtgagtcattctacttgccaggtagttatatgcacacatatcagcaaggtgaagtaataagggcgaaggtgaactctctcacttccattgagacagaactacccttcagttactacagccttccatactgtcgtcccagagatggggttaagaagagtgctgaaaacttaggcgagcttctgatgggtgatcaaatagataattctccgtaccgtttccgtgtaaatgtcaacgaatctctgtatctgtgtactacaaccccacttgacgaggctaatgtgaagctcctcaagcagcgtagccatgatctataccaggtgaacatgattcttgacaatcttcctgtgaggaggttcacagagcagaatggaataaccatccagtggacaggctatccagttggttatattccagaaggcacttctgatgtctacatcatcaatcacctgaaatttaaggtcttggtccataagtatgaaggaggcgaagtaaaggtagttgggactggggaaggaatggaagtgatctcagagactgacaaagatgccaattctggatatgagattgtgggatttgaagttgtcccatgcagcgtgaagcgtgatcctgaatccatattgaagcttaatatgtatgataaagtcgatcctgtgaactgccctgtggagttggaaaaatctcaattggttagggagaaagagaagattacttttacttatgaggttgaatttgtaaacagtgatatcaggtggccatcacggtgggatgcatacctgaagatggagggttcgaagattcactggttttcaattatgaactcattgatggtaattctatttttggctggcattgtatttgtcatattcttgcgtacagtgaggagggacttgactcggtatgaagagttggataaggaggcccaagctcagatgaatgaggagctctctggttggaagcttgttgttggagatgtcttcagagaaccaacctcaccgaagctgctctgtgtcatgattggcgatggggttcagattttgggtatggcaattgttaccattttctttgccgcatttggcttcatgtctcctgcatcgagaggaatgttgttgacagggatgatagtcttttatatgttacttggaattgtgtctgggtatgctgctgtcaggctctggaggactttaaaaggaacgtccgagggatggaggtctgtctcctggtcaactgcttgtttcttccctggcattgtcttcattgtcctcactgtgttaaacttcatgctgtggacaagaaatagtactggagcccttcccatctcacttttctttggccttttgtccttgtggttctgtgtctccgtgccacttacccttttaggtggtttctttggcacaagggctgagccaatagaattccctgttcgaaccaatcagataccaagagaaatccctacgaagaagtactcattgctcttcatacttggtgctggaactctaccttttggaacactcttcatcgagctcttcttcattctttctagtatttggcttggaaggttctattacgtgtttggcttcctccttgtcgtgcttcttttgctgattgtggtgtgtgctgaggtatcagttgttcttacctacatgcatctctgcgcggaggactggaggtggtggtggaaagctttctttgcttctggaacagtggccctttatgtgttcctttactctatcaactacttggtgtttgatctcagaagcttgagtgggccagtttctgctattctctacattggatactctttcgttgtctcccttgccattatgctagcgactggtaccgttggcttcctgacgtcgttctcttttgtccactaccttttctcatcagtcaagattgattgaagatccagggttgtctttacacaaaatcacctgtgagctcaaatgatatgaccattgcatcttgaaggcctttcacagagcagtgctgtttgtaatgtagcttattaccgagagtctgagactactgtaccttgtaatgaatagtatatttcagcagatgtgttttgaagtttgtcacactttgctacagcattttgttgacctgccaatactgtaggaaaagtcttgcgtttattatcccatggtgccattttgttgtctgtttctttctgcaagattggcttgcagctggagaactatacgttcttatggtataatatacatgtgcaaaatgtttcccatgcgcaa

SEQ ID NO: 51301 - DNA, 4087 bp, Zea Mays
atcaaacacccctaaatttctaatagcgccaccggacgtcggcccactccgtctatggcgcgaagcgccgccgcccggctactcgctttctcccctctcctcggctccagccactgccacttgtgccttagccaccctcccctcctccgtctccttcctacctgccgttctaagaccacctcccgcaagccgcctcgctcacagcatcgtagaaaggtggcgcctgcaaccgccggcagcggtcgcccagggccgccgccaggggcgcccccctgtcttttccaggaaatctccgaactcgtcgcctcagtgaccaatggcgaagcgttacgaccccgaaggaatggcagtgcgccttctgatgacgtcggagctgctgctatggggtgcaccgaaggtgcacgaggtattgcttcagggagagcggcgatggcttctacctccagtgctggcagcatagcggaccgggtcgttcttggtgaccgtgcagatgatgggagacgtcaatcttgtggcactatcgcaaatactgcagcattctgccgggaggctggagacactggcatgacagtagattctgatgttgataatatcagcgcaatggtgcacaggattacaggaatcctccggtctgaggcacctgggccaccagtggagcagaaacttgagagcctgggtgctaattacactccaaaccttgttaacatggtgctgaagaggtgcttcaaggtcaggcaactgggattctggttcttccactgggcaaagcgactcccggatttccaccacacgacggagacatacaacacgatgctgtacattgtgggcgaagcgaggagctttggtatcatggaggagctcgtgggtgcgatggatagggagatgtgctccaaggacatcaagacatggacgattttattatccagttatggtaagacgagacagattggcaagatgctgtcaacctttgaggcgatgaggaaatcggaatccatctggatagacagtaaagtctataggacagttcttcacgctttgtgcaatgctgataagcctgagcttgcccttgagttctacaaggatatgcccagcaacatggaggtcaggactgatattcttcgactactaatgcgttgtcttgcaacatcagataatactatcgaaggtgtctatcttatcagagatgatatgattgagggcatgaaacatccagaggagtactgctacaccgaggctcttcaaagcttttgcatagcaggaaagtttggtgaggcatggaaagtctttcagaagatgaagaacaaattgttggctaactcatctgcacttgagaatctcctgagagggctctgcagagcagggagaatggatgaagctttgcaggtcacggaatacatgaagaggacatcaggtctaaacagtacaatgttttcgttcctcatcaatggctaccttaggaaaggggagcatatcaatgcacttgacttgctacgggagatgagagaatatggatgtgtcccactggcgtcatcttatacccaggtcatgcaacacctatttgcaaccgatcagtgtgaagaagcgtgcggactgtttgaagagatgctaaaaaaccgcgttgaaccagatattgttacgttcacagcactgattggcgggtatgttcgcagcggacatatatccaaagcatgggatgtcttcaggaatatcaataagaatgttcagaaacccacattgaaagcatatacagtcttcatgcgagagctgtgcaaggtgtccaggccccttgaggccgtagtacttttgaaggaaatgctggaatacgatttcaggccttctgagagaacattctgctggttaatttctgctttacgtgacaaatcctatttggaagaggcaagtaatgttgagagaatgcgagcatcttttaatttgcgaaaccctagagatggtttgcaattcgaacagttagatggcattggcaatattgataagtttcgaaaaatgcgcaagtctaatcctcaagaaaaagaactggcattggagttcaccagctccccgtcagatcaaaatggtaagacctccagtttcacactttctgatgacacacatcagaaagaacaagagcaggactacagtgatggagatgtcgaagaaatatgtcagattctgtcttcttctgatgattggggctcaacgcaacaggcactggagacgagatcagtccattttagtcctagtcttgttgatgccattttgaaacgttgcaaaaggaatagttgtgctgctttgcaatttttctcttgggtttgtagacgtccttactacatgcctagtacgaaaacatacaatactgctatgaaacttgcgggttctgcaaaagattttaagcacatgtggtatctgtacagagaaatgttaaggaccggatgctccccaactgtggatacatggaatgtcatggtctgtcagtatggcaatgctggtctgtctgaaaaggccttgaatacattctgggacatgaagaagtgtgggtttctgcctgataaaactacttacaatcacctgataatgtacctcacacacattaaagggcggaaaatagatgtggcagtcacaatcttccaagaaatgtgtcatgcaggacatatacctgataagaggattcttttcatgtatcttttggctctatgcgagtgtaggaaaatagaagatgcaacaagctcagtagtatccttatgtgaactaggattttctgtgcaggctgtctactccatattccttagatcattgtgcagggctgatagaatggaggaagctctccatttgtttgattgtattgagaaacatggttgctccagggaccagtacatgtacgggagtctcatccatgttttgctaaggagggacaaatttgaagaggctgttgccaagcttatggaaatgaagaatgaagggatacttcaaagcgcacatatctatacctcctttattgtttattactttcagaagagagatgttgtcaaggcattggatgtgctcagggagatgaaagagaatggatgtgagcctacagttgtcacgttctctgctttgatccgtggctacatggccatggatatggtttcagaggcctgggatgttttccaacaaatgaagctgaaaggacctgcaccagactttgaaacctactccatgttcatgtcatgcctatgcaaagcaggtagatcagaggatgggttgcatcttatccacgatatgtcagattgtggtttcattcccagcacagtaaactttatgactgttgtccatggtctaaatgtggagggcaaacatgagcttgctgagtctgttctactgtcaaaatggcacttgcggaagcaaagaaccatctcatattagtttttgcttctctcacgctctcaaaagatttcttggtgtttacatcttggaacgcaaggaacaagcatatggtaggggcatgaagtaaaatgaatcatggacacttttgctcccccccccccctccatttgtcaatggtggatggagaagggtacagtaaaaaatcgttgtgaggactgactcaatgtggcatgtcttactgcttagtcagtgacagacgaatcccagtgactttactcaggacaaaggtatcacgagttgctctgagcccaatcaagggaccaaaacgccagaagcaacacacccagtattctgctgttttttgtcgatattatctaggtgcatgaacaaaaaaaaatgcttgtttgaaaatatcaaactttaggtgcttttagtgattacagaccacagaaatgaatgtcccgtgtgccaactgaaattttactataattttgcaaaaaaaaaaatctgattagatccaattgattctcttctggcgtccatttcattctatcacattttaggattgatgtttatactctaataatatgatcatacatcatcttgaaattctgtcaattgatagttgggcagtctcaagttaggtaggctgccatatagtgattggttcggttacccagttgaaaagacaatgcaaccagaagaaaaagaagaaaaaaagtat

SEQ ID NO: 51302 - DNA, 2706 bp, Zea Mays
accattcgaacattattagcgcgcgcggctgacctgacgtgcgtggtggtgaccgctggcgacgacgactctcagacaaggacattaaccagcagcacccctgctaacctggatttaataggcaagggacagcgatatatgatttattttacacgtatgtatctgccccctactccaataccaaacgagccacccatggtttcgtatcaggaaaagctttctttatatatattcggggcattgcgttatcgtgtagctttgcagaacagagaaggagaagggggagctgtaatcctacctaagaagcggcgatggggcggtcaggaggcggcgacggggacggcgacggcgaccggctcctcctcggcaagcccttggagtcgtcgtcgtcgtgcagctcgtccgacgagagcctggtcaagagaaccggcacggtatggacggcgatggcgcacatcatcacggcggtgatcgggtccggcgtgctgtccctggcgtggagcgtggcgcagctggggtgggtgggcgggcctgcggcgatggtgttcttcgccggcgtcaccgcggtgcagtccaccctcatcgccgactgctacatctgccaccacccggagcgaggaggcgtcgtcaggaaccgctcctacgtcgacgccgtgcgcatctacctgggcgacaagagccatttgttttgcggcttcttcctcaacctgagcttgtttggcaccggtgtggtgtacacgctcacttccgccactagcatgaggtacgtacagtacaattcgctatgcacgtcaacttcagctcgcgctgctgcttgcttgcaacctgcctgcagtgcagccagccacgagtacgtctatcagtgtgactaagctaatggcgaagaataaggtttaatagcatggcttgattgggaaaaaaagaagaactagtaactagtgtggtgtgtgtgggcacaaactaaagcggtgaagctagctactagtacaagactgggaagaaagaccaataatgcaaaaagttcaatgaggtcactctccagtctccacccttgcgtgtgcatatatacaaacagcttcgtgaggaaatattatttgttttctttgccttgcttctcttttacgttctccctggtaacgaaaatatatttcttttctgctatgtatatcaactgtgtctttttcgattcacgtcagcaaatttcatgtggtagccgagctagggaggaggagacggtcagattaggagatatacgtagtactagagtatctccagagcttgctcccacgcccatcaccaaccgcttgtgctcaaaattgttggcgccgccagctttgcattgggcgatccggaaggccaattgctaccacagggaaggccacgacgcgccgtgctcggtgggaggagacggctactacatgctgctcttcggcctcgcgcaggtgctgctgtcgcagatacccaacttccacgagatggcggggctctccatcttcgccgccgtcatgtcctgcttctacgccttcgtcggcgtcggcctcggcgtcgccaaagtcatcgcaaacggggtgatcatgggcggcatcggaggcatcccgctggtgtccacgacgcagaaggtgtggcgagtctcgcaggccctcggggacatcttgttcgcctaccctttctcgttggtgctgctggaaatagaggacacgctgaggtcgccgccgccggagagcgagacgatgaaaaaggcgacgagagcgagcatcgctatcaccaccctcttctacctctgctgcgggtgctttggctacgcgtcgttcggcgacggcaccccgggcaacctcctcaccggcttcggcttctacgagccctactggctcatcgacctcgccaacctcgccatcgttctccacctcctcggcggctaccaggtgtacacgcagccggtgttcgcgttcgcggaccgcaagttcggcggcggggccacggtcgtcgaggcgccgctgctgccggtgccgggcgcgcgccgcgtgaacgcgaacgtgttcaggctgtgcttccgcacggcgtacgtggcggcgaccacggcgctggccgtctggttcccctacttcaaccagatcatcgggctgctcggctccttcaccttctggccgctcgccgtctacttccccgtcgagatgtacctcacgaggaacaaggtggcgccgtggaccaaccagtggctcgccatccatgcgttcagcctcgtctgcctgctcatcagcgcgttcgcctccgtcggctctgcggttggcgtgttcgggtcggagacgagctgattcaaactctgcaaatgcaattgccggccacttttcggacatgcatgttctgtgcatatactgcgcttgtacatttagcgttatacctagtactggaacggtcaggccgggccccgagcctcgtgcttaggctcaaacgggtctgggcccagaaggtccaaattttttttggatcataccgtgtcagcctaaagagtagaaatagtggtttagccaggctctaaaacactttctatctttgttgggccatgccgacccatatatttaaaccatataaaattcaaatattacaacgacataaactacataacctactaaactaaagatattaaacaatgtgagcaccatttgacaacataaagttcaaatattacaaccatataatgtatataac

SEQ ID NO: 51303 - DNA, 2903 bp, Zea Mays
accattcgaacattattagcgcgcgcggctgacctgacgtgcgtggtggtgaccgctggcgacgacgactctcagacaaggacattaaccagcagcacccctgctaacctggatttaataggcaagggacagcgatatatgatttattttacacgtatgtatctgccccctactccaataccaaacgagccacccatggtttcgtatcaggaaaagctttctttatatatattcggggcattgcgttatcgtgtagctttgcagaacagagaaggagaagggggagctgtaatcctacctaagaagcggcgatggggcggtcaggaggcggcgacggggacggcgacggcgaccggctcctcctcggcaagcccttggagtcgtcgtcgtcgtgcagctcgtccgacgagagcctggtcaagagaaccggcacggtatggacggcgatggcgcacatcatcacggcggtgatcgggtccggcgtgctgtccctggcgtggagcgtggcgcagctggggtgggtgggcgggcctgcggcgatggtgttcttcgccggcgtcaccgcggtgcagtccaccctcatcgccgactgctacatctgccaccacccggagcgaggaggcgtcgtcaggaaccgctcctacgtcgacgccgcgacaagagccatttgttttgcggcttcttcctcaacctgagcttgtttggcaccggtgtggtgtacacgctcacttccgccactagcatgaggtacgtacagtacaattcgctatgcacgtcaacttcagctcgcgctgctgcttgcttgcaacctgcctgcagtgcagccagccacgagtacgtctatcagtgtgactaagctaatggcgaagaataaggtttaatagcatggcttgattgggaaaaaaagaagaactagtaactagtgtggtgtgtgtgggcacaaactaaagcggtgaagctagctactagtacaagactgggaagaaagaccaataatgcaaaaagttcaatgaggtcactctccagtctccacccttgcgtgtgcatatatacaaacagcttcgtgaggaaatattatttgttttctttgccttgcttctcttttacgttctccctggtaacgaaaatatatttcttttctgctatgtatatcaactgtgtctttttcgattcacgtcagcaaatttcatgtggtagccgagctagggaggaggagacggtcagattaggagatatacgtagtactagagtatctccagagcttgctcccacgcccatcaccaaccgcttgtgctcaaaattgttggcgccgccagctttgcattggtgaaggataccggtgttttcggcagatttcagacaccgcattgtgctggcctcgataaaagtctcaggtgatcatgtcttggtctgttccgttccgtccttctctctgcagggcgatccggaaggccaattgctaccacagggaaggccacgacgcgccgtgctcggtgggaggagacggctactacatgctgctcttcggcctcgcgcaggtgctgctgtcgcagatacccaacttccacgagatggcggggctctccatcttcgccgccgtcatgtcctgcttctacgccttcgtcggcgtcggcctcggcgtcgccaaagtcatcgcaaacggggtgatcatgggcggcatcggaggcatcccgctggtgtccacgacgcagaaggtgtggcgagtctcgcaggccctcggggacatcttgttcgcctaccctttctcgttggtgctgctggaaatagaggtacgtgcgtgcgtcagatatgtgatcttgtatactcctaatcaacttatgagatcaaattatttattgcctcttgtgctgtgctgtgttgtgtttccaaggacacgctgaggtcgccgccgccggagagcgagacgatgaaaaaggcgacgagagcgagcatcgctatcaccaccctcttctacctctgctgcgggtgctttggctacgcgtcgttcggcgacggcaccccgggcaacctcctcaccggcttcggcttctacgagccctactggctcatcgacctcgccaacctcgccatcgttctccacctcctcggcggctaccaggtgtacacgcagccggtgttcgcgttcgcggaccgcaagttcggcggcggggccacggtcgtcgaggcgccgctgctgccggtgccgggcgcgcgccgcgtgaacgcgaacgtgttcaggctgtgcttccgcacggcgtacgtggcggcgaccacggcgctggccgtctggttcccctacttcaaccagatcatcgggctgctcggctccttcaccttctggccgctcgccgtctacttccccgtcgagatgtacctcacgaggaacaaggtggcgccgtggaccaaccagtggctcgccatccatgcgttcagcctcgtctgcctgctcatcagcgcgttcgcctccgtcggctctgcggttggcgtgttcgggtcggagacgagctgattcaaactctgcaaatgcaattgccggccacttttcggacatgcatgttctgtgcatatactgcgcttgtacatttagcgttatacctagtactggaacggtcaggccgggccccgagcctcgtgcttaggctcaaacgggtctgggcccagaaggtccaaattttttttggatcataccgtgtcagcctaaagagtagaaatagtggtttagccaggctctaaaacactttctatctttgttgggccatgccgacccatatatttaaaccatataaaattcaaatattacaacgacataaactacataacctactaaactaaagatattaaacaatgtgagcaccatttgacaacataaagttcaaatattacaaccatataatgtatataac

SEQ ID NO: 51304 - DNA, 1491 bp, Zea Mays
gcgttatcacgagattcgtccgagcgacgacgtctcgacagtcccgggccgctgagatcttgccgcgggagggagagcagcagcggcagcatcagacatgtcgtcggggcggtacatggcctactcgccctcgccgtcgaccaccccccactccccccgcatcgccggcctccgcgccccgtctgccgccgtggccgaacaggagaagtaccttgccgaactgctcgcggagaggcagaagcttggcccgttcgtcccagtgatcccgcatagtgtacgcttgctgaatcaaggaggattatattcaaatggagcagctactgacatgaatgtgtggacatcagcatttcaaccagaaagttcaccagcttatagctggcttggaggatcccagggcagctcctctggacttattgtcaagaaaacaatgaaggtcgatatcccagtagacaaatatccaacattcaatttcgttggccgcatccttggtccaagaggaaattccttgaagcgggtggaggcaaatacggactgccgtgtgctaataagaggtcgtggcagcatcaaagatccagcacgggaggaaatgatgcgagggaagccaggatatgaacacctgaatgaacccctccatatattggttgaggcagagctacctgttgaaatcattgatgcgcgcctgatgcaagcccgcgagatccttgaagatctgctaaagcctgtggatgaatcccaggactacttcaagaagcagcagctacgggagctcgcaatgcttaatggcacccttcgtgaggaagggatgcagagatccggttcagcgtcccctttccacaacagccttgggatgaagagagccaagacaagggggtaatgaacaaagctgcaagcatcatgaaggcagaaccaaatgaatctattctgagaccgatcctgtgtgcacatgggattgccttgcttggctattgtactggcccagtacggcctcgagccaccagcatcggggcggccgtaccctgataaaacatatatatctggagttgtgtttgctgctaccgggggagttcggttatgcgccataggttgttcgctatatattgggttgtgcgggattttgtagcaatgtggtttgtgtgatgctcatttggagcgtttgagagctctcggctcgtatttctcatcaagatagtatttaagggcgctgtttgggattttgaagcaatgctctaactgtctctgtacacgacaaacatggaggcttgctatatttcatgaatctctcgtttgctgctatcaatcactgatgcatactagtaaagtgatggcgtcttcagttgcatctgcagtttggattctgctttgctgatgcaggataatttaagttgataactcgaatgttgtgctgataccggctagttcagctaccaactacttgttctaacgataccctgtcctaaattaaaatttattttaggatgttaatggattttg

SEQ ID NO: 51305 - DNA, 1426 bp, Zea Mays
gcgttatcacgagattcgtccgagcgacgacgtctcgacagtcccgggccgctgagatcttgccgcgggagggagagcagcagcggcagcatcagacatgtcgtcggggcggtacatggcctactcgccctcgccgtcgaccaccccccactccccccgcatcgccggcctccgcgccccgtctgccgccgtggccgaacaggagaagtaccttgccgaactgctcgcggagaggcagaagcttggcccgttcgtcccagtgatcccgcatagtgtacgcttgctgaatcaagagttcaccagcttatagctggcttggaggatcccagggcagctcctctggacttattgtcaagaaaacaatgaaggtcgatatcccagtagacaaatatccaacattcaatttcgttggccgcatccttggtccaagaggaaattccttgaagcgggtggaggcaaatacggactgccgtgtgctaataagaggtcgtggcagcatcaaagatccagcacgggaggaaatgatgcgagggaagccaggatatgaacacctgaatgaacccctccatatattggttgaggcagagctacctgttgaaatcattgatgcgcgcctgatgcaagcccgcgagatccttgaagatctgctaaagcctgtggatgaatcccaggactacttcaagaagcagcagctacgggagctcgcaatgcttaatggcacccttcgtgaggaagggatgcagagatccggttcagcgtcccctttccacaacagccttgggatgaagagagccaagacaagggggtaatgaacaaagctgcaagcatcatgaaggcagaaccaaatgaatctattctgagaccgatcctgtgtgcacatgggattgccttgcttggctattgtactggcccagtacggcctcgagccaccagcatcggggcggccgtaccctgataaaacatatatatctggagttgtgtttgctgctaccgggggagttcggttatgcgccataggttgttcgctatatattgggttgtgcgggattttgtagcaatgtggtttgtgtgatgctcatttggagcgtttgagagctctcggctcgtatttctcatcaagatagtatttaagggcgctgtttgggattttgaagcaatgctctaactgtctctgtacacgacaaacatggaggcttgctatatttcatgaatctctcgtttgctgctatcaatcactgatgcatactagtaaagtgatggcgtcttcagttgcatctgcagtttggattctgctttgctgatgcaggataatttaagttgataactcgaatgttgtgctgataccggctagttcagctaccaactacttgttctaacgataccctgtcctaaattaaaatttattttaggatgttaatggattttg

SEQ ID NO: 51306 - DNA, 1356 bp, Zea Mays
ctgttctgactgcacaagttgtctacttttaagatggaaaatttcttccaaatcaatatcttgacactaacaacaaattttacgtgtttccacactattggagaacgcatcccttttaaatcaaagtggccttgaacatggtagtccactaacaacaggaggattatattcaaatggagcagctactgacatgaatgtgtggacatcagcatttcaaccagaaagttcaccagcttatagctggcttggaggatcccagggcagctcctctggacttattgtcaagaaaacaatgaaggtcgatatcccagtagacaaatatccaacattcaatttcgttggccgcatccttggtccaagaggaaattccttgaagcgggtggaggcaaatacggactgccgtgtgctaataagaggtcgtggcagcatcaaagatccagcacgggaggaaatgatgcgagggaagccaggatatgaacacctgaatgaacccctccatatattggttgaggcagagctacctgttgaaatcattgatgcgcgcctgatgcaagcccgcgagatccttgaagatctgctaaagcctgtggatgaatcccaggactacttcaagaagcagcagctacgggagctcgcaatgcttaatggcacccttcgtgaggaagggatgcagagatccggttcagcgtcccctttccacaacagccttgggatgaagagagccaagacaagggggtaatgaacaaagctgcaagcatcatgaaggcagaaccaaatgaatctattctgagaccgatcctgtgtgcacatgggattgccttgcttggctattgtactggcccagtacggcctcgagccaccagcatcggggcggccgtaccctgataaaacatatatatctggagttgtgtttgctgctaccgggggagttcggttatgcgccataggttgttcgctatatattgggttgtgcgggattttgtagcaatgtggtttgtgtgatgctcatttggagcgtttgagagctctcggctcgtatttctcatcaagatagtatttaagggcgctgtttgggattttgaagcaatgctctaactgtctctgtacacgacaaacatggaggcttgctatatttcatgaatctctcgtttgctgctatcaatcactgatgcatactagtaaagtgatggcgtcttcagttgcatctgcagtttggattctgctttgctgatgcaggataatttaagttgataactcgaatgttgtgctgataccggctagttcagctaccaactacttgttctaacgataccctgtcctaaattaaaatttattttaggatgttaatggattttg

SEQ ID NO: 51307 - DNA, 2525 bp, Zea Mays
gcctttttcacgtctatccagattccagcacccctgtcatgcatgtgtcgcccgtctgccttatcctgtgcagcgcggctttaatgacgggcctgcccctggaaagcgcaaaaagggcagcgcggcctttttctccgagggtcccgcacggccccaccacataggcgacgaggtgggtgggcccctcttccgcccgccctcatccccttccacttcgcctcctcttctctctctcccccgtctcctgtctccacctgttccatcgcattctcctcccaccaccaccacaccacgcctcgcttatccccccccgagacccgacccctgctcgacgacgtgctggcaaaacctcctcctagtcctctcgcagaaggaggctgtgttctttccttcatcggtgcggcaacagcgaaagcttctcggtcgatctctcccaccgctgctccgccgtttgggtggttccgcgccttggccgcgcgggttggatccgagctccgtgcagcagctccgccgcgatacgtatcgcataggattccactggattcagctgctgagcagggtactggaaggtggatttgatactagctctgaacagccagtagaatttctcaaatactgtccaggatcatggcttctctctgtgatttctgtgggaaacaaaggtcaatgatctactgcagatcagatgcggcatcattgtgcttatcatgcgaccgtaatgttcattcagctaatgcactgtctcgacgtcatacaaggacccttctttgtgatcgttgtggttcacagcctgcatcagtccgatgtcttgaggacaacgcatcactttgccaaaactgtgactggaatgggcatgatgcagaatcaggggcttctggacataaaaggcaagccataaactgctactcagggtgcccatcatctgcagagctttcgagaatctggtcatttattactgatatcccgactgtagcagctgagcccgactatgaggatggactaagcatgatgacaattgatggcagtgatgttactaatcgtcacgatacttcagatgataaaagattgttggaaatagctaacacaacactcatgagcgatccaccttcagccgacaagcttaaatctccgacaggctcttcttctggagatgggtttgatgttatgactctagccacagatcagcctgctggaccagtttcagcaacgcctaaggtacctaatgccagagatgatgataagttcaatgatggcatgtacgaagacttgtgtgtagatgatgctgaccttacattcgaggattatgaagagctatttggtacctctcacattcgaacagaggaactctttgatgacgctggaattgacggttacttcgaattgaaagagacaccacctttttatttcaacgagcccaaagctatgcagatagaatgtggcaacgtggtatcagctgattgtgcgatgtcaaacccaggggcaagggctgattccagcctttgtattcccgtcaggcaggtcagatctagtatatcccactccttatctggtctgactggtgagagcagcgctggagatcaccacgactgtggggtgtcaccgatgctcctcatgggtgagccaccctggcattctcctggtggtccagaaggctcagtcgctggaggcagcagagatagcgctctcacacggtacaaggagaagaagaagaggagaaagtttgacaagaagatcagatatgcttctcgcaaggctagggcggacgtgaggaagcgggtcaagggacggttcataaaggccggtgaagcgtacgactatgatccgctaagccagactagaagctactgagccttgggagtgtgactgttgttgtcgtccagtgtcagcctcgcaatctccagccgctcgtcggttgcaggctgcgctacaggcaagatcactggagagcacaacgatcgcattgcatcagagcctgcaactgaaaaacgttaagaagagataccaagtgttaggatgaatgaaaaaaaaatacaaaaaagaaagatgcagacttgccggactcatatccattattcagtttctctgcggatgagtggcttggatcgcactgtgccatctgcgcgtcgaacagatgcagtgatggatgggcgctcgtcgtcctccagctgtaccgctgtgcgctaggacctgcgtcggctatatacggctgttcggcagtgagctgccaggttgtacagtctgggtaacagcctaacagggtatgcttatacctctcggttttcgttctgtaatacgtacgtattatttgcgcttgccaggagactgttcttcggccgtgtgtatgtttgtagatggttgcaacattggtaaaaaaaaaagtagccgtcgtgaatgtaaatttgtattcttgttaggtcgcatatagcgttggcgatgagcaggagaatcacacgtatctggacactgaacgtctgaacccttgtaactatttttgcgccagaataaccttcttgtgccttgtcgtt

SEQ ID NO: 51308 - DNA, 2234 bp, Zea Mays
cttccgcccgccctcatccccttccacttcgcctcctcttctctctctcccccgtctcctgtctccacctgttccatcgcattctcctcccaccaccaccacaccacgcctcgcttatccccccccgagacccgacccctgctcgacgacgtgctggcaaaacctcctcctagtcctctcgcagaaggaggctgtgttctttccttcatcggtgcggcaacagcgaaagcttctcggtcgatctctcccaccgctgctccgccgtttgggtggttccgcgccttggccgcgcgggttggatccgagctccgtgcagcagctccgccgcgatacgtatcgcataggattccactggattcagctgctgagcagggtactggaaggtggatttgatactagctctgaacagccagtagaatttctcaaatactgtccaggatcatggcttctctctgtgatttctgtgggaaacaaaggtcaatgatctactgcagatcagatgcggcatcattgtgcttatcatgcgaccgtaatgttcattcagctaatgcactgtctcgacgtcatacaaggacccttctttgtgatcgttgtggttcacagcctgcatcagtccgatgtcttgaggacaacgcatcactttgccaaaactgtgactggaatgggcatgatgcagaatcaggggcttctggacataaaaggcaagccataaactgctactcagggtgcccatcatctgcagagctttcgagaatctggtcatttattactgatatcccgactgtagcagctgagcccgactatgaggatggactaagcatgatgacaattgatggcagtgatgttactaatcgtcacgatacttcagatgataaaagattgttggaaatagctaacacaacactcatgagcgatccaccttcagccgacaagcttaaatctccgacaggctcttcttctggagatgggtttgatgttatgactctagccacagatcagcctgctggaccagtttcagcaacgcctaaggtacctaatgccagagatgatgataagttcaatgatggcatgtacgaagacttgtgtgtagatgatgctgaccttacattcgaggattatgaagagctatttggtacctctcacattcgaacagaggaactctttgatgacgctggaattgacggttacttcgaattgaaagagacaccacctttttatttcaacgaggtcagatctagtatatcccactccttatctggtctgactggtgagagcagcgctggagatcaccacgactgtggggtgtcaccgatgctcctcatgggtgagccaccctggcattctcctggtggtccagaaggctcagtcgctggaggcagcagagatagcgctctcacacggtacaaggagaagaagaagaggagaaagtttgacaagaagatcagatatgcttctcgcaaggctagggcggacgtgaggaagcgggtcaagggacggttcataaaggccggtgaagcgtacgactatgatccgctaagccagactagaagctactgagccttgggagtgtgactgttgttgtcgtccagtgtcagcctcgcaatctccagccgctcgtcggttgcaggctgcgctacaggcaagatcactggagagcacaacgatcgcattgcatcagagcctgcaactgaaaaacgttaagaagagataccaagtgttaggatgaatgaaaaaaaaatacaaaaaagaaagatgcagacttgccggactcatatccattattcagtttctctgcggatgagtggcttggatcgcactgtgccatctgcgcgtcgaacagatgcagtgatggatgggcgctcgtcgtcctccagctgtaccgctgtgcgctaggacctgcgtcggctatatacggctgttcggcagtgagctgccaggttgtacagtctgggtaacagcctaacagggtatgcttatacctctcggttttcgttctgtaatacgtacgtattatttgcgcttgccaggagactgttcttcggccgtgtgtatgtttgtagatggttgcaacattggtaaaaaaaaaagtagccgtcgtgaatgtaaatttgtattcttgttaggtcgcatatagcgttggcgatgagcaggagaatcacacgtatctggacactgaacgtctgaacccttgtaactatttttgcgccagaataaccttcttgtgccttgtcgtt

SEQ ID NO: 51309 - DNA, 1580 bp, Zea Mays
cccatccaatccatatgagttgggaataaccgagtcagtcgtcaccgaccttctcctcgtcgtagctgttgcggcctctcggaggaattttgtgcggagaaagatggcatggaagccattcgcttttcccacgaacggagcagttgttgcttgaaacgttctgtttggattcttcgatctttcccaacgccgggttcgtgcacatcatataggtcgggcactggaggagttgcgaagctcgttgtacaatgaaatgcatagcgcagaaggtgctaagcgccagcagcagcgattctgtggaccaagtgttgcattgacattcaattttgctgttgctgttgggattatcatggcaaacaaaatggtgatggggactgttggatttaaatttccaattgcactctcattaattcattatgcagttgcatttgttctaatggccacccttaagacattatccttgttaccagttgccccgccatcgaaatccactcctttctcatctatatttgctttgggtgctgtaatgtccctgtccactgggctagccaacgtgagtttgaaacataacagtgtaggtttctatcaaatggctaagattgctgtaaccccaacaattgtcgtagcagaattcatgcttttccagaagaaagtttcctctaaaaaggctgtcacactggcagttgtgtcatttggagtcgctgtagcgactgttaccgatctggagttcaacttttttggtgcttgtgttgcattagcatggattgttcctagtgccgtgaacaaaatcctttggtcaagtttgcaacagagtggaaactggaccgcccttgcgctgatgtggaagacaactccgattacgatatttttcttgttgacattgatgcctttgctggacccccctggcctcttgttgttcaattggaacttcagaaacagctgcgctgttatcatctctgcattgttcggtttccttcttcagtggtctggtgctttggcactcggcgcgacgtcagctttgtctcatgttgtgctgggccaattcaaaacgatcgtcatcatgctctccggctacctgatcttcggctccgaccctgggatcaccagcgtctgcggtgccgtgctcgcactcggcggcatgtccttctacacctacctgggtctgaagaaagaccccgcgaccagcggcaaaaaagcaccatcgagacagaactccttcatggcgagacctaaggtcgctgctgacgacagtgacgacgcggattcagagcaagatgatactgtataggttggcgaaactgtcatctaggccacttaatgcaaagatcaatctgagctcagttaattctcggttggttgtaatctgtcggtgaccgagtccatttttgtacatagatgctacctttaagccttacggattgtctattgcgtagtgacaagtagttcgagaggtattgcccctaatttatagcctgtgagattcgattagcgatgtacgcaggaacggggaacccaagtcatctgtttttttatgtcgatcatcagttatttacaatgaaaatcatgcaactctacaaccg

SEQ ID NO: 51310 - DNA, 961 bp, Zea Mays
ccaactattataacatggttctggagcttattcaatcatatgaaataagctgtcacactggcagttgtgtcatttggagtcgctgtagcgactgttaccgatctggagttcaacttttttggtgcttgtgttgcattagcatggattgttcctagtgccgtgaacaaaatcctttggtcaagtttgcaacagagtggaaactggaccgcccttgcgctgatgtggaagacaactccgattacgatatttttcttgttgacattgatgcctttgctggacccccctggcctcttgttgttcaattggaacttcagaaacagctgcgctgttatcatctctgcattgttcggtttccttcttcagtggtctggtgctttggcactcggcgcgacgtcagctttgtctcatgttgtgctgggccaattcaaaacgatcgtcatcatgctctccggctacctgatcttcggctccgaccctgggatcaccagcgtctgcggtgccgtgctcgcactcggcggcatgtccttctacacctacctgggtctgaagaaagaccccgcgaccagcggcaaaaaagcaccatcgagacagaactccttcatggcgagacctaaggtcgctgctgacgacagtgacgacgcggattcagagcaagatgatactgtataggttggcgaaactgtcatctaggccacttaatgcaaagatcaatctgagctcagttaattctcggttggttgtaatctgtcggtgaccgagtccatttttgtacatagatgctacctttaagccttacggattgtctattgcgtagtgacaagtagttcgagaggtattgcccctaatttatagcctgtgagattcgattagcgatgtacgcaggaacggggaacccaagtcatctgtttttttatgtcgatcatcagttatttacaatgaaaatcatgcaactctacaaccg

SEQ ID NO: 51311 - DNA, 1146 bp, Zea Mays
cagctatctaagagaagcttgtaacaaaacagaccattctcaaaagtctcgaagaaaaaggatttgcacaatttacatctgtagaatggggctgaatgattgatgacaccctggtgtggtgcagctaaacatgaaatgttattccctaggatctagttcacatttgaactaaatttgaaattccagcaatctgccttttccaaatgaagctacaagaaagcataatgctaggagatggcgcgtcagaatggtcaactggcaggggctgctgctgccatggagcagcaaaattcggccatattcaaatccatcttttagctatctaagagaagcttgtaacaaaatagaccattctcaaaagtctcgaagaaaaaggatttacacaatttacatccgtagaatggggttgaatgattgatgacaccctggtgtggtgcagctaaacatgaaatgttattccctaggatctagttcacatttgaactaaatttgaaattccttgagcaatctgtcttttccaaatgaagctacaagaaagcataatgctaggagatggcgcgtcagaatggtcaactggtaggggctgctgctgctgccatggagctgcaaaattcaacatcataagctatggaagcacttgtcgtgctgataggattaggattatctaataggagtactccctccgtttctttttatttgtcgctggatagtgcaattttacactatccagcgacaaataaaaagaaacggagggagtaccattgagcatttaatatattcagaaccacccatcatttgcaggcacattggccatttatttagcttcgtccactattttggagccatgtaatgtcatgcacaactctatttatgtgtgaaataaaatttgaatcatcatcattgctcaagagatgtattttaccacccataacatgacttgaggtgattctatattcatagcatgcaaccgtatgaataaatgatatattggaggaaccaaactttaaaacattgaaaatataattatgaaggttaagattccaagctttagacaagatgtcaacgaagtgatgtatttgatcacaatgtcatttgtagattcagttctcaacatctaaaaccagctaggaagactgaactttcagg

SEQ ID NO: 51312 - DNA, 2825 bp, Zea Mays
ctcgtgatctcgtccttgtcaataaagaaaggccgcttctctgccaggcccagagttaaaacatccgcggctagggtttaaggattttcttctccgctcccccggcccccattcgcacccagcacagctacagacggtctctatggccaagaaaggggcgaagagaaagcagcagccgccgccggcggctcccaccgcgaagaaggggagcaaggctgtgcccccaccgaaggctgcgaagagagcgcccaagaagcaggagcttctcgagtcctccgacgattctgatacggagcagcagctcctggaggaggcctcccacctcgacgtcccctctgattccgacgccgaagagctctctgggtcggacgctgaggctgacgagctctcgggctcggatgccgattccgacggaagctcgagcagcggcgacgacgtggaggatgaggaggaggaggaggaaggtgatggaagtgatgatgaccccctggcggacgacttcctcgctggtagcgacgaaggaagcgagggtggtgactctggactggagtcagacgagtctgatgacctcgaggcaaaatcacgagcaattgatgagcagaaaatcaaggcggaagaagatgcagaggaggaacttcaaaccaacataagatcagaatctgatgagttcagattacccacggcagaggagctggaggaagaggcacacagaccacctaacctaccaaatctcaaaaggaggatttcagaaattgttcgagtgctctcaaacttcagcaagctgaggcagaaagatgttccacgaaaagattatatcgaacaactgaaaactgatatcatttcatactatggatataatgattttctagttgaagcattaattgagatgttcccagctgttgagcttgttgagttactggaagcctttgagaaaaggccgcccgagtgcttgcggacgaatacactaaagacccggaggagggatcttgctgctgctcttataccaagaggatttaatttggacccgataggaaaatggtcaaaggtaggattagttgtctatgactccaccatttcagctggtgctactactgaatatatggctggtcattacatgaaacaaggtgcaagttcgtttttaccagtgatggcacttgctccacaggagaaggaacgaattgttgatatggcggctgctccaggtggtaagactacttacattggcgctcttatgaagaataccggaatcatctatgcaaatgagttcaatgagaaaaggttgcatggacttttgggaaatatccatcgcatgggtgtgacaaataccatagtttgtaactatgatggtaaagagctacccaaagttcttgggatgaattcggttgacagagtattgcttgatgctccctgcacaggaactgggaccatttggaaggatctacaaattaaaacatcaaaggacattgaagacatcaggagctgcgcctttgtccaaaagcaattgctgctagctgctattgatttggttgatgccaactccaaaactggtggttacattgtttactcaacttgttcgataatgattccagagaacgaggcagtaattgactatgcacttaaaaagagaaatgtaaagcttgtgccttgcgggttggattttgggcgtccaggattcatccggtaccgggagcatcggtttcatacttctttagaaaaaacaagaagattttatcctcatgtcaataacatggatggattttttgtagctaagctgaaaaagttaagcaatacaattccggtgacgtctgagccgtctaaagcatctgaagaagcagctaaggctgatggtgaagatgagaaagctatttctaatgaacaagagactggtgttcctgataaagatgagaaaactgttgagataaaaaatcataaaaatgtgactaataaaagaacaagtgtcaccaaagagactggaagccataaacgtgaatccaataagccaggaaagcatctcaagataaataagaataatgctacaaaagaaattgatggccctgagagcagtgaaacaaatagagatgggaaagaagagcatcgcgtacaaaccaagaaaatgagtcacaagaggaagtttgcttctgatagatccaaaaaatctggccccgagagcttctcgggtgtcaaagagaagagacaggtcagtgacaagaagcggaaaaagaaatggcaattcaagctgaggcgtgactgggaagctgaaaagaaaggtgacaagaggaggaaggtatgaaggagtattcagatgtccacaggccccaatgaaatttgatgggtgtgtaagggcaaccgagaattttgagcaagcacgagtttgcagccaccgaaaattttgatggaaactgaagcatattattatcttgctgaatgctatgtgaatcctgctgtacgtgttataaaaaaaaatcatatctgagatactagctgcaagaacctgacttctagatactgtgggttctgaatagtttcatcatgtggcttgtttggagatctagatcatgaaggcgcagtggcaactgattctgaagttcacgtttggtttggagtcttggagacaaggagtgatggaggcggagagaatgcatggttgtttgttttcagtaattattgttcacttttccaatagagggtgcgtttggtgcttgaacagccgtgtccctccaattttaagggatagctaagatagtcttattttaatcttgatcttgaatcaaataatcttatctgagagtatgttctgccttgccctgttgttattgcaacaaaac

SEQ ID NO: 51313 - DNA, 4495 bp, Zea Mays
ctcgtgatctcgtccttgtcaataaagaaaggccgcttctctgccaggcccagagttaaaacatccgcggctagggtttaaggattttcttctccgctcccccggcccccattcgcacccagcacagctacagacggtctctatggccaagaaaggggcgaagagaaagcagcagccgccgccggcggctcccaccgcgaagaaggggagcaaggctgtgcccccaccgaaggctgcgaagagagcgcccaagaagcaggagcttctcgagtcctccgacgattctgatacggagcagcagctcctggaggaggcctcccacctcgacgtcccctctgattccgacgccgaagagctctctgggtcggacgctgaggctgacgagctctcgggctcggatgccgattccgacggaagctcgagcagcggcgacgacgtggaggatgaggaggaggaggaggaaggtgatggaagtgatgatgaccccctggcggacgacttcctcgctggtagcgacgaaggaagcgagggtggtgactctggactggagtcagacgagtctgatgacctcgaggcaaaatcacgagcaattgatgagcagaaaatcaaggcggaagaagatgcagaggaggaacttcaaaccaacataagatcagaatctgatgagttcagattacccacggcagaggagctggaggaagaggcacacagaccacctaacctaccaaatctcaaaaggaggatttcagaaattgttcgagtgctctcaaacttcagcaagctgaggcagaaagatgttccacgaaaagattatatcgaacaactgaaaactgatatcatttcatactatggatataatgattttctagttgaagcattaattgagatgttcccagctgttgagcttgttgagttactggaagcctttgagaaaaggccgcccgagtgcttgcggacgaatacactaaagacccggaggagggatcttgctgctgctcttataccaagaggatttaatttggacccgataggaaaatggtcaaaggtaggattagttgtctatgactccaccatttcagctggtgctactactgaatatatggctggtcattacatgaaacaaggtgcaagttcgtttttaccagtgatggcacttgctccacaggagaaggaacgaattgttgatatggcggctgctccaggtggtaagactacttacattggcgctcttatgaagaataccggaatcatctatgcaaatgagttcaatgagaaaaggttgcatggacttttgggaaatatccatcgcatgggtgtgacaaataccatagtttgtaactatgatggtaaagagctacccaaagttcttgggatgaattcggttgacagagtattgcttgatgctccctgcacaggaactgggaccatttggaaggatctacaaattaaaacatcaaaggacattgaagacatcaggagctgcgcctttgtccaaaagcaattgctgctagctgctattgatttggttgatgccaactccaaaactggtggttacattgtttactcaacttgttcgataatgattccagagaacgaggcagtaattgactatgcacttaaaaagagaaatgtaaagcttgtgccttgcgggttggattttgggcgtccaggattcatccggtaccgggagcatcggtttcatacttctttagaaaaaacaagaagattttatcctcatgtcaataacatggatggattttttgtagctaagctgaaaaagttaagcaatacaattccggtgacgtctgagccgtctaaagcatctgaagaagcagctaaggctgatggtgaagatgagaaagctatttctaatgaacaagagactggtgttcctgataaagatgagaaaactgttgagataaaaaatcataaaaatgtgactaataaaagaacaagtgtcaccaaagagactggaagccataaacgtgaatccaataagccaggaaagcatctcaagataaataagaataatgctacaaaagaaattgatggccctgagagcagtgaaacaaatagagatgggaaagaagagcatcgcgtacaaaccaagaaaatgagtcacaagaggaagtttgcttctgatagatccaaaaaatctggccccgagagcttctcgggtgtcaaagagaagagacaggtcagtgacaagaagcggaaaaagaaatggcaattcaagctgaggcgtgactgggaagctgaaaagaaaggtgacaagaggaggaaggtatgaaggagtattcagatgtccacaggccccaatgaaatttgatgggtgtgtaagggcaaccgagaattttgagcaagcacgagtttgcagccaccgaaaattttgatggaaactgaagcatattattatcttgctgaatgctatgtgaatcctgctgtacgtgttataaaaaaaaatcatatctgagatactagctgcaagaacctgacttctagatactgtgggttctgaatagtttcatcatgtggcttgtttggagatctagatcatgaaggcgcagtggcaactgattctgaagttcacgtttggtttggagtcttggagacaagattgtgaatgaaacctgcaaaggaatagtccatcacaatgctaaggttgcttcccgactgaccacattgcgcttgttttagcctctggttatctcgtctggaaaaaaaaacccagacatctgaccgggtcagacgatacaacccatatacgtacgtcgagtcctcagagttcaattctacctggaccatcgcacccatcttggcccagagtacttccgcgccgcgctacgaacgaggccatccgccgccacacgccgtcggccatgccgcagaggtcggaggcgggcactgctggggagggcgacgaggagcagcggctgcgggctgctctgcgtcacctgcaggcggaggcgggggtgctggagcgcctggtatacaagcaccggaaccagcaccgcggcgccgcctatttccaatacctcctcaaggtgaggagggacctgaagcttctgctcggcgccggcctcgctgaggttctcaacgccgtgttcccagttctcgcatgccgcaagccggccaacacgatcctcgtccccaacaagcagtctaagaagaaacctgttgcaaaccacagccatcaccagaggcttttgggtgtagcccgcttgttatcccagatgtctgaacctgttatgaaggcagcaattcagataacatttttacttgctagatcattcttcgttgatctttgcacggctgtgctttctttgcttgcacgagtaagggtcctgatccaacagatgttacttgatgttgtgtctatatacaataaggtcactgatcttactgaaaggaagcaggctgttaagattagcatcagtggagtgcaggctttcagagagtactacccctctatgaatgatgcatgtacagttctggagtgtgtatggataaaagataaattcgttttgcatgaaaaggttaaagatatctctcaggaaacccaagttgagaatcagaagtgctgcggtcctgaatctacagtccagtatgaaacaattgcactgattagtgaagattctacatagcggaagtcctcctggcactggagtacttgcacacgctcggtatcatataccgcgatctcaagcctgaaaatgtccttgtccgggaggacgggcacatcatgctctcggacttcgacctctctcttcgttgtgctgtcagtccaacactgatcaggtcctcaaaccctgacgcagaactgcagaagcgctcaggaagagcagccaaggctactgtgttgagccagcctgtgttgagccgtcctgcatcactcaaccgtcgtgtgcagccccaaccacctgcttcggcccacgcctgttctcctccaagtccaagaccaagagagaccggtaaccaaaaccagaagttgccaccccgatcagcccttggcctgagctcatagcggagcccagcgatgcacggtcgatgtcgtttgtgtgctatattgtttttccgttggtagatttttttgaggggtacttttacactttcttaaagttcacatctgtaattcagcaagtcctgattgtactgatctcctgcaatgcctttgcaaaacattgtcattttttttgtattccatcagttccaaattggaagtcgttttagtttgttccaagtcaaaacatgtcttactttaaccaactttgtaaaaaaaaatccaaattggaagtcgttttagtttgttccaagtcaaaacatgtggtcatgcatctaaccatcatggttttagtcttcgagttaaatttgggtacctattttaacgaaaaacggcatagtttttttttgtaatatcaactaaatgtactaacaacaaatatatttcatagtgtaccaagtaaatcttgttttttgtttcagacacttgtgtgtt

SEQ ID NO: 51314 - DNA, 503 bp, Zea Mays
agagttaaaacatccgcggctagggtttaaggattttcttctccgctcccccggcccccattcgcacccagcacagctacagacggtctctatggccaagaaaggggcgaagagaaagcagcagccgccgccggcggctcccaccgcgaagaaggggagcaaggctgtgcccccaccgaaggctgcgaagagagcgcccaagaagcaggagcttctcgagtcctccgacgattctgatacggagcagcagctcctggaggaggcctcccacctcgacgtcccctctgattccgacgccgaagagctctctgggtcggacgctgaggctgacgagctctcgggctcggatgccgattccgacggaagctcgagcagcggcgacgacgtggaggatgaggaggaggaggaggaaggtgatggaagtgatgatgaccccctggcggacgacttcctcgctggtagcgacgaaggaagcgtttcagttttccccaagccattgctta

SEQ ID NO: 51315 - DNA, 1470 bp, Zea Mays
agagttaaaacatccgcggctagggtttaaggattttcttctccgctcccccggcccccattcgcacccagcacagctacagacggtctctatggccaagaaaggggcgaagagaaagcagcagccgccgccggcggctcccaccgcgaagaaggggagcaaggctgtgcccccaccgaaggctgcgaagagagcgcccaagaagcaggagcttctcgagtcctccgacgattctgatacggagcagcagctcctggaggaggcctcccacctcgacgtcccctctgattccgacgccgaagagctctctgggtcggacgctgaggctgacgagctctcgggctcggatgccgattccgacggaagctcgagcagcggcgacgacgtggaggatgaggaggaggaggaggaaggtgatggaagtgatgatgaccccctggcggacgacttcctcgctggtagcgacgaaggaagcgagggtggtgactctggactggagtcagacgagtctgatgacctcgaggcaaaatcacgagcaattgatgagcagaaaatcaaggcggaagaagatgcagaggaggaacttcaaaccaacataagatcagaatctgatgagttcagattacccacggcagaggagctggaggaagaggcacacagaccacctaacctaccaaatctcaaaaggaggatttcagaaattgttcgagtgctctcaaacttcagcaagctgaggcagaaagatgttccacgaaaagattatatcgaacaactgaaaactgatatcatttcatactatggatataatgattttctagttgaagcattaattgagatgttcccagctgttgagcttgttgagttactggaagcctttgagaaaaggccgcccgagtgcttgcggacgaatacactaaagacccggaggagggatcttgctgctgctcttataccaagaggatttaatttggacccgataggaaaatggtcaaaggtaggattagttgtctatgactccaccatttcagctggtgctactactgaatatatggctggtcattacatgaaacaaggtgcaagttcgtttttaccagtgatggcacttgctccacaggagaaggaacgaattgttgatatggcggctgctccaggtggtaagactacttacattggcgctcttatgaagaataccggaatcatctatgcaaatgagttcaatgagaaaaggttgcatggacttttgggaaatatccatcgcatgggtgtgacaaataccatagtttgtaactatgatggtaaagagctacccaaagttcttgggatgaattcggttgacagagtattgcttgatgctccctgcacaggaactgggaccatttggaaggatctacaaattaaaacatcaaaggacattgaagacatcaggagctgcgcctttgtccaaaagcccgttcacgcgcacggagaggt

SEQ ID NO: 51316 - DNA, 2502 bp, Zea Mays
agagttaaaacatccgcggctagggtttaaggattttcttctccgctcccccggcccccattcgcacccagcacagctacagacggtctctatggccaagaaaggggcgaagagaaagcagcagccgccgccggcggctcccaccgcgaagaaggggagcaaggctgtgcccccaccgaaggctgcgaagagagcgcccaagaagcaggagcttctcgagtcctccgacgattctgatacggagcagcagctcctggaggaggcctcccacctcgacgtcccctctgattccgacgccgaagagctctctgggtcggacgctgaggctgacgagctctcgggctcggatgccgattccgacggaagctcgagcagcggcgacgacgtggaggatgaggaggaggaggaggaaggtgatggaagtgatgatgaccccctggcggacgacttcctcgctggtagcgacgaaggaagcgagggtggtgactctggactggagtcagacgagtctgatgacctcgaggcaaaatcacgagcaattgatgagcagaaaatcaaggcggaagaagatgcagaggaggaacttcaaaccaacataagatcagaatctgatgagttcagattacccacggcagaggttctggaggaagaggcacacagaccacctaacctaccaaatctcaaaaggaggatttcagaaattgttcgagtgctctcaaacttcagcaagctgaggcagaaagatgttccacgaaaagattatatcgaacaactgaaaactgatatcatttcatactatggatataatgattttctagttgaagcattaattgagatgttcccagctgttgagcttgttgagttactggaagcctttgagaaaaggccgcccgagtgcttgcggacgaatacactaaagacccggaggagggatcttgctgctgctcttataccaagaggatttaatttggacccgataggaaaatggtcaaaggtaggattagttgtctatgactccaccatttcagctggtgctactactgaatatatggctggtcattacatgaaacaaggtgcaagttcgtttttaccagtgatggcacttgctccacaggagaaggaacgaattgttgatatggcggctgctccaggtggtaagactacttacattggcgctcttatgaagaataccggaatcatctatgcaaatgagttcaatgagaaaaggttgcatggacttttgggaaatatccatcgcatgggtgtgacaaataccatagtttgtaactatgatggtaaagagctacccaaagttcttgggatgaattcggttgacagagtattgcttgatgctccctgcacaggaactgggaccatttggaaggatctacaaattaaaacatcaaaggacattgaagacatcaggagctgcgcctttgtccaaaagcaattgctgctagctgctattgatttggttgatgccaactccaaaactggtggttacattgtttactcaacttgttcgataatgattccagagaacgaggcagtaattgactatgcacttaaaaagagaaatgtaaagcttgtgccttgcgggttggattttgggcgtccaggattcatccggtaccgggagcatcggtttcatacttctttagaaaaaacaagaagattttatcctcatgtcaataacatggatggattttttgtagctaagctgaaaaagttaagcaatacaattccggtgacgtctgagccgtctaaagcatctgaagaagcagctaaggctgatggtgaagatgagaaagctatttctaatgaacaagagactggtgttcctgataaagatgagaaaactgttgagataaaaaatcataaaaatgtgactaataaaagaacaagtgtcaccaaagagactggaagccataaacgtgaatccaataagccaggaaagcatctcaagataaataagaataatgctacaaaagaaattgatggccctgagagcagtgaaacaaatagagatgggaaagaagagcatcgcgtacaaaccaagaaaatgagtcacaagaggaagtttgcttctgatagatccaaaaaatctggccccgagagcttctcgggtgtcaaagagaagagacaggtcagtgacaagaagcggaaaaagaaatggcaattcaagctgaggcgtgactgggaagctgaaaagaaaggtgacaagaggaggaaggtatgaaggagtattcagatgtccacaggccccaatgaaatttgatgggtgtgtaagggcaaccgagaattttgagcaagcacgagtttgcagccaccgaaaattttgatgtatgaaatagcgattgtagtttattattttttattcagtgtacgtctcaagttttatctttaatgagtgacatatctggcagggaaactgaagcatattattatcttgctgaatgctatgtgaatcctgctgtacgtgttataaaaaaaaatcatatc

SEQ ID NO: 51317 - DNA, 2421 bp, Zea Mays
agagttaaaacatccgcggctagggtttaaggattttcttctccgctcccccggcccccattcgcacccagcacagctacagacggtctctatggccaagaaaggggcgaagagaaagcagcagccgccgccggcggctcccaccgcgaagaaggggagcaaggctgtgcccccaccgaaggctgcgaagagagcgcccaagaagcaggagcttctcgagtcctccgacgattctgatacggagcagcagctcctggaggaggcctcccacctcgacgtcccctctgattccgacgccgaagagctctctgggtcggacgctgaggctgacgagctctcgggctcggatgccgattccgacggaagctcgagcagcggcgacgacgtggaggatgaggaggaggaggaggaaggtgatggaagtgatgatgaccccctggcggacgacttcctcgctggtagcgacgaaggaagcgagggtggtgactctggactggagtcagacgagtctgatgacctcgaggcaaaatcacgagcaattgatgagcagaaaatcaaggcggaagaagatgcagaggaggaacttcaaaccaacataagatcagaatctgatgagttcagattacccacggcagagaggagctggaggaagaggcacacagaccacctaacctaccaaatctcaaaaggaggatttcagaaattgttcgagtgctctcaaacttcagcaagctgaggcagaaagatgttccacgaaaagattatatcgaacaactgaaaactgatatcatttcatactatggatataatgattttctagttgaagcattaattgagatgttcccagctgttgagcttgttgagttactggaagcctttgagaaaaggccgcccgagtgcttgcggacgaatacactaaagacccggaggagggatcttgctgctgctcttataccaagaggatttaatttggacccgataggaaaatggtcaaaggtaggattagttgtctatgactccaccatttcagctggtgctactactgaatatatggctggtcattacatgaaacaaggtgcaagttcgtttttaccagtgatggcacttgctccacaggagaaggaacgaattgttgatatggcggctgctccaggtggtaagactacttacattggcgctcttatgaagaataccggaatcatctatgcaaatgagttcaatgagaaaaggttgcatggacttttgggaaatatccatcgcatgggtgtgacaaataccatagtttgtaactatgatggtaaagagctacccaaagttcttgggatgaattcggttgacagagtattgcttgatgctccctgcacaggaactgggaccatttggaaggatctacaaattaaaacatcaaaggacattgaagacatcaggagctgcgcctttgtccaaaagcaattgctgctagctgctattgatttggttgatgccaactccaaaactggtggttacattgtttactcaacttgttcgataatgattccagagaacgaggcagtaattgactatgcacttaaaaagagaaatgtaaagcttgtgccttgcgggttggattttgggcgtccaggattcatccggtaccgggagcatcggtttcatacttctttagaaaaaacaagaagattttatcctcatgtcaataacatggatggattttttgtagctaagctgaaaaagttaagcaatacaattccggtgacgtctgagccgtctaaagcatctgaagaagcagctaaggctgatggtgaagatgagaaagctatttctaatgaacaagagactggtgttcctgataaagatgagaaaactgttgagataaaaaatcataaaaatgtgactaataaaagaacaagtgtcaccaaagagactggaagccataaacgtgaatccaataagccaggaaagcatctcaagataaataagaataatgctacaaaagaaattgatggccctgagagcagtgaaacaaatagagatgggaaagaagagcatcgcgtacaaaccaagaaaatgagtcacaagaggaagtttgcttctgatagatccaaaaaatctggccccgagagcttctcgggtgtcaaagagaagagacaggtcagtgacaagaagcggaaaaagaaatggcaattcaagctgaggcgtgactgggaagctgaaaagaaaggtgacaagaggaggaaggtatgaaggagtattcagatgtccacaggccccaatgaaatttgatgggtgtgtaagggcaaccgagaattttgagcaagcacgagtttgcagccaccgaaaattttgatggaaactgaagcatattattatcttgctgaatgctatgtgaatcctgctgtacgtgttataaaaaaaaatcatatc

SEQ ID NO: 51318 - DNA, 1951 bp, Zea Mays
agacccatagagagttccggtcggctggaagaacaaaatccggaagcgccctccgtggtggacgtcctccagattgtgaatgaaacctgcaaaggaatagtccatcacaatgctaaggttgcttcccgactgaccacattgcgcttgttttagcctctggttatctcgtctggaaaaaaaaacccagacatctgaccgggtcagacgatacaacccatatacgtacgtcgagtcctcagagttcaattctacctggaccatcgcacccatcttggcccagagtacttccgcgccgcgctacgaacgaggccatccgccgccacacgccgtcggccatgccgcagaggtcggaggcgggcactgctggggagggcgacgaggagcagcggctgcgggctgctctgcgtcacctgcaggcggaggcgggggtgctggagcgcctggtatacaagcaccggaaccagcaccgcggcgccgcctatttccaatacctcctcaaggtgaggagggacctgaagcttctgctcggcgccggcctcgctgaggttctcaacgccgtgttcccagttctcgcatgccgcaagccggccaacacgatcctcgtccccaacaagcagtctaagaagaaacctgttgcaaaccacagccatcaccagaggcttttgggtgtagcccgcttgttatcccagatgtctgaacctgttatgaaggcagcaattcagataacatttttacttgctagatcattcttcgttgatctttgcacggctgtgctttctttgcttgcacgagtaagggtcctgatccaacagatgttacttgatgttgtgtctatatacaataaggtcactgatcttactgaaaggaagcaggctgttaagattagcatcagtggagtgcaggctttcagagagtactacccctctatgaatgatgcatgtacagttctggagtgtgtatggataaaagataaattcgttttgcatgaaaaggttaaagatatctctcaggaaacccaagttgagaatcagaagtgctgcggtcctgaatctacagtccagtatgaaacaattgcactgattagtgaagattctacatagcggaagtcctcctggcactggagtacttgcacacgctcggtatcatataccgcgatctcaagcctgaaaatgtccttgtccgggaggacgggcacatcatgctctcggacttcgacctctctcttcgttgtgctgtcagtccaacactgatcaggtcctcaaaccctgacgcagaactgcagaagcgctcaggaagagcagccaaggctactgtgttgagccagcctgtgttgagccgtcctgcatcactcaaccgtcgtgtgcagccccaaccacctgcttcggcccacgcctgttctcctccaagtccaagaccaagagagaccggtaaccaaaaccagaagttgccaccccgatcagcccttggcctgagctcatagcggagcccagcgatgcacggtcgatgtcgtttgtgtgctatattgtttttccgttggtagatttttttgaggggtacttttacactttcttaaagttcacatctgtaattcagcaagtcctgattgtactgatctcctgcaatgcctttgcaaaacattgtcattttttttgtattccatcagttccaaattggaagtcgttttagtttgttccaagtcaaaacatgtcttactttaaccaactttgtaaaaaaaaatccaaattggaagtcgttttagtttgttccaagtcaaaacatgtggtcatgcatctaaccatcatggttttagtcttcgagttaaatttgggtacctattttaacgaaaaacggcatagtttttttttgtaatatcaactaaatgtactaacaacaaatatatttcatagtgtaccaagtaaatcttgttttttgtttcagacacttgtgtgtt

SEQ ID NO: 51319 - DNA, 2170 bp, Zea Mays
aaaaacccggtagaaaaagaaagtgatttgacgggccggggagcagaagggcacctcccgtttcctgccctcttcttgttcttcttcttttttccctaccctccgccgttgctctgcaaggcacgtcctgcacgcgccagagctaggcgataaactggaaaggagcgcgcagcgcaggcttcgggctcctgtctccgccgcggcgtcctctcgctttttttttttttgcttcttgggaagcacaaaggctcaggtctttcaggacttgcaggctctgcgcagcgcgatctgattgtgaatgaaacctgcaaaggaatagtccatcacaatgctaaggttgcttcccgactgaccacattgcgcttgttttagcctctggttatctcgtctggaaaaaaaaacccagacatctgaccgggtcagacgatacaacccatatacgtacgtcgagtcctcagagttcaattctacctggaccatcgcacccatcttggcccagagtacttccgcgccgcgctacgaacgaggccatccgccgccacacgccgtcggccatgccgcagaggtcggaggcgggcactgctggggagggcgacgaggagcagcggctgcgggctgctctgcgtcacctgcaggcggaggcgggggtgctggagcgcctggtatacaagcaccggaaccagcaccgcggcgccgcctatttccaatacctcctcaaggtgaggagggacctgaagcttctgctcggcgccggcctcgctgaggttctcaacgccgtgttcccagttctcgcatgccgcaagccggccaacacgatcctcgtccccaacaagcagtctaagaagaaacctgttgcaaaccacagccatcaccagaggcttttgggtgtagcccgcttgttatcccagatgtctgaacctgttatgaaggcagcaattcagataacatttttacttgctagatcattcttcgttgatctttgcacggctgtgctttctttgcttgcacgagtaagggtcctgatccaacagatgttacttgatgttgtgtctatatacaataaggtcactgatcttactgaaaggaagcaggctgttaagattagcatcagtggagtgcaggctttcagagagtactacccctctatgaatgatgcatgtacagttctggagtgtgtatggataaaagataaattcgttttgcatgaaaaggttaaagatatctctcaggaaacccaagttgagaatcagaagtgctgcggtcctgaatctacagtccagtatgaaacaattgcactgattagtgaagattctacatagcggaagtcctcctggcactggagtacttgcacacgctcggtatcatataccgcgatctcaagcctgaaaatgtccttgtccgggaggacgggcacatcatgctctcggacttcgacctctctcttcgttgtgctgtcagtccaacactgatcaggtcctcaaaccctgacgcagaactgcagaagcgctcaggaagagcagccaaggctactgtgttgagccagcctgtgttgagccgtcctgcatcactcaaccgtcgtgtgcagccccaaccacctgcttcggcccacgcctgttctcctccaagtccaagaccaagagagaccggtaaccaaaaccagaagttgccaccccgatcagcccttggcctgagctcatagcggagcccagcgatgcacggtcgatgtcgtttgtgtgctatattgtttttccgttggtagatttttttgaggggtacttttacactttcttaaagttcacatctgtaattcagcaagtcctgattgtactgatctcctgcaatgcctttgcaaaacattgtcattttttttgtattccatcagttccaaattggaagtcgttttagtttgttccaagtcaaaacatgtcttactttaaccaactttgtaaaaaaaaatccaaattggaagtcgttttagtttgttccaagtcaaaacatgtggtcatgcatctaaccatcatggttttagtcttcgagttaaatttgggtacctattttaacgaaaaacggcatagtttttttttgtaatatcaactaaatgtactaacaacaaatatatttcatagtgtaccaagtaaatcttgttttttgtttcagacacttgtgtgtt

SEQ ID NO: 51320 - DNA, 2147 bp, Zea Mays
aaacccggtagaaaaagaaagtgatttgacgggccggggagcagaagggcacctcccgtttcctgccctcttcttgttcttcttcttttttccctaccctccgccgttgctctgcaaggcacgtcctgcacgcgccagagctaggcgataaactggaaaggagcgcgcagcgcaggcttcgggctcctgtctccgccgcggcgtcctctcgctttttttttttttgcttcttgggaagcacaaaggctcaggtctttcaggacttgcaggctctgcgcagcgcgatctgattgtgaatgaaacctgcaaaggaatagtccatcacaatgctaaggttgcttcccgactgaccacattgcgcttgttttagcctctggttatctcgtctggaaaaaaaaacccagacatctgaccgggtcagacgatacaacccatatacgtacgtcgagtcctcagagttcaattctacctggaccatcgcacccatcttggcccagagtacttccgcgccgcgctacgaacgaggccatccgccgccacacgccgtcggccatgccgcagaggtcggaggcgggcactgctggggagggcgacgaggagcagcggctgcgggctgctctgcgtcacctgcaggcggaggcgggggtgctggagcgcctggtatacaagcaccggaaccagcaccgcggcgccgcctatttccaatacctcctcaaggtgaggagggacctgaagcttctgctcggcgccggcctcgctgaggttctcaacgccgtgttcccagttctcgcatgccgcaagccggccaacacgatcctcgtccccaacaagcagtctaagaagaaacctgttgcaaaccacagccatcaccagaggcttttgggtgtagcccgcttgttatcccagatgtctgaacctgttatgaaggcagcaattcagataacatttttacttgctagatcattcttcgttgatctttgcacggctgtgctttctttgcttgcacgaatgttacttgatgttgtgtctatatacaataaggtcactgatcttactgaaaggaagcaggctgttaagattagcatcagtggagtgcaggctttcagagagtactacccctctatgaatgatgcatgtacagttctggagtgtgtatggataaaagataaattcgttttgcatgaaaaggttaaagatatctctcaggaaacccaagttgagaatcagaagtgctgcggtcctgaatctacagtccagtatgaaacaattgcactgattagtgaagattctacatagcggaagtcctcctggcactggagtacttgcacacgctcggtatcatataccgcgatctcaagcctgaaaatgtccttgtccgggaggacgggcacatcatgctctcggacttcgacctctctcttcgttgtgctgtcagtccaacactgatcaggtcctcaaaccctgacgcagaactgcagaagcgctcaggaagagcagccaaggctactgtgttgagccagcctgtgttgagccgtcctgcatcactcaaccgtcgtgtgcagccccaaccacctgcttcggcccacgcctgttctcctccaagtccaagaccaagagagaccggtaaccaaaaccagaagttgccaccccgatcagcccttggcctgagctcatagcggagcccagcgatgcacggtcgatgtcgtttgtgtgctatattgtttttccgttggtagatttttttgaggggtacttttacactttcttaaagttcacatctgtaattcagcaagtcctgattgtactgatctcctgcaatgcctttgcaaaacattgtcattttttttgtattccatcagttccaaattggaagtcgttttagtttgttccaagtcaaaacatgtcttactttaaccaactttgtaaaaaaaaatccaaattggaagtcgttttagtttgttccaagtcaaaacatgtggtcatgcatctaaccatcatggttttagtcttcgagttaaatttgggtacctattttaacgaaaaacggcatagtttttttttgtaatatcaactaaatgtactaacaacaaatatatttcatagtgtaccaagtaaatcttgttttttgtttcagacacttgtgtgtt

SEQ ID NO: 51321 - DNA, 1360 bp, Zea Mays
cccggtagaaaaagaaagtgatttgacgggccggggagcagaagggcacctcccgtttcctgccctcttcttgttcttcttcttttttccctaccctccgccgttgctctgcaaggcacgtcctgcacgcgccagagctaggcgataaactggaaaggagcgcgcagcgcaggcttcgggctcctgtctccgccgcggcgtcctctcgctttttttttttttgcttcttgggaagcacaaaggctcaggtctttcaggacttgcaggctctgcgcagcgcgatctgattgtgaatgaaacctgcaaaggaatagtccatcacaatgctaaggttgcttcccgactgaccacattgcgcttgttttagcctctggttatctcgtctggaaaaaaaaacccagacatctgaccgggtcagacgatacaacccatatacgtacgtcgagtcctcagagttcaattctacctggaccatcgcacccatcttggcccagagtacttccgcgccgcgctacgaacgaggccatccgccgccacacgccgtcggccatgccgcagaggtcggaggcgggcactgctggggagggcgacgaggagcagcggctgcgggctgctctgcgtcacctgcaggcggaggcgggggtgctggagcgcctggtatacaagcaccggaaccagcaccgcggcgccgcctatttccaatacctcctcaaggtgaggagggacctgaagcttctgctcggcgccggcctcgctgaggttctcaacgccgtgttcccagttctcgcatgccgcaagccggccaacacgatcctcgtccccaacaagcagtctaagaagaaacctgttgcaaaccacagccatcaccagaggcttttgggtgtagcccgcttgttatcccagatgtctgaacctgttatgaaggcagcaattcagataacatttttacttgctagatcattcttcgttgatctttgcacggctgtgctttctttgcttgcacgagtaagggtcctgatccaacagatgttacttgatgttgtgtctatatacaataaggtcactgatcttactgaaaggaagcaggctgttaagattagcatcagtggagtgcaggctttcagagagtactacccctctatgaatgatgcatgtacagttctggagtgtgtatggataaaagataaattcgttttgcatgaaaaggttaaagatatctctcaggaaacccaagttgagaatcagaagtgctgcggtcctgaatctacagtccagtatgaaacaattgcactgattagtgaagactgcgcaacgaggacttcaactgggataaggggacaaactacgccagaagaagggg

SEQ ID NO: 51322 - DNA, 1975 bp, Zea Mays
ggcacctcccgtttcctgccctcttcttgttcttcttcttttttccctaccctccgccgttgctctgcaaggcacgtcctgcacgcgccagagctaggcgataaactggaaaggagcgcgcagcgcaggcttcgggctcctgtctccgccgcggcgtcctctcgctttttttttttttgcttcttgggaagcacaaaggctcaggtctttcaggacttgcaggctctgcgcagcgcgatctgattgtgaatgaaacctgcaaaggaatagtccatcacaatgctaaggttgcttcccgactgaccacattgcgcttgttttagcctctggttatctcgtctggaaaaaaaaacccagacatctgaccgggtcagacgatacaacccatatacgtacgtcgagtcctcagagttcaattctacctggaccatcgcacccatcttggcccagagtacttccgcgccgcgctacgaacgaggccatccgccgccacacgccgtcggccatgccgcagaggtcggaggcgggcactgctggggagggcgacgaggagcagcggctgcgggctgctctgcgtcacctgcaggcggaggcgggggtgctggagcgcctggtatacaagcaccggaaccagcaccgcggcgccgcctatttccaatacctcctcaaggtgaggagggacctgaagcttctgctcggcgccggcctcgctgaggttctcaacgccgtgttcccagttctcgcatgccgcaagccggccaacacgatcctcgtccccaacaagcagtctaagaagaaacctgttgcaaaccacagccatcaccagaggcttttgggtgtagcccgcttgttatcccagatgtctgaacctgttatgaaggcagcaattcagataacatttttacttgctagatcattcttcgttgatctttgcacggctgtgctttctttgcttgcacgagtaagggtcctgatccaacagatgttacttgatgttgtgtctatatacaataaggtcactgatcttactgaaaggaagcaggctgttaagattagcatcagtggagtgcaggctttcagagagtactacccctctatgaatgatgcatgtacagttctggagtgtgtatggataaaagataaattcgttttgcatgaaaaggttaaagatatctctcaggaaacccaagttgagaatcagaagtgctgcggtcctgaatctacagtccagtatgaaacaattgcactgattagtgaaggttaaaatgctttatcttctatttgtcacaataaatgcatgatgatctattgatcttgatttttttgttgctttgtcagaattagctgacatgctcatgaatcatgagaatccttggtgctttgttgctgatttggtttgaaaaacaagcactttgtagtgtattgcattgttaagagcatagctcaatttttttttatggaatacgcaggagagctgcgcatctttgtattaatagaagaataagaaagggggagagaaccccattacagcacacacaccccaacactagagactaactaaggagcaccgactaacatggaaaaacacgacccacagcgctgttttaagccagcaactcatctacttggaggaaagacagagccttggctccagtcaaggaccagagcaccgcctcttccctagccaccctaagggctgtgaccaagctaggattacatccatcaaagacacatctattcctatgcttccatatggtccaagcacctaggattactaaagaattaaaaccctttctcataagatcagatgcccgagagctgttagacttccaccacgactcaaaggaatcctcgtgagctggacacagctcctgcagccccactgaactaaggaaatcaaactagaactgcttggcaaaaacacatttgaccagcaaatgatttatggtttcagcctcttggtcgcacaaggggc

SEQ ID NO: 51323 - DNA, 1971 bp, Zea Mays
ggcacctcccgtttcctgccctcttcttgttcttcttcttttttccctaccctccgccgttgctctgcaaggcacgtcctgcacgcgccagagctaggcgataaactggaaaggagcgcgcagcgcaggcttcgggctcctgtctccgccgcggcgtcctctcgctttttttttttttgcttcttgggaagcacaaaggctcaggtctttcaggacttgcaggctctgcgcagcgcgatctgattgtgaatgaaacctgcaaaggaatagtccatcacaatgctaaggttgcttcccgactgaccacattgcgcttgttttagcctctggttatctcgtctggaaaaaaaaacccagacatctgaccgggtcagacgatacaacccatatacgtacgtcgagtcctcagagttcaattctacctggaccatcgcacccatcttggcccagagtacttccgcgccgcgctacgaacgaggccatccgccgccacacgccgtcggccatgccgcagaggtcggaggcgggcactgctggggagggcgacgaggagcagcggctgcgggctgctctgcgtcacctgcaggcggaggcgggggtgctggagcgcctggtatacaagcaccggaaccagcaccgcggcgccgcctatttccaatacctcctcaaggtgaggagggacctgaagcttctgctcggcgccggcctcgctgaggttctcaacgccgtgttcccagttctcgcatgccgcaagccggccaacacgatcctcgtccccaacaatctaagaagaaacctgttgcaaaccacagccatcaccagaggcttttgggtgtagcccgcttgttatcccagatgtctgaacctgttatgaaggcagcaattcagataacatttttacttgctagatcattcttcgttgatctttgcacggctgtgctttctttgcttgcacgagtaagggtcctgatccaacagatgttacttgatgttgtgtctatatacaataaggtcactgatcttactgaaaggaagcaggctgttaagattagcatcagtggagtgcaggctttcagagagtactacccctctatgaatgatgcatgtacagttctggagtgtgtatggataaaagataaattcgttttgcatgaaaaggttaaagatatctctcaggaaacccaagttgagaatcagaagtgctgcggtcctgaatctacagtccagtatgaaacaattgcactgattagtgaaggttaaaatgctttatcttctatttgtcacaataaatgcatgatgatctattgatcttgatttttttgttgctttgtcagaattagctgacatgctcatgaatcatgagaatccttggtgctttgttgctgatttggtttgaaaaacaagcactttgtagtgtattgcattgttaagagcatagctcaatttttttttatggaatacgcaggagagctgcgcatctttgtattaatagaagaataagaaagggggagagaaccccattacagcacacacaccccaacactagagactaactaaggagcaccgactaacatggaaaaacacgacccacagcgctgttttaagccagcaactcatctacttggaggaaagacagagccttggctccagtcaaggaccagagcaccgcctcttccctagccaccctaagggctgtgaccaagctaggattacatccatcaaagacacatctattcctatgcttccatatggtccaagcacctaggattactaaagaattaaaaccctttctcataagatcagatgcccgagagctgttagacttccaccacgactcaaaggaatcctcgtgagctggacacagctcctgcagccccactgaactaaggaaatcaaactagaactgcttggcaaaaacacatttgaccagcaaatgatttatggtttcagcctcttggtcgcacaaggggc

SEQ ID NO: 51324 - DNA, 2068 bp, Zea Mays
ggcacctcccgtttcctgccctcttcttgttcttcttcttttttccctaccctccgccgttgctctgcaaggcacgtcctgcacgcgccagagctaggcgataaactggaaaggagcgcgcagcgcaggcttcgggctcctgtctccgccgcggcgtcctctcgctttttttttttttgcttcttgggaagcacaaaggctcaggtctttcaggacttgcaggctctgcgcagcgcgatctgattgtgaatgaaacctgcaaaggaatagtccatcacaatgctaaggttgcttcccgactgaccacattgcgcttgttttagcctctggttatctcgtctggaaaaaaaaacccagacatctgaccgggtcagacgatacaacccatatacgtacgtcgagtcctcagagttcaattctacctggaccatcgcacccatcttggcccagagtacttccgcgccgcgctacgaacgaggccatccgccgccacacgccgtcggccatgccgcagaggtcggaggcgggcactgctggggagggcgacgaggagcagcggctgcgggctgctctgcgtcacctgcaggcggaggcgggggtgctggagcgcctggtatacaagcaccggaaccagcaccgcggcgccgcctatttccaatacctcctcaaggtgaggagggacctgaagcttctgctcggcgccggcctcgctgaggttctcaacgccgtgttcccagttctcgcatgccgcaagccggccaacacgatcctcgtccccaacaagcagtctaagaagaaacctgttgcaaaccacagccatcaccagaggcttttgggtgtagcccgcttgttatcccagatcattcttcgttgatctttgcacggctgtgctttctttgcttgcacgagtaagggtcctgatccaacagatgttacttgatgttgtgtctatatacaataaggtcactgatcttactgaaaggaagcaggctgttaagattagcatcagtggagtgcaggctttcagagagtactacccctctatgaatgatgcatgtacagttctggagtgtgtatggataaaagataaattcgttttgcatgaaaaggttaaagatatctctcaggaaacccaagttgagaatcagaagtgctgcggtcctgaatctacagtccagtatgaaacaattgcactgattagtgaagattctacatagcggaagtcctcctggcactggagtacttgcacacgctcggtatcatataccgcgatctcaagcctgaaaatgtccttgtccgggaggacgggcacatcatgctctcggacttcgacctctctcttcgttgtgctgtcagtccaacactgatcaggtcctcaaaccctgacgcagaactgcagaagcgctcaggaagagcagccaaggctactgtgttgagccagcctgtgttgagccgtcctgcatcactcaaccgtcgtgtgcagccccaaccacctgcttcggcccacgcctgttctcctccaagtccaagaccaagagagaccggtaaccaaaaccagaagttgccaccccgatcagcccttggcctgagctcatagcggagcccagcgatgcacggtcgatgtcgtttgtgtgctatattgtttttccgttggtagatttttttgaggggtacttttacactttcttaaagttcacatctgtaattcagcaagtcctgattgtactgatctcctgcaatgcctttgcaaaacattgtcattttttttgtattccatcagttccaaattggaagtcgttttagtttgttccaagtcaaaacatgtcttactttaaccaactttgtaaaaaaaaatccaaattggaagtcgttttagtttgttccaagtcaaaacatgtggtcatgcatctaaccatcatggttttagtcttcgagttaaatttgggtacctattttaacgaaaaacggcatagtttttttttgtaatatcaactaaatgtactaacaacaaatatatttcatagtgtaccaagtaaatcttgttttttgtttcagacacttgtgtgtt

SEQ ID NO: 51325 - DNA, 2104 bp, Zea Mays
ggcacctcccgtttcctgccctcttcttgttcttcttcttttttccctaccctccgccgttgctctgcaaggcacgtcctgcacgcgccagagctaggcgataaactggaaaggagcgcgcagcgcaggcttcgggctcctgtctccgccgcggcgtcctctcgctttttttttttttgcttcttgggaagcacaaaggctcaggtctttcaggacttgcaggctctgcgcagcgcgatctgattgtgaatgaaacctgcaaaggaatagtccatcacaatgctaaggttgcttcccgactgaccacattgcgcttgttttagcctctggttatctcgtctggaaaaaaaaacccagacatctgaccgggtcagacgatacaacccatatacgtacgtcgagtcctcagagttcaattctacctggaccatcgcacccatcttggcccagagtacttccgcgccgcgctacgaacgaggccatccgccgccacacgccgtcggccatgccgcagaggtcggaggcgggcactgctggggagggcgacgaggagcagcggctgcgggctgctctgcgtcacctgcaggcggaggcgggggtgctggagcgcctggtatacaagcaccggaaccagcaccgcggcgccgcctatttccaatacctcctcaaggtgaggagggacctgaagcttctgctcggcgccggcctcgctgaggttctcaacgccgtgttcccagttctcgcatgccgcaagccggccaacacgatcctcgtccccaacaagcagtctaagaagaaacctgttgcaaaccacagccatcaccagaggcttttgggtgtagcccgcttgttatcccagatgtctgaacctgttatgaaggcagcaattcagataacatttttacttgctagatcattcttcgttgatctttgcacggctgtgctttctttgcttgcacgagtaaatgttacttgatgttgtgtctatatacaataaggtcactgatcttactgaaaggaagcaggctgttaagattagcatcagtggagtgcaggctttcagagagtactacccctctatgaatgatgcatgtacagttctggagtgtgtatggataaaagataaattcgttttgcatgaaaaggttaaagatatctctcaggaaacccaagttgagaatcagaagtgctgcggtcctgaatctacagtccagtatgaaacaattgcactgattagtgaagattctacatagcggaagtcctcctggcactggagtacttgcacacgctcggtatcatataccgcgatctcaagcctgaaaatgtccttgtccgggaggacgggcacatcatgctctcggacttcgacctctctcttcgttgtgctgtcagtccaacactgatcaggtcctcaaaccctgacgcagaactgcagaagcgctcaggaagagcagccaaggctactgtgttgagccagcctgtgttgagccgtcctgcatcactcaaccgtcgtgtgcagccccaaccacctgcttcggcccacgcctgttctcctccaagtccaagaccaagagagaccggtaaccaaaaccagaagttgccaccccgatcagcccttggcctgagctcatagcggagcccagcgatgcacggtcgatgtcgtttgtgtgctatattgtttttccgttggtagatttttttgaggggtacttttacactttcttaaagttcacatctgtaattcagcaagtcctgattgtactgatctcctgcaatgcctttgcaaaacattgtcattttttttgtattccatcagttccaaattggaagtcgttttagtttgttccaagtcaaaacatgtcttactttaaccaactttgtaaaaaaaaatccaaattggaagtcgttttagtttgttccaagtcaaaacatgtggtcatgcatctaaccatcatggttttagtcttcgagttaaatttgggtacctattttaacgaaaaacggcatagtttttttttgtaatatcaactaaatgtactaacaacaaatatatttcatagtgtaccaagtaaatcttgttttttgtttcagacacttgtgtgtt

SEQ ID NO: 51326 - DNA, 1393 bp, Zea Mays
ggcacctcccgtttcctgccctcttcttgttcttcttcttttttccctaccctccgccgttgctctgcaaggcacgtcctgcacgcgccagagctaggcgataaactggaaaggagcgcgcagcgcaggcttcgggctcctgtctccgccgcggcgtcctctcgctttttttttttttgcttcttgggaagcacaaaggctcaggtctttcaggacttgcaggctctgcgcagcgcgatctgattgtgaatgaaacctgcaaaggaatagtccatcacaatgctaaggttgcttcccgactgaccacattgcgcttgttttagcctctggttatctcgtctggaaaaaaaaacccagacatctgaccgggtcagacgatacaacccatatacgtacgtcgagtcctcagagttcaattctacctggaccatcgcacccatcttggcccagagtacttccgcgccgcgctacgaacgaggccatccgccgccacacgccgtcggccatgccgcagaggtcggaggcgggcactgctggggagggcgacgaggagcagcggctgcgggctgctctgcgtcacctgcaggcggaggcgggggtgctggagcgcctggtatacaagcaccggaaccagcaccgcggcgccgcctatttccaatacctcctcaaggtgaggagggacctgaagcttctgctcggcgccggcctcgctgaggttctcaacgccgtgttcccagttctcgcatgccgcaagccggccaacacgatcctcgtccccaacaagcagtctaagaagaaacctgttgcaaaccacagccatcaccagaggcttttgggtgtagcccgcttgttatcccagatgtctgaacctgttatgaaggcagcaattcagataacatttttacttgctagatcattcttcgttgatctttgcacggctgtgctttctttgcttgcacgagtaagggtcctgatccaacagatgttacttgatgttgtgtctatatacaataaggtcactgatcttactgaaaggaagcaggctgttaagattagcatcagtggagtgcaggctttcagagagtactacccctctatgaatgatgcatgtacagttctggagtgtgtatggataaaagataaattcgttttgcatgaaaaggttaaagatatctctcaggaaacccaagttgagaatcagaagtgctgcggtcctgaatctacagtccagtatgaaacaattgcactgattagtgaagctggtgcgacattagtgtatccaacaccaaaaccttagaggagtaggagaactgaacttctaacagggttgaaattcatctcttgggcaaccaaagacatttaagcactgctgcccctgataatgtgacatgag

SEQ ID NO: 51327 - DNA, 1207 bp, Zea Mays
ttttaatctataagcatggctaatattatatcaatctaattcggtttgaaattgctgacatgcgctctcctaacagatgttacttgatgttgtgtctatatacaataaggtcactgatcttactgaaaggaagcaggctgttaagattagcatcagtggagtgcagagagtactacccctctatgaatgatgcatgtacagttctggagtgtgtatggataaaagataaattcgttttgcatgaaaaggttaaagatatctctcaggaaacccaagttgagaatcagaagtgctgcggtcctgaatctacagtccagtatgaaacaattgcactgattagtgaagattctacatagcggaagtcctcctggcactggagtacttgcacacgctcggtatcatataccgcgatctcaagcctgaaaatgtccttgtccgggaggacgggcacatcatgctctcggacttcgacctctctcttcgttgtgctgtcagtccaacactgatcaggtcctcaaaccctgacgcagaactgcagaagcgctcaggaagagcagccaaggctactgtgttgagccagcctgtgttgagccgtcctgcatcactcaaccgtcgtgtgcagccccaaccacctgcttcggcccacgcctgttctcctccaagtccaagaccaagagagaccggtaaccaaaaccagaagttgccaccccgatcagcccttggcctgagctcatagcggagcccagcgatgcacggtcgatgtcgtttgtgtgctatattgtttttccgttggtagatttttttgaggggtacttttacactttcttaaagttcacatctgtaattcagcaagtcctgattgtactgatctcctgcaatgcctttgcaaaacattgtcattttttttgtattccatcagttccaaattggaagtcgttttagtttgttccaagtcaaaacatgtcttactttaaccaactttgtaaaaaaaaatccaaattggaagtcgttttagtttgttccaagtcaaaacatgtggtcatgcatctaaccatcatggttttagtcttcgagttaaatttgggtacctattttaacgaaaaacggcatagtttttttttgtaatatcaactaaatgtactaacaacaaatatatttcatagtgtaccaagtaaatcttgttttttgtttcagacacttgtgtgtt

SEQ ID NO: 51328 - DNA, 1457 bp, Zea Mays
cggtgtgtgatgcagaggcgatgccgagcgggtggagctctagccacgcccacgctcccgcctccccggcaaacacactcacgcccgccgaggccacatcctagcacgttgtagacgccgccaccgccaccgcctgacgccatgcaggagttccagtccatccctggcctggccgggcggctgttcggcggggccgcggcacccggcgacctccggcgcgcgcaggcggcgcagcatggccccggcggggcgcgatgcggcggtgcctcgcccgcggcgcccgaggcggtgaagtgcccgcggtgcgagtctaccaacaccaagttctgctactacaacaactacaacctgtcgcagccgcgccacttctgcaagagctgccgccggtactggaccaagggcggcgtcctgcgcaacgtccccgtgggcggcggctgccgcaaggcgaagcgcgcctcgccgtcggcgtcggcgtcggcgtcctcgcccgcctcgtcgtcggcgccgtccacgcccgcgtcggccgacgcggccaagaacccgcgccgcgcctcggcctcgccccgctccaacagcggcagcgcgagccccacggccgccgccgcgacgaccccgaccccgaccgatccgagcacctccgcggcgccgtcgtcgtcggtctccgaggacatcatggcgccgttcgcatccctggacgccgctgggatattcgagctcggcgacgccgcgtcagccgcggcgtactggagcgccgggagctgctgggcggacgtccaggacccgagcttgtacctaccctagcgtacgtgcttgtttagttacctatcgcgatcgctagattaaagccgcggttagatcttaacgacgggcgacggccacgagctccgtctctctagctattactccatgtcctccctgcctctctctctctctcttgtttattggtgatttggcttcacaggctgcgtgtctagaaagctaacatctgtgtttcgtgtctgcatgcaccctgcgagtgtggcggatcattgcgctgctgcgatagaattaatcgcattattattgcttgtttactcttcgtaatagtaacttgtatgaatacatgcatgtttggggggaagcaacgtaaccacgagtgtccgtgtgttatgttgtgatgcacggtcaaagccgatggtcaggtctatcgccaacgccaggggatgatggaacaatggtgcgtgtcattttggttagcggttggtttgttaatttcggctggtggcccgcccgtacatgcctctcgctctccggggggtttgtgctgatggcgacgccagttgctagctggctcttacgtacattgcttctctgtacgcctgttcgttggcccagcatggcctcctcctgcctcctgacataacacacttccgtgcctgctcacgcgagcttggtctgccccccccccccacccccct

SEQ ID NO: 51329 - DNA, 1732 bp, Zea Mays
ggacagtcgatttagtatagttatagatgaacctttggcacctgtgtaacatataatctaaagcaaactagttaggccaattgtttgtgttgggcgattcaaccaccaaaattaattagggactaggtgtaagcctaattccctttcaggccaccgctgcgttctgcttcgttcgcctaactggcggcatgtcggcgcactggcacggtcgccagatatcaagatcggttccaggcgctcctacctcgtgccgggacactcgaggagtcgcagggggtccaactcttcatcggaggccttcagccaccgctcgacatcggcgtccgcatccaaaacccgcagtccttggcagccaccatgagcctggccaggcaattccagccgcgtgagcagtacgccgccccgatatcccgggcccgccacggcctctgtcgacgccgccaggtccccgagcagcagcacccgcgatgatctccgtcgagggctgccagatcaagcgactcacccaggcggagcaagaggagcggcgccgcaaaggcctctgctacaactgcgacgagaagtacacccggggccacaaccgtgtctgccagcggctgttcctcctggagggcatcgaggaagatgatgttgacgacatcaccaaggagcctgcggctgaggggcaaaacctcgccggagaagacaggtcgtgactacgaactgcgtagtcaaggccctgctgtccggggatactcagcccatgacacatgcattattagattcggaaaacaccattgtactattgcaacaaagaactgcaaatgtgaacactgaacaacttgccatgtaagggtcattctttaagttctgaagttgttgcaactagaagcacaaggacatatacatgagtatcaaattcaacctggaactagacttgctacgacattccacattaggcagttggggaattccaatgaagcgttaatgaaatatcattcttgatcagctatcctcgtgagcatgtcaatacatacaaagtgagtgatttgacatactgcggacaaatccaacactgagattatggataaactcacaccaataagggaggataatttgaaaagggtttcaaacatgaatgagttgatataggaaatctcctgtgtatgagcatgcctgaacagaaaatgcactacacgagaatatagtttcacgcatgtttatagtgcattgttttgaacaactttaatgcacaagaaaaaaatcaaattaagactttgacccccatactatacattagactaacgaaatgcacatagttttgaacattatggtctccaattctccattgaagctaatttaagcattgttaaaaggatgtattaacggtgctactttaagtaatgcaattcgactaaaacgttatgcagactttttttggtatgattagtcatagaatatgtaaaacatgttcaaataagcatgtactttgcaggataagaaagagcaatatgatctgcttggaattgacatctagtcattcatgactcacatcatgataagatgtaaatgatgagtaaacaattctaagttctcaacccatggtgtacggataggactacaggggttcaaaaaggaggatacctccatagacggtccacaacttctccttgtccaatatgtttatgcagcaaaacaggcacatcgtcggggacaacataaccatacctataattccaattgtattgagccc

SEQ ID NO: 51330 - DNA, 2600 bp, Zea Mays
agcgtcgtagccgacggacaaaggggaaagaatcgaacatgtgctgctgggccagatggcagtgggccggaggggagtgtttggttctttgaactcttctttcttcttctcttaacaaagcgagacagtttttatttaactctgtctgaccggagcagggcaaaccgccaaccgggaacacagtacaatggtgggggcctgaccacccagtcacccacccacggacccacccgactcttccccagtgattctcttctacgcttactaggctatacttgacttcgtgtgtttccattccacagaggaagggatggccgggagcagcgtccgcggcggcagcaactgcccaccgctgttcgtgacggagaaaccaacgcggatggcgaggtacgcttaccggctgttcgcgagcacggtcctcgcgggggttcttctggtatggctgtacagagcaacgcacgtgccaccgatgagcagcggcgcccggtggtgggcgtggcttgggctctccgcggcggagctctggttcggcttctactgggtgctgacgctgtccgtgcggtggagccccgtcttccgccgcgccttcccggaccagctcttgcgaaggtacaaggaagagcagcttcctggggtggacatatttgtgtgtacagcagaccccactgttgagccgccaatgcttgtcatctccactgtcctatctgttatggcttatgactacccgaaggagaagttgaacatatatttgtctgatgatgctggttccatcataacattgtatgctctatatgaagcatcagagtttgcaaagcactggcttccattttgcaataagtaccaagtggagcccaggtcaccagctgcctactttggtacagaagctagccctccagatgcatgtgaccgtaaagagtggttttctttgaaggagatgcacaaagatttggcagctcgagtgaattcagttgttaattcagggaagatccctgaagtttcaaaatgcaagcttatgggcttctccaggtggagcgagaatgcaagttttagagatcacccttcaatagttcagattttaattgatggaaacaaaaggaaagcaactgatgttgatggaaaagtgttgcccacactggtttatatggctcgtgagaagagacctcaagaacatcatcacttcaaagctggatcactgaatgctttgataagggtatcatcagtgataagcaacagcccagtcattatgaatgtggactgtgatatgtactccaacaattcagggtctatcagagatgcattgtgcttcttccaagacgaacagctaggtcaagatattgcttttgttcagtatcctcagaactttgaaaatgtggtgcaaaatgacatctatggcaatcccatcaacaccgtcaatgagttggaccatccttgcttggatggatggggtggaatgtgttactatggcacaggatgcttccatcggagagaggctctatgtgggcgaatatacagtccagactacaaggaagattggactagggtggcgaggaaaactgaagatgtcattgacttggaaggaatggctgagtcacttgtgacttgcacatatgagcacaacaccctttggggagtcgagaagggagttatatatggttgcccactggaggatgtcattacaggattgcagatccagtgccgtgggtggagatcagtttaccacaacccgccaagaaaggggtttttaggcatggcccctacctcactaggacagattctggttcagcacaagagatggacagaagggttcctccagatctccctctcaaagtacagcccgtttctgctaggtcacaggaagatcagcctgggccttcaaatgggttactccgtatgtgggttttgggctgctaacagcttccccaccctttactatgtcactatcccttcactttgcttcctcaatggcatctcattgttccctgagcttggtggagtccctgcaatgtggcgacactgctgtcgagtggtggaacgcgcaaaggatgtggcttttcagaagaatcacctcatacctcttggcagccatcgacacaatccgcagaatgcttggcgtcaccgagtcggggttcaccctgacggcgaaggtgaccgatccgcgggccctagagaggtacaagaaggggatgatggagtttgggtccttctccgtgatgtttgcgatcattacaaccgttgcactgcttaacctggcgtgcatgatgctcggggtggcaaaggttctgttgcgtaaaggagcggtgagtctgggagctatgtttgtgcaggccgttctatgtgcgctgatagtagcgatcaattttccagtgtatgaagcaatgttcgtccgcaaggacagtggcagattaccagcttctgtcagtgtcgtttcgctctgcattgtattaccattctgtatacttccaaccaagttgtagatgtggagctggtgaaagatgatatatatatttgaaacccgatggtgaaagttataagaactgtactgatataatatatttccaagagaattaaaaaaatatataacatgttcatttacagatctg

SEQ ID NO: 51331 - DNA, 2624 bp, Zea Mays
caaaggggaaagaatcgaacatgtgctgctgggccagatggcagtgggccggaggggagtgtttggttctttgaactcttctttcttcttctcttaacaaagcgagacagtttttatttaactctgtctgaccggagcagggcaaaccgccaaccgggaacacagtacaatggtgggggcctgaccacccagtcacccacccacggacccacccgactcttccccagtgattctcttctacgcttactaggctatacttgacttcgtgtgtttccattccacagaggaagggatggccgggagcagcgtccgcggcggcagcaactgcccaccgctgttcgtgacggagaaaccaacgcggatggcgaggtacgcttaccggctgttcgcgagcacggtcctcgcgggggttcttctggtatggctgtacagagcaacgcacgtgccaccgatgagcagcggcgcccggtggtgggcgtggcttgggctctccgcggcggagctctggttcggcttctactgggtgctgacgctgtccgtgcggtggagccccgtcttccgccgcgccttcccggaccagctcttgcgaaggtacaaggaagagcagcttcctggggtggacatatttgtgtgtacagcagaccccactgttgagccgccaatgcttgtcatctccactgtcctatctgttatggcttatgactacccgaaggagaagttgaacatatatttgtctgatgatgctggttccatcataacattgtatgctctatatgaagcatcagagtttgcaaagcactggcttccattttgcaataagtaccaagtggagcccaggtcaccagctgcctactttggtacagaagctagccctccagatgcatgtgaccgtaaagagtggttttctttgaaggagatgcacaaagatttggcagctcgagtgaattcagttgttaattcagggaagatccctgaagtttcaaaatgcaagcttatgggcttctccaggtggagcgagaatgcaagttttagagatcacccttcaatagttcagattttaattgatggaaacaaaaggaaagcaactgatgttgatggaaaagtgttgcccacactggtttatatggctcgtgagaagagacctcaagaacatcatcacttcaaagctggatcactgaatgctttgataagggtatcatcagtgataagcaacagcccagtcattatgaatgtggactgtgatatgtactccaacaattcagggtctatcagagatgcattgtgcttcttccaagacgaacagctagttggaccatccttgcttggatggatggggtggaatgtgttactatggcacaggatgcttccatcggagagaggctctatgtgggcgaatatacagtccagactacaaggaagattggactagggtggcgaggaaaactgaagatgtcattgacttggaaggaatggctgagtcacttgtgacttgcacatatgagcacaacaccctttggggagtcgaggtagatctctatacagaaaattctgaaaatgctggtactgtgatagaagtcacactttgttacttcaagatcacagaaatttatcactttatgtatggaccatatcttattgagtttgagttgctgaattacagaagggagttatatatggttgcccactggaggatgtcattacaggattgcagatccagtgccgtgggtggagatcagtttaccacaacccgccaagaaaggggtttttaggcatggcccctacctcactaggacagattctggttcagcacaagagatggacagaagggttcctccagatctccctctcaaagtacagcccgtttctgctaggtcacaggaagatcagcctgggccttcaaatgggttactccgtatgtgggttttgggctgctaacagcttccccaccctttactatgtcactatcccttcactttgcttcctcaatggcatctcattgttccctgagcttggtggagtccctgcaatgtggcgacactgctgtcgagtggtggaacgcgcaaaggatgtggcttttcagaagaatcacctcatacctcttggcagccatcgacacaatccgcagaatgcttggcgtcaccgagtcggggttcaccctgacggcgaaggtgaccgatccgcgggccctagagaggtacaagaaggggatgatggagtttgggtccttctccgtgatgtttgcgatcattacaaccgttgcactgcttaacctggcgtgcatgatgctcggggtggcaaaggttctgttgcgtaaaggagcggtgagtctgggagctatgtttgtgcaggccgttctatgtgcgctgatagtagcgatcaattttccagtgtatgaagcaatgttcgtccgcaaggacagtggcagattaccagcttctgtcagtgtcgtttcgctctgcattgtattaccattctgtatacttccaaccaagttgtagatgtggagctggtgaaagatgatatatatatttgaaacccgatggtgaaagttataagaactgtactgatataatatatttccaagagaattaaaaaaatatataacatgttcatttacagatctg

SEQ ID NO: 51332 - DNA, 2382 bp, Zea Mays
aatcgaacatgtgctgctgggccagatggcagtgggccggaggggagtgtttggttctttgaactcttctttcttcttctcttaacaaagcgagacagtttttatttaactctgtctgaccggagcagggcaaaccgccaaccgggaacacagtacaatggtgggggcctgaccacccagtcacccacccacggacccacccgactcttccccagtgattctcttctacgcttactaggctatacttgacttcgtgtgtttccattccacagaggaagggatggccgggagcagcgtccgcggcggcagcaactgcccaccgctgttcgtgacggagaaaccaacgcggatggcgaggtacgcttaccggctgttcgcgagcacggtcctcgcgggggttcttctggtatggctgtacagagcaacgcacgtgccaccgatgagcagcggcgcccggtggtgggcgtggcttgggctctccgcggcggagctctggttcggcttctactgggtgctgacgctgtccgtgcggtggagccccgtcttccgccgcgccttcccggaccagctcttgcgaaggagatgcacaaagatttggcagctcgagtgaattcagttgttaattcagggaagatccctgaagtttcaaaatgcaagcttatgggcttctccaggtggagcgagaatgcaagttttagagatcacccttcaatagttcagattttaattgatggaaacaaaaggaaagcaactgatgttgatggaaaagtgttgcccacactggtttatatggctcgtgagaagagacctcaagaacatcatcacttcaaagctggatcactgaatgctttgataagggtatcatcagtgataagcaacagcccagtcattatgaatgtggactgtgatatgtactccaacaattcagggtctatcagagatgcattgtgcttcttccaagacgaacagctaggtcaagatattgcttttgttcagtatcctcagaactttgaaaatgtggtgcaaaatgacatctatggcaatcccatcaacaccgtcaatgagttggaccatccttgcttggatggatggggtggaatgtgttactatggcacaggatgcttccatcggagagaggctctatgtgggcgaatatacagtccagactacaaggaagattggactagggtggcgaggaaaactgaagatgtcattgacttggaaggaatggctgagtcacttgtgacttgcacatatgagcacaacaccctttggggagtcgaggtagatctctatacagaaaattctgaaaatgctggtactgtgatagaagtcacactttgttacttcaagatcacagaaatttatcactttatgtatggaccatatcttattgagtttgagttgctgaattacagaagggagttatatatggttgcccactggaggatgtcattacaggattgcagatccagtgccgtgggtggagatcagtttaccacaacccgccaagaaaggggtttttaggcatggcccctacctcactaggacagattctggttcagcacaagagatggacagaagggttcctccagatctccctctcaaagtacagcccgtttctgctaggtcacaggaagatcagcctgggccttcaaatgggttactccgtatgtgggttttgggctgctaacagcttccccaccctttactatgtcactatcccttcactttgcttcctcaatggcatctcattgttccctgagcttggtggagtccctgcaatgtggcgacactgctgtcgagtggtggaacgcgcaaaggatgtggcttttcagaagaatcacctcatacctcttggcagccatcgacacaatccgcagaatgcttggcgtcaccgagtcggggttcaccctgacggcgaaggtgaccgatccgcgggccctagagaggtacaagaaggggatgatggagtttgggtccttctccgtgatgtttgcgatcattacaaccgttgcactgcttaacctggcgtgcatgatgctcggggtggcaaaggttctgttgcgtaaaggagcggtgagtctgggagctatgtttgtgcaggccgttctatgtgcgctgatagtagcgatcaattttccagtgtatgaagcaatgttcgtccgcaaggacagtggcagattaccagcttctgtcagtgtcgtttcgctctgcattgtattaccattctgtatacttccaaccaagttgtagatgtggagctggtgaaagatgatatatatatttgaaacccgatggtgaaagttataagaactgtactgatataatatatttccaagagaattaaaaaaatatataacatgttcatttacagatctg

SEQ ID NO: 51333 - DNA, 2457 bp, Zea Mays
gaactcttctttcttcttctcttaacaaagcgagacagtttttatttaactctgtctgaccggagcagggcaaaccgccaaccgggaacacagtacaatgaggaagggatggccgggagcagcgtccgcggcggcagcaactgcccaccgctgttcgtgacggagaaaccaacgcggatggcgaggtacgcttaccggctgttcgcgagcacggtcctcgcgggggttcttctggtatggctgtacagagcaacgcacgtgccaccgatgagcagcggcgcccggtggtgggcgtggcttgggctctccgcggcggagctctggttcggcttctactgggtgctgacgctgtccgtgcggtggagccccgtcttccgccgcgccttcccggaccagctcttgcgaaggtacaaggaagagcagcttcctggggtggacatatttgtgtgtacagcagaccccactgttgagccgccaatgcttgtcatctccactgtcctatctgttatggcttatgactacccgaaggagaagttgaacatatatttgtctgatgatgctggttccatcataacattgtatgctctatatgaagcatcagagtttgcaaagcactggcttccattttgcaataagtaccaagtggagcccaggtcaccagctgcctactttggtacagaagctagccctccagatgcatgtgaccgtaaagagtggttttctttgaaggagatgcacaaagatttggcagctcgagtgaattcagttgttaattcagggaagatccctgaagtttcaaaatgcaagcttatgggcttctccaggtggagcgagaatgcaagttttagagatcacccttcaatagttcagattttaattgatggaaacaaaaggaaagcaactgatgttgatggaaaagtgttgcccacactggtttatatggctcgtgagaagagacctcaagaacatcatcacttcaaagctggatcactgaatgctttgataagggtatcatcagtgataagcaacagcccagtcattatgaatgtggactgtgatatgtactccaacaattcagggtctatcagagatgcattgtgcttcttccaagacgaacagctaggtcaagatattgcttttgttcagtatcctcagaactttgaaaatgtggtgcaaaatgacatctatggcaatcccatcaacaccgtcaatgagttggaccatccttgcttggatggatggggtggaatgtgttactatggcacaggatgcttccatcggagagaggctctatgtgggcgaatatacagtccagactacaaggaagattggactagggtggcgaggaaaactgaagatgtcattgacttggaaggaatggctgagtcacttgtgacttgcacatatgagcacaacaccctttggggagtcgagaagggagttatatatggttgcccactggaggatgtcattacaggattgcagatccagtgccgtgggtggagatcagtttaccacaacccgccaagaaaggggtttttaggcatggcccctacctcactaggacagattctggttcagcacaagagatggacagaagggttcctccagatctccctctcaaagtacagcccgtttctgctaggtcacaggaagatcagcctgggccttcaaatgggttactccgtatgtgggttttgggctgctaacagcttccccaccctttactatgtcactatcccttcactttgcttcctcaatggcatctcattgttccctgagataaccagtccctggtttgtaccgtttgcatacgttgctgtggctgcatactcctgcagcttggtggagtccctgcaatgtggcgacactgctgtcgagtggtggaacgcgcaaaggatgtggcttttcagaagaatcacctcatacctcttggcagccatcgacacaatccgcagaatgcttggcgtcaccgagtcggggttcaccctgacggcgaaggtgaccgatccgcgggccctagagaggtacaagaaggggatgatggagtttgggtccttctccgtgatgtttgcgatcattacaaccgttgcactgcttaacctggcgtgcatgatgctcggggtggcaaaggttctgttgcgtaaaggagcggtgagtctgggagctatgtttgtgcaggccgttctatgtgcgctgatagtagcgatcaattttccagtgtatgaagcaatgttcgtccgcaaggacagtggcagattaccagcttctgtcagtgtcgtttcgctctgcattgtattaccattctgtatacttccaaccaagttgtagatgtggagctggtgaaagatgatatatatatttgaaacccgatggtgaaagttataagaactgtactgatataatatatttccaagagaattaaaaaaatatataacatgttcatttacagatctg

SEQ ID NO: 51334 - DNA, 1738 bp, Zea Mays
cgaaaataggatccgtaagattcataatcactgcgagaacacgggtttccagtgaaccgcccaaaggttatttcggtcaagtcgcttctctcagtggaaacccaaaaaccctcttcgaagttcgatcccagggccgctccggcggcggcggcgcgttgagatggctgacactgacagcgcggagaccgagaaagagaagatggtagcggatgatgggggcaagcccgcagagctctcgaagagcgcgaggaagaagctgcagaagcaggagcggcaggcggaacgtaaagcggcccgaaaagcggcggagaaggagcgacggcgcgccgacatagagcggcggaggcgtgagtgggaggacgctcttgccgccgcgccgtcggatgaggcccgggccgagatggtggcggcgcggcgggagacgcggcgcgagcgggtgggccggcgggcggaggagcgcggggcgcgagctgaccggctcaggcgcgcggctgagggcgcgggccagaaggtggtgctggacctcgagtttgcggaccttatgaggcccaacgagattcatagcctcacgcagcagattatgtactgctatgcagtgaatgggagatctgcaaacccagctcacctgtggctgacaggttgcagtggtgaaatggcgacccatcttcagagaattcctggcagatgctgagacagtgcttgatgatctagacatgtcgaaaatatacatcatcggcggcctggtggatcgaaacagatggaaaggcataacactgaagaagtcagctgagcagggaattcaatctgcaaagcttcctattggaaactacctaaaaatgtcaagttctcaggttcttacagttaaccaagtgtttgagataatgttgaagtttgtggaaacaagggactggaagacggcattcttccatgtgattccacaaaggaagcgaggagaagctgagaccagagatgacgtggaaaaaggaggcctggatgacaacgatggcgccgccgaaggggctgcagatggagaccattccgaggaagacctgaacaagggcttcggtgaggaggaggacgatgatggggacgaagagctggaagaggaagaagcagatgtctccaacaagaggcagtgtgttagagttgaaaacggggaagctggggatgccaccgtagcagaggtggaaccaaacaacggcggcggcggcgggggcggggaccgctgaacagtgaacagcaccaccacgtttgtcgctaactcgctattttcacaacagcatcggtattggatttttgagcgttgtctctggcatttttcatgtattttagggctagtttggcaaattcatttttccaagtgattccgattttcctaaggtaaaatgaactaatttccttggaaaaatgaaaaaaaaaatcactagtaaaaatgggattgccaaactgtcctttattagacaatttctgccgtactctactcggaactgaataactgaccagcttagttaaagttaaagcaggccaatgaatcgagcaatggtgacaggaactgatgaacagcgaagctcacgtttgtttctctttcgtatatgacagcattagtttttgttttccttttttcagcgttttctctggtatttatgtattttaaacaatttatgttgtgtatttggaactggcgatcttgttgctgtcattttactatagtgcgtccattggctcgcaacctggtgac

SEQ ID NO: 51335 - DNA, 1667 bp, Zea Mays
cgggtttccagtgaaccgcccaaaggttatttcggtcaagtcgcttctctcagtggaaacccaaaaaccctcttcgaagttcgatcccagggccgctccggcggcggcggcgcgttgagatggctgacactgacagcgcggagaccgagaaagagaagatggtagcggatgatgggggcaagcccgcagagctctcgaagagcgcgaggaagaagctgcagaagcaggagcggcaggcggaacgtaaagcggcccgaaaagcggcggagaaggagcgacggcgcgccgacatagagcggcggaggcgtgagtgggaggacgctcttgccgccgcgccgtcggatgaggcccgggccgagatggtggcggcgcggcgggagacgcggcgcgagcgggtgggccggcgggcggaggagcgcggggcgcgagctgaccggctcaggcgcgcggctgagggcgcgggccagaaggtggtgctggacctcgagtttgcggaccttatgaggcccaacgagattcatagcctcacgcagcagattatgtactgctatgcagtgaatgggagatctgcaaacccagctcacctgtggctgacaggttgcagtggtgaaatggcgacccatcttcagagaattcctggacatgtcgaaaatatacatcatcggcggcctggtggatcgaaacagatggaaaggcataacactgaagaagtcagctgagcagggaattcaatctgcaaagcttcctattggaaactacctaaaaatgtcaagttctcaggttcttacagttaaccaagtgtttgagataatgttgaagtttgtggaaacaagggactggaagacggcattcttccatgtgattccacaaaggaagcgaggagaagctgagaccagagatgacgtggaaaaaggaggcctggatgacaacgatggcgccgccgaaggggctgcagatggagaccattccgaggaagacctgaacaagggcttcggtgaggaggaggacgatgatggggacgaagagctggaagaggaagaagcagatgtctccaacaagaggcagtgtgttagagttgaaaacggggaagctggggatgccaccgtagcagaggtggaaccaaacaacggcggcggcggcgggggcggggaccgctgaacagtgaacagcaccaccacgtttgtcgctaactcgctattttcacaacagcatcggtattggatttttgagcgttgtctctggcatttttcatgtattttagggctagtttggcaaattcatttttccaagtgattccgattttcctaaggtaaaatgaactaatttccttggaaaaatgaaaaaaaaaatcactagtaaaaatgggattgccaaactgtcctttattagacaatttctgccgtactctactcggaactgaataactgaccagcttagttaaagttaaagcaggccaatgaatcgagcaatggtgacaggaactgatgaacagcgaagctcacgtttgtttctctttcgtatatgacagcattagtttttgttttccttttttcagcgttttctctggtatttatgtattttaaacaatttatgttgtgtatttggaactggcgatcttgttgctgtcattttactatagtgcgtccattggctcgcaacctggtgac

SEQ ID NO: 51336 - DNA, 1764 bp, Zea Mays
cgggtttccagtgaaccgcccaaaggttatttcggtcaagtcgcttctctcagtggaaacccaaaaaccctcttcgaagttcgatcccagggccgctccggcggcggcggcgcgttgagatggctgacactgacagcgcggagaccgagaaagagaagatggtagcggatgatgggggcaagcccgcagagctctcgaagagcgcgaggaagaagctgcagaagcaggagcggcaggcggaacgtaaagcggcccgaaaagcggcggagaaggagcgacggcgcgccgacatagagcggcggaggcgtgagtgggaggacgctcttgccgccgcgccgtcggatgaggcccgggccgagatggtggcggcgcggcgggagacgcggcgcgagcgggtgggccggcgggcggaggagcgcggggcgcgagctgaccggctcaggcgcgcggctgagggcgcgggccagaaggtggtgctggacctcgagtttgcggaccttatgaggcccaacgagattcatagcctcacgcagcagtgaatgggagatctgcaaacccagctcacctgtggctgacaggttgcagtggtgaaatggcgacccatcttcagagaattcctgggtatgataagtggatcattgaaagggcggccaggccttatattgaagcatttgaagaccgtaaagaaaacctcgtgtatcttacagcagatgctgagacagtgcttgatgatctagacatgtcgaaaatatacatcatcggcggcctggtggatcgaaacagatggaaaggcataacactgaagaagtcagctgagcagggaattcaatctgcaaagcttcctattggaaactacctaaaaatgtcaagttctcaggttcttacagttaaccaagtgtttgagataatgttgaagtttgtggaaacaagggactggaagacggcattcttccatgtgattccacaaaggaagcgaggagaagctgagaccagagatgacgtggaaaaaggaggcctggatgacaacgatggcgccgccgaaggggctgcagatggagaccattccgaggaagacctgaacaagggcttcggtgaggaggaggacgatgatggggacgaagagctggaagaggaagaagcagatgtctccaacaagaggcagtgtgttagagttgaaaacggggaagctggggatgccaccgtagcagaggtggaaccaaacaacggcggcggcggcgggggcggggaccgctgaacagtgaacagcaccaccacgtttgtcgctaactcgctattttcacaacagcatcggtattggatttttgagcgttgtctctggcatttttcatgtattttagggctagtttggcaaattcatttttccaagtgattccgattttcctaaggtaaaatgaactaatttccttggaaaaatgaaaaaaaaaatcactagtaaaaatgggattgccaaactgtcctttattagacaatttctgccgtactctactcggaactgaataactgaccagcttagttaaagttaaagcaggccaatgaatcgagcaatggtgacaggaactgatgaacagcgaagctcacgtttgtttctctttcgtatatgacagcattagtttttgttttccttttttcagcgttttctctggtatttatgtattttaaacaatttatgttgtgtatttggaactggcgatcttgttgctgtcattttactatagtgcgtccattggctcgcaacctggtgac

SEQ ID NO: 51337 - DNA, 1694 bp, Zea Mays
cgggtttccagtgaaccgcccaaaggttatttcggtcaagtcgcttctctcagtggaaacccaaaaaccctcttcgaagttcgatcccagggccgctccggcggcggcggcgcgttgagatggctgacactgacagcgcggagaccgagaaagagaagatggtagcggatgatgggggcaagcccgcagagctctcgaagagcgcgaggaagaagctgcagaagcaggagcggcaggcggaacgtaaagcggcccgaaaagcggcggagaaggagcgacggcgcgccgacatagagcggcggaggcgtgagtgggaggacgctcttgccgccgcgccgtcggatgaggcccgggccgagatggtggcggcgcggcgggagacgcggcgcgagcgggtgggccggcgggcggaggagcgcggggcgcgagctgaccggctcaggcgcgcggctgagggcgcgggccagaaggtggtgctggacctcgagtttgcggaccttatgaggcccaacgagattcatagcctcacgcagcagattatgtactgctatgcagtgaatgggagatctgcaaacccagctcacctgtggctgacaggttgcagtggtgaaatggcgacccatcttcagagaattcctggatgctgagacagtgcttgatgatctagacatgtcgaaaatatacatcatcggcggcctggtggatcgaaacagatggaaaggcataacactgaagaagtcagctgagcagggaattcaatctgcaaagcttcctattggaaactacctaaaaatgtcaagttctcaggttcttacagttaaccaagtgtttgagataatgttgaagtttgtggaaacaagggactggaagacggcattcttccatgtgattccacaaaggaagcgaggagaagctgagaccagagatgacgtggaaaaaggaggcctggatgacaacgatggcgccgccgaaggggctgcagatggagaccattccgaggaagacctgaacaagggcttcggtgaggaggaggacgatgatggggacgaagagctggaagaggaagaagcagatgtctccaacaagaggcagtgtgttagagttgaaaacggggaagctggggatgccaccgtagcagaggtggaaccaaacaacggcggcggcggcgggggcggggaccgctgaacagtgaacagcaccaccacgtttgtcgctaactcgctattttcacaacagcatcggtattggatttttgagcgttgtctctggcatttttcatgtattttagggctagtttggcaaattcatttttccaagtgattccgattttcctaaggtaaaatgaactaatttccttggaaaaatgaaaaaaaaaatcactagtaaaaatgggattgccaaactgtcctttattagacaatttctgccgtactctactcggaactgaataactgaccagcttagttaaagttaaagcaggccaatgaatcgagcaatggtgacaggaactgatgaacagcgaagctcacgtttgtttctctttcgtatatgacagcattagtttttgttttccttttttcagcgttttctctggtatttatgtattttaaacaatttatgttgtgtatttggaactggcgatcttgttgctgtcattttactatagtgcgtccattggctcgcaacctggtgac

SEQ ID NO: 51338 - DNA, 2933 bp, Zea Mays
ccttgttgttgcggtcctatctaggagtaagtctctagcgtgtgaggctgtgtccctcggtcaccggttggtgagccatgttcctaagtagtcgtatatatgttgttggcttgggcagtaggaaggacaggtatgaactttactctgaatcaatacaatctgtccctgtttcctctcctgttctcgtctcctacctctgctccttctctactatctcctcattccattagcagtagctaacaattggtatcagagctccaccgatcctcggatcctcgttccatggcgtcttcttcatccatcggcatcaacttcatccaggtgctggaacatcagacgcgcgccctcttctcggagttggacaagcgtcttcaggctcgcgacgacaaatgggagttccgtgttgccgtcctggagtcccgcgcggcggattcggagcgccaactcgacaacgtctcctccgacctgcgaaccgacgtcgcggcccagatctcagtggtggaggcgctcgagtccattgtcgttgattcgacacagcacatggattcggtttcgtccagcattcgtgcagatccggaggtgcgccaagcggcggtggacgcgaccgcggaggatcggcgccaccacttcgaagccgccaccagctcacacatcacggaactcgaatcgaccacccaagtgttcgagctctggcatccccgcatcgactccgcgatcaaccatctccacccctccatggtcaaggttcgagcagcgatcgacaccagggacctacagtggtcgcctgatgcgcacggcggcggctctggcggccttctcggagagccgggtggtgaaccaactgaaatcagcggcgctgctcatgccggtggcctacctcgcccacatcaacacccccatcggcatcctgctatccaaagcgttcgtcggcgaggtgctcttggacttcctcgggatggccgagatcgacccgctagcaccactggtgacgaacctgatcagggcattctgccgctgcccgagcatgagctgctacgacctcgccggctccatcaccggcaagaactactgcctcaacagctccgtcgtcgacttcttcctcaagtacgagcccgagccgacctccacggtccactttgctcaaaccgtgcgcgacgtgctactggagcgcaacattgccagctacggccagggcgagccgccggtgtaccggatatctggcatcccaccgagctcagcttccccttcctggcgtcctatctcctgcagttggtgatccgtgaggaggagggtgaggttcccagcaccttgcccacccagtgtttgatgaattggttcagctgcagctgtgcctcagtgttgtatgacgtcaccaaactcattaagcccctaccaactctggcgatgggtgtttcaagcatacctccaccagctccattgggtattcagctagtgctcgatgctatgcctcgtgggccactacttggagatgtgcatgacaaagggccttggccaccacctattcagttcgggatgcatgccactcaacgcaggccaattccctggccatccttctctggtattataattcggaggcacttgttgcaatcactgcccttggtgccccactgctcagtaaacatgagaaagagcatgtttacccattgccaactcagtgtgatacattggaagcattgctttgagtttttagacaatgcactgtcggtagattgcttccagtcgggtgcgcctaaatgggatcaatcatctgacacccacaaggtatcttcagctgaagataaattggttgcgctgtgccgatttcgtcgagctcgaggtctctgggaaaaatgtgatgagaaatggagtcacgcctacaaatgcattgttgatgctcatcttcatgcattggaagaagtttgggagctcttggtgcctgatccaactaaaaccgaaggacagagtccagaagattcatctacagagcagctgtttatgttagtatctctggctgcttggggaggttcgcgtggctaatggagaattgttacattgccaacacaagatactgcagataccgtggcaaattcagactttcaatcacatacaggacacgatgatcccttcaaatttggactgttttgggtggtgcacatcggatgcattttacaaagctgctgaaccatgtgggattgaggaggaccttcaacgtcggcgtgaaggtggtgtgccaccaaggtttctgattatagatgatggttggcaagagatagttgactattatccagagacgttgcatcagatgtttgttgcgaatgcaggttccagtttcaagctaccagggaattctgtgaaagactttcttgactctaaaactgcttgaagatacatgttttgggaacaaagtttcagaacaagcttcttgaagtaatcgatgcaagatcctgcatgtgtttagattctgcgtcgacttgagggcaagtcgaattttaaggaggagggaatgttacaccgccattgtcagatactccatagaaggaagtccgtcctgagtgggtactaactgcagccttgttgttgcggtcctatctaggagtaagtctctagcgtgtgaggctgtgtccctcggtcaccggttggtgagccatgttcctaagtagtcgtatatatgttgttggcttgggcagtaggaaggacaggtatgaactttactctgaatcaatacaatctgtccctgtttcctctcctgttctcgtctcctacctctgctccttctctactatctcctcattccattagcagtagctaacaaagatcgaccaccgtcctcttgtgcaagagaatatgagaaccaccctaccaaagccaaggcgcggcgtggacgaaccagcgcctcttgttccggtcgacgttttgggcttccattcgagatg

SEQ ID NO: 51339 - DNA, 1028 bp, Zea Mays
agcgctaaaacaccccctcccgtcccgcaccgacgtcgacggagacgtgtcactggcggcgttgagaagacagaagacttcagaccttctagattttttcccggccgcaatggatctctgggagagggcccgggccttcgccggcgaggcggcgaattggtcgcaggagctctccgcggaggcgaccaagcgctcgtctgcgctggtctcggagacggcgaagaagtcgaaggagatcttttccgagaccgcctccaagtcgctggagatcgccgccgaggcaaccaagcaggccgacctcctggccggccagatcaagcacctcgcctccgacatccccgtaccctcgatcccacccatccccgcgatcccacctatcgccgccactgcctcgtcggagcccgacgcggccgagcttgagcgctacggcatcaccgacgacctccgcgagttcgtcaaggacatgaccataagcaccttccgcgacttcccactgcaagatgagcctgaaatgtctgatgtgccaacggtgtcgaatgtgcgtcaggatctgagcgaatggcaggccaggcacgccacacttgtcctctcggcagtcaaggaaatatcgaagttcagatatgagctatgcccaagatacatgaaagagcgcaaattctggcgggtatattttttgctagtaaacagctatatagccccgttcgagaagaaatccttggaggagctgaaagtgaaagcagaggaagagaaaagggattcccagaagcaagcatcccaggcatctacaactttcgaacccaaagacacaaaagcgccaatcaagacctcttcaacaaatccagaacatgatctggatgtatttcttctgggagatctgggtagcgacgatgagggacctgttgatgatgatgatgacctagatgaggacttcgataagattgatgtgaccacggatgtggagttgcagggtgatcctatagctatcaaaatgtagcatcgttgttttccatggaatctgtacgcgttat

SEQ ID NO: 51340 - DNA, 1415 bp, Zea Mays
agcgctaaaacaccccctcccgtcccgcaccgacgtcgacggagacgtgtcactggcggcgttgagaagacagaagacttcagaccttctagattttttcccggccgcaatggatctctgggagagggcccgggccttcgccggcgaggcggcgaattggtcgcaggagctctccgcggaggcgaccaagcgctcgtctgcgctggtctcggagacggcgaagaagtcgaaggagatcttttccgagaccgcctccaagtcgctggagatcgccgccgaggcaaccaagcaggccgacctcctggccggccagatcaagcacctcgcctccgacatccccgtaccctcgatcccacccatccccgcgatcccacctatcgccgccactgcctcgtcggagcccgacgcggccgagcttgagcgctacggcatcaccgacgacctccgcgagttcgtcaaggacatgaccataagcaccttccgcgacttcccactgcaagatgagcctgaaatgtctgatgtgccaacggtgtcgaatgtgcgtcaggatctgagcgaatggcaggccaggaaatatcgaagttcagatatgagctatgcccaagatacatgaaagagcgcaaattctggcgggtatattttttgctagtaaacagctatatagccccgttcgagaagaaatccttggaggagctgaaagtgaaagcagaggaagagaaaagggattcccagaagcaagcatcccaggcatctacaactttcgaacccaaagacacaaaagcgccaatcaagacctcttcaacaaatccagaacatgatctggatgtatttcttctgggagatctgggtagcgacgatgagggacctgttgatgatgatgatgacctagatgaggacttcgataagattgatgtgaccacggatgtggagttgcagggtgatcctatagctatcaaaatgtagcatcgttgttttccatggaatctgtacgcgttatttttcatgctacggtatggattggaaagtgatgacgatgacaaaaaaatagcaacagggaaagcagaagatgcgaagtagtagcctatggttttacgattcgacagatgaccacaatgatagcgaactttagtattccaagatggtattgtatattagttgatcgcatgtcatcaattcatttgttatcacccagaaaaggatgttaaacacttgttttttttacaactttcgatttttaactaaactcacacatcttatcgatgttgtgactcctcttttcttattaggagttttctgcatatgtactagtctatctattgaattgaacttcagtacgactactcgaggctacaatttacatgaaataccggtgtgtgaagaatagaagataatacatttaatatggtgcgtttttt

SEQ ID NO: 51341 - DNA, 2693 bp, Zea Mays
cacaaatgtgattctctatgtgctcattgcttctctattccactctctcaccaactcaactctgggccagcgtctcactccctacacggagaattcgctcgctgctcaacagatcctagcgataagcagcgggacgcgtttctcggtgcaaacagccccatcttgccagcgcttgatttaaacaattcccggtcaaaagttagcgaattccaccgagaaacaaacgaaatccgtccaaaaaaaacccccccgccgatttcaatttgaaactgtaaatcgttcgaaaacaacgaaattcgagcggttttcgctgtttttcggttgtcggtcgctgccgagaaacgataccaaggttaaccctgctccatacgcacgcacgcccactccccctgcttctgaggaccccgggatccgcccgctccccgccgccgacgcgccgcagcagccattttcacctgctcgtcacctttcctgttaccggcgcggcgcgagaggaagaggaaggctgcgtcgtttggtgccgtgtcggggtccgccaatccggagattcggctgcgaaaggaaggtgataaggcggagtgcccgagaattggcaataactgctggattgctgctggaggcgctcagttccgcgttcggttgcccgatttcgtgccgattcggagctctcattgggcgctcgagcgtgcgtttatatatagcgcattggtggtggcctctcgccgtccgtggcccgtgggccgtgggtgtgggtggagaacttgtcgccgtgctgatgatgcattgagtggcggcgaggcgataccccctccctgatgttccaggtggttgttttgcgtgcgttggtgaagatgcctcgcgggcaggctctttgatcgcgcggggcctcgctcgttggtgtgtaaggcggcaatggggatcaaggcggtggagaagctcaggtgcccctcgtcggtggccgccgcggcgcggtcaggcttgaagctgtggatgctgcgggccgtgacgacggtgttgctctggaccagcgtcgtgcagttcacggcggtagggaacacctggacctgggggcctcgcgtgctaaagggatggccgtcgtgccggacggcgcgggaggcggccgcggtcaccaccacgcggctttcaacgccggagcccgtcgtggagaaggctgcgctgccaccgaagagaatttatcaaaacaatggttatttgatggtctcatgtaatggtgggcttaaccaaatgcgagctgctatatgcgatatggttgccatcgcaagatctttgaatgtgactttaattgtgcctgagttggataagacgtcattttggaatgatccaagtgaatttcaagacatatttgacgttgaacattttataatctctctaagagatgaggttcgcatacttagagaattgccaccaagagtaaaacggagagtggagttaggaaagttctactcagtgcctcctgttagttggtcggatatctcctattaccataagaagattctacctgcaattcagaaatataagtgttaggaaggagagtgattagaatgcttcgccaaaatggccccttcttagttattcatttacgatatgagatggatatgcttgccttctctggctgtactcaaggctgcactcctaaagaaaccgaggagcttacaaggatgaggtatgcttacccatggtggaaagagaaagtaataaactcttttgtgaaaagaaaagatggtctttgccctttgacgccagaggaggttgctattgttcttagagcattggatatcgacaaaagtatgcaaatctacattgcagctggggagatatatggtggaaaacgcagaatggcttctcttaccttggcttaccctaacgtggtgagaaaggagacgcttctggaaccttctgatctcatgttctttcagaaccattcgtcgcaaatggctgcactggattacttagtatcactggaaagtgatatatttgttcccacatatgatggcaacatggctaaagttgtcgaaggacaccggaggtacctgggattcaagaaaacaatcatgttggatcgaaaacttatagttgagctggtagatcagtataccagtggttctttgcggtgggatgagtttgcttcattgatcaaggctgtccattcaaaccgtatgggatcagcagccaccagggcagcgatccctgacaggcctaaggaggaggactacttctatgccaaccctcaagaatgcttgcaaggtcccaatatgttgcaaacattgtgagcttgtcacttgtcagcgctcttgccattctttttgcaacttggcatggctgaacataggattatccatcatatcttctgaacctgccaaatggaataacatgcttttgttagcagttcagagcccaatgagaaggtctgtgaacgggttctgaaacaacaaaggtggatatatgacttgaatttaggtgataggcaatgcttgagtggagaggcaatttgtttgtggattaaaccagcaaaagctgtcaagcagagctgatgctcatgtacgagactgtagtatagatggtgcagtaagtccaaaagtgatctttgtagggaaatattgtttcaaaagaaaaacttttctacacgtgccaacatttggataagaaaatctgtcaactttccggttcagttg

SEQ ID NO: 51342 - DNA, 2467 bp, Zea Mays
gagaattcgctcgctgctcaacagatcctagcgataagcagcgggacgcgtttctcggtgcaaacagccccatcttgccagcgcttgatttaaacaattcccggtcaaaagttagcgaattccaccgagaaacaaacgaaatccgtccaaaaaaaacccccccgccgatttcaatttgaaactgtaaatcgttcgaaaacaacgaaattcgagcggttttcgctgtttttcggttgtcggtcgctgccgagaaacgataccaaggttaaccctgctccatacgcacgcacgcccactccccctgcttctgaggaccccgggatccgcccgctccccgccgccgacgcgccgcagcagccattttcacctgctcgtcacctttcctgttaccggcgcggcgcgagaggaagaggaaggctgcgtcgtttggtgccgtgtcggggtccgccaatccggagattcggctgcgaaaggaaggtgataaggcggagtgcccgagaattggcaataactgctggattgctgctggaggcgctcagttccgcgttcggttgcccgatttcgtgccgattcggagctctcattgggcgctcgagcgtgcgtttatatatagcgcattggtggtggcctctcgccgtccgtggcccgtgggccgtgggtgtgggtggagaacttgtcgccgtgctgatgatgcattgagtggcggcgaggcgataccccctccctgatgttccaggtggttgttttgcgtgcgttggtgaagatgcctcgcgggcaggctctttgatcgcgcggggcctcgctcgttggtgtgtaaggcggcaatggggatcaaggcggtggagaagctcaggtgcccctcgtcggtggccgccgcggcgcggtcaggcttgaagctgtggatgctgcgggccgtgacgacggtgttgctctggaccagcgtcgtgcagttcacggcggtagggaacacctggacctgggggcctcgcgtgctaaagggatggccgtcgtgccggacggcgcgggaggcggccgcggtcaccaccacgcggctttcaacgccggagcccgtcgtggagaaggctgcgctgccaccgaagagaatttatcaaaacaatggttatttgatggtctcatgtaatggtgggcttaaccaaatgcgagctgctatatgcgatatggttgccatcgcaagatctttgaatgtgactttaattgtgcctgagttggataagacgtcattttggaatgatccaagagactgcgttgccgggtcaattattctgcactgaaatttacgtcccaaattgaagtgttaggaaggagagtgattagaatgcttcgccaaaatggccccttcttagttattcatttacgatatgagatggatatgcttgccttctctggctgtactcaaggctgcactcctaaagaaaccgaggagcttacaaggatgaggtatgcttacccatggtggaaagagaaagtaataaactcttttgtgaaaagaaaagatggtctttgccctttgacgccagaggaggttgctattgttcttagagcattggatatcgacaaaagtatgcaaatctacattgcagctggggagatatatggtggaaaacgcagaatggcttctcttaccttggcttaccctaacgtggtgagaaaggagacgcttctggaaccttctgatctcatgttctttcagaaccattcgtcgcaaatggctgcactggattacttagtatcactggaaagtgatatatttgttcccacatatgatggcaacatggctaaagttgtcgaaggacaccggaggtacctgggattcaagaaaacaatcatgttggatcgaaaacttatagttgagctggtagatcagtataccagtggttctttgcggtgggatgagtttgcttcattgatcaaggctgtccattcaaaccgtatgggatcagcagccaccagggcagcgatccctgacaggcctaaggaggaggactacttctatgccaaccctcaagaatgcttgcaaggtcccaatatgttgcaaacattgtgagcttgtcacttgtcagcgctcttgccattctttttgcaacttggcatggctgaacataggattatccatcatatcttctgaacctgccaaatggaataacatgcttttgttagcagttcagagcccaatgagaaggtctgtgaacgggttctgaaacaacaaaggtggatatatgacttgaatttaggtgataggcaatgcttgagtggagaggcaatttgtttgtggattaaaccagcaaaagctgtcaagcagagctgatgctcatgtacgagactgtagtatagatggtgcagtaagtccaaaagtgatctttgtagggaaatattgtttcaaaagaaaaacttttctacacgtgccaacatttggataagaaaatctgtcaactttccggttcagttg

SEQ ID NO: 51343 - DNA, 2077 bp, Zea Mays
ggaaggggaaagccacacgaaggacccttcagccgccacgcgacgcgaccaagtggacgaaccgcaacaggcaagtcttcgcttcgctcctctctgcggctccctccggcgagcggcgatggccttctcacccccgctgatcgactgggaggcggagagctaccctgcctacccagatttcgcggccattccccttttcgtcgtcttcttcctcgtcgtccgtttcttcctcgaccgcttcgtattcgaggttgtagtttttcccgctcatttttacaacatttctcgtttgctgtacgtatcattatcaacgatgctcgagccagttattttatagagtacgaagagagggagtcgaggactcgaggtttcgacgaactatatggattgtgagcaggtgcttgcgtgctcatgattagcaagggtggaaatccaaaggatctgtcaatcaattcactatcatttcaggatttgctaagtactatttatgtcactcacaatctcacatgtaactcgtgagcttacatgctattgagacatggagtagcaaaacctgaattcctatttaacttaaccatcattcaagtatatgttgatctgagtgagtgtccttacggaggcgcctattaggcagaaaatttcggaggcacggtcacgctaggttgctaagacgatgcgccaattgtttattaaagtagctgcatctacgcaattccacacttggctgatttttatttcttcttgttctagtaaatctaaaggagatcacttgtgagctgtggctgtaccttgttgccttgttgggatttgggaatgaatgagagttatttggcatcttccagatgaactttaattttcttttttttcccagaagggaggcctatgcatgcattagacctcatccagcattttgttcatagtggttagccaggaagctgattttcaaggaggaggatgagaagaagcttggccctactacatatgcaggcaagagaaagatcaggaaatttaaagaatcagcttggaaatgcatgtattttctttctggggagctattggcattgtctgtgacgtacaacgagccatggttcacaaccacaagaaatttctgggttggaccaggcgatcagatctggccagatcaaaaaattaaattgaaactcaagacagtctatatgtatgttgctggcttttacacatactcgatatttgcccttttgttttgggaaataaggcgctcagacttcggtatttcaatgactcatcatgtagcaaccgtctgtctgatagcactgtcttacatattcagatttgctcgggtgggttcagttgtccttgccattcatgatgctactgatgtgttcctggagcttggaaaaatttccaagtatagtggccatgagttgtttgcagatgtttcatttcttgttttcgtcagttcttgggtactcctccgccttatatattatccgttctggattctctggagcacgagctatgaagttgttctgactctagacaaggaaaagcataaagttgacgggccaatatactactatgtattcaacagtcttctcttctctctacttgttctacacatatattggtgggttttaatgtatcggatgcttgtgaagcaaatacagtctagagggcacgttggcgatgatatacgatctgattctgaaggtgaagaggaacatgaggattgattgagctgtgtagagttggaagataataagtaacatggggatggattgagctgtataagttccaaaggcgaaaaggaatacgtggatggattgagctgtgtaaattctgaaggtgtatcaaatcattctgctgtttttcttctgtccttgttcttgataagtaacaataaattagtgcccttctctaggtgagcatcatcgatagatgtcacttgggcattatcattatctattgatgtaaaatcaggtcacattgcatagcacacacacaacagttaatggaaaatgttagcagtgcacatgtctgcctctaccttggccagttccccctttcaatactgggcttaaatcaatgctaacttatc

SEQ ID NO: 51344 - DNA, 1556 bp, Zea Mays
gggaaagccacacgaaggacccttcagccgccacgcgacgcgaccaagtggacgaaccgcaacaggcaagtcttcgcttcgctcctctctgcggctccctccggcgagcggcgatggccttctcacccccgctgatcgactgggaggcggagagctaccctgcctacccagatttcgcggccattccccttttcgtcgtcttcttcctcgtcgtccgtttcttcctcgaccgcttcgtattcgagaagggaggcctatgcatgcattagacctcatccagcattttgttcatagtggttagccaggaagctgattttcaaggaggaggatgagaagaagcttggccctactacatatgcaggcaagagaaagatcaggaaatttaaagaatcagcttggaaatgcatgtattttctttctggggagctattggcattgtctgtgacgtacaacgagccatggttcacaaccacaagaaatttctgggttggaccaggcgatcagatctggccagatcaaaaaattaagtatgttgaacgtcttctcgattttgagggggcaagatcttctttggccagatttttataattttatttgtaccaagttatagcaaatgttattttatttcccagattgaaactcaagacagtctatatgtatgttgctggcttttacacatactcgatatttgcccttttgttttgggaaataaggcgctcagacttcggtatttcaatgactcatcatgtagcaaccgtctgtctgatagcactgtcttacatattcagatttgctcgggtgggttcagttgtccttgccattcatgatgctactgatgtgttcctggagcttggaaaaatttccaagtatagtggccatgagttgtttgcagatgtttcatttcttgttttcgtcagttcttgggtactcctccgccttatatattatccgttctggattctctggagcacgagctatgaagttgttctgactctagacaaggaaaagcataaagttgacgggccaatatactactatgtattcaacagtcttctcttctctctacttgttctacacatatattggtgggttttaatgtatcggatgcttgtgaagcaaatacagtctagagggcacgttggcgatgatatacgatctgattctgaaggtgaagaggaacatgaggattgattgagctgtgtagagttggaagataataagtaacatggggatggattgagctgtataagttccaaaggcgaaaaggaatacgtggatggattgagctgtgtaaattctgaaggtgtatcaaatcattctgctgtttttcttctgtccttgttcttgataagtaacaataaattagtgcccttctctaggtgagcatcatcgatagatgtcacttgggcattatcattatctattgatgtaaaatcaggtcacattgcatagcacacacacaacagttaatggaaaatgttagcagtgcacatgtctgcctctaccttggccagttccccctttcaatactgggcttaaatcaatgctaacttatc

SEQ ID NO: 51345 - DNA, 1943 bp, Zea Mays
gggaaagccacacgaaggacccttcagccgccacgcgacgcgaccaagtggacgaaccgcaacaggcaagtcttcgcttcgctcctctctgcggctccctccggcgagcggcgatggccttctcacccccgctgatcgactgggaggcggagagctaccctgcctacccagatttcgcggccattccccttttcgtcgtcttcttcctcgtcgtccgtttcttcctcgaccgcttcgtattcgaggttgtagtttttcccgctcatttttacaacatttctcgtttgctgtacgtatcattatcaacgatgctcgagccagttattttatagagtacgaagagagggagtcgaggactcgaggtttcgacgaactatatggattgtgagcaggtgcttgcgtgctcatgattagcaagggtggaaatccaaaggatctgtcaatcaattcactatcatttcaggatttgctaagtactatttatgtcactcacaatctcacatgtaactcgtgagcttacatgctattgagacatggagtagcaaaacctgaattcctatttaacttaaccatcattcaagtatatgttgatctgagtgagtgtccttacggaggcgcctattaggcagaaaatttcggaggcacggtcacgctaggttgctaagacgatgcgccaattgtttattaaagtagctgcatctacgcaattccacacttggctgatttttatttcttcttgttctagtaaatctaaaggagatcacttgtgagctgtggctgtaccttgttgccttgttgggatttgggaatgaatgagagttatttggcatcttccagatgaactttaattttcttttttttcccagaagggaggcctatgcatgcattagacctcatccagcattttgttcatagtggttagccaggaagctgattttcaaggaggaggatgagaagaagcttggccctactacatatgcaggcaagagaaagatcaggaaatttaaagaatcagcttggaaatgcatgtattttctttctggggagctattggcattgtctgtgacgtacaacgagccatggttcacaaccacaagaaatttctgggttggaccaggcgatcagatctggccagatcaaaaaattaaattgaaactcaagacagtctatatgtatgttgctggcttttacacatactcgatatttgcccttttgttttgggaaataaggcgctcagacttcggtatttcaatgactcatcatgtagcaaccgtctgtctgatagcactgtcttacatattcagttcttgggtactcctccgccttatatattatccgttctggattctctggagcacgagctatgaagttgttctgactctagacaaggaaaagcataaagttgacgggccaatatactactatgtattcaacagtcttctcttctctctacttgttctacacatatattggtgggttttaatgtatcggatgcttgtgaagcaaatacagtctagagggcacgttggcgatgatatacgatctgattctgaaggtgaagaggaacatgaggattgattgagctgtgtagagttggaagataataagtaacatggggatggattgagctgtataagttccaaaggcgaaaaggaatacgtggatggattgagctgtgtaaattctgaaggtgtatcaaatcattctgctgtttttcttctgtccttgttcttgataagtaacaataaattagtgcccttctctaggtgagcatcatcgatagatgtcacttgggcattatcattatctattgatgtaaaatcaggtcacattgcatagcacacacacaacagttaatggaaaatgttagcagtgcacatgtctgcctctaccttggccagttccccctttcaatactgggcttaaatcaatgctaacttatc

SEQ ID NO: 51346 - DNA, 1243 bp, Zea Mays
gggaaagccacacgaaggacccttcagccgccacgcgacgcgaccaagtggacgaaccgcaacaggcaagtcttcgcttcgctcctctctgcggctccctccggcgagcggcgatggccttctcacccccgctgatcgactgggaggcggagagctaccctgcctacccagatttcgcggccattccccttttcgtcgtcttcttcctcgtcgtccgtttcttcctcgaccgcttcgtattcgagtggttagccaggaagctgattttcaaggaggaggatgagaagaagcttggccctactacatatgcaggcaagagaaagatcaggaaatttaaagaatcagcttggaaatgcatgtattttctttctggggagctattggcattgtctgtgacgtacaacgagccatggttcacaaccacaagaaatttctgggttggaccaggcgatcagatctggccagatcaaaaaattaaattgaaactcaagacagtctatatgtatgttgctggcttttacacatactcgatatttgcccttttgttttgggaaataaggcgctcagacttcggtatttcaatgactcatcatgtagcaaccgtctgtctgatagcactgtcttacatattcagatttgctcgggtgggttcagttgtccttgccattcatgatgctactgatgtgttcctggagcttggaaaaatttccaagtatagtggccatgagttgtttgcagatgtttcatttcttgttttcgtcagttcttgggtactcctccgccttatatattatccgttctggattctctggagcacgagactcactgttacccaccttcatgtagattctgaaggtgaagaggaacatgaggattgattgagctgtgtagagttggaagataataagtaacatggggatggattgagctgtataagttccaaaggcgaaaaggaatacgtggatggattgagctgtgtaaattctgaaggtgtatcaaatcattctgctgtttttcttctgtccttgttcttgataagtaacaataaattagtgcccttctctaggtgagcatcatcgatagatgtcacttgggcattatcattatctattgatgtaaaatcaggtcacattgcatagcacacacacaacagttaatggaaaatgttagcagtgcacatgtctgcctctaccttggccagttccccctttcaatactgggcttaaatcaatgctaacttatc

SEQ ID NO: 51347 - DNA, 1637 bp, Zea Mays
acgggccaaccccatccactcctttcctcccacccgccagccgtcacccgcacgtgcagccagcttccctgctacccccgcgcgccgccagccgagcggacgccggccctgccccgcacgccggcacgcggcacgcgcagccagctgccccacacgacgccggccgccctcgcactccccaccgcgctacccggcagccccgcgctacccgctcctcgctcggcgtccttgattcccaccgcacggcggcccttcttctgccaccgcacaccgcgcaggagcactgcccttcgccccttgtttagctgcagcaggagcgccgcccagccggccaccaccaccgcagcttgagagttgagacctgcagttgacgaccagaggccagagggcgttgctgcgctgcgttccgctctcccttttctgctgcgacgacggctggtcgagcgccgccacactttgcagcttccttggctcttcgcaggtgacgagcgcccaccagtcagacatgggacaaggtggacaagagaagtcgttcaatttccttcaagttttgctagagggcagcatagctggaggaactgctggtgttgtggtggaaacagcactttacccgattgatactataaaaaccaggcttcaggccgctcgaggtggaagccggattgaatggaaaggcttgtattctggattagctggaaatctcactggcgtccttccggcctctgcgatatttgtcggggtgtatgagccaactaaaagaaaattactggaaacccttcctgaaaatctgagtgcagttgcccattttactgcaggggccattggaggtattgctgcttccctcgtccgtgtccctacagaggtggtcaaacaaaggatgcaaactggtcaattcaagtctgcacctgatgctgttcgtctcattgttgctaaagaaggatttaaaggactgtacgctggttatggttcctttctacttcgagatctaccatttgatgccatccagttctgcatttatgagcaacttcgaattggctacaaacttgtggcgaaaagggagttgaatgatccagagaatgcacttatcggtgcttttgctggcgccatcactggagctataacaactccccttgatgtcatgaagacaagattgatggttcagggacaagggaaccaatacactggaattgtaagctgtgctcagacaatcctcagagaggaaggccctaaggcattcttgaagggcattgagccgcgagtgctgtggattggcatcggtgggtccatcttctttggcatgctggagaaaaccaagtcgatgctagccgagaggaggaaccgcgagcttcgggccgtcaaggacgaatgagtggagatcagctcttttttggcgttgagtccttaccctgaaacaaaatacacatttttacttgccggggacaacctcgccggcccgtacttgtactccacggcgttcacgttatcacgtacgtagaaattatgagcatgactgacggtttctacagattgaaaaccaaaacttattacatgcgctggaaacctgccactcactgtttacgttgggagttaataacactatgcaacatttaaatgctatggtaagcctctaaaaccgc

SEQ ID NO: 51348 - DNA, 1847 bp, Zea Mays
ctggggtttctctctctccacgttcgctccctctcttttgtgtcggggccgccgctgtgctggagccgccgcgagccgctgctggaggagccgccgccggcctccccaactcgccttaggtgccagaacgaccagaggccagagggcgttgctgcgctgcgttccgctctcccttttctgctgcgacgacggctggtcgagcgccgccacactttgcagcttccttggctcttcgcaggtgacgagcgcccaccagacatgggacaaggtggacaagagaagtcgttcaatttccttcaagttttgctaggtgcgtcaaccactctcttgtagcttttctgcctcttcagtagtgctatctgctttgttcttctggatgcctcttctcgctgtcgctgaaaattgtggctgctcattgtcactggtttgagagctatgtaggttcaagctccatgataaaattggccactcatgcttcatgctggaattcagcttttccaatgctgaaagggaacgttcaaacatcgaattagtatgattggacagttctctatttaggtgtcataatgaggattgtggattgtgctaaacctgatttgttaatcccgctgttctgtcttctgagagtcaccaggttactttctgaaaacttggtcactgtggttatggccgcagggtttgtgcatgttcaccatatctttgttgcaaactttgctcattccattcaatagagtttggcttggcaccttttcctctcctgaatcctgagggcagcatagctggaggaactgctggtgttgtggtggaaacagcactttacccgattgatactataaaaaccaggcttcaggccgctcgaggtggaagccggattgaatggaaaggcttgtattctggattagctggaaatctcactggcgtccttccggcctctgcgatatttgtcggggtgtatgagccaactaaaagaaaattactggaaacccttcctgaaaatctgagtgcagttgcccattttactgcaggggccattggaggtattgctgcttccctcgtccgtgtccctacagaggtggtcaaacaaaggatgcaaactggtcaattcaagtctgcacctgatgctgttcgtctcattgttgctaaagaaggatttaaaggactgtacgctggttatggttcctttctacttcgagatctaccatttgatgccatccagttctgcatttatgagcaacttcgaattggctacaaacttgtggcgaaaagggagttgaatgatccagagaatgcacttatcggtgcttttgctggcgccatcactggagctataacaactccccttgatgtcatgaagacaagattgatggttcagggacaagggaaccaatacactggaattgtaagctgtgctcagacaatcctcagagaggaaggccctaaggcattcttgaagggcattgagccgcgagtgctgtggattggcatcggtgggtccatcttctttggcatgctggagaaaaccaagtcgatgctagccgagaggaggaaccgcgagcttcgggccgtcaaggacgaatgagtggagatcagctcttttttggcgttgagtccttaccctgaaacaaaatacacatttttacttgccggggacaacctcgccggcccgtacttgtactccacggcgttcacgttatcacgtacgtagaaattatgagcatgactgacggtttctacagattgaaaaccaaaacttattacatgcgctggaaacctgccactcactgtttacgttgggagttaataacactatgcaacatttaaatgctatggtaagcctctaaaaccgc

SEQ ID NO: 51349 - DNA, 1491 bp, Zea Mays
aacgatacggctgacctagttcgtgccagctcgttatcctaaccagttaggccttgttcggttacgtttggatcgaagtggattgagggggattaaatctctttctattcaattttgactggggagggatttaatcccctccaatccagacgcaaccgaataaggccttactgagccgaggttcgataggagtattctgtcgtaatcctgccattcatttccatccagacgaccagaggccagagggcgttgctgcgctgcgttccgctctcccttttctgctgcgacgacggctggtcgagcgccgccacactttgcagcttccttggctcttcgcaggtgacgagcgcccaccagacatgggacaaggtggacaagagaagtcgttcaatttccttcaagttttgctagagggcagcatagctggaggaactgctggtgttgtggtggaaacagcactttacccgattgatactataaaaaccaggcttcaggccgctcgaggtggaagccggattgaatggaaaggcttgtattctggattagctggaaatctcactggcgtccttccggcctctgcgatatttgtcggggtgtatgagccaactaaaagaaaattactggaaacccttcctgaaaatctgagtgcagttgcccattttactgcaggggccattggaggtattgctgcttccctcgtccgtgtccctacagaggtggtcaaacaaaggatgcaaactggtcaattcaagtctgcacctgatgctgttcgtctcattgttgctaaagaaggatttaaaggactgtacgctggttatggttcctttctacttcgagatctaccatttgatgccatccagttctgcatttatgagcaacttcgaattggctacaaacttgtggcgaaaagggagttgaatgatccagagaatgcacttatcggtgcttttgctggcgccatcactggagctataacaactccccttgatgtcatgaagacaagattgatggttcagggacaagggaaccaatacactggaattgtaagctgtgctcagacaatcctcagagaggaaggccctaaggcattcttgaagggcattgagccgcgagtgctgtggattggcatcggtgggtccatcttctttggcatgctggagaaaaccaagtcgatgctagccgagaggaggaaccgcgagcttcgggccgtcaaggacgaatgagtggagatcagctcttttttggcgttgagtccttaccctgaaacaaaatacacatttttacttgccggggacaacctcgccggcccgtacttgtactccacggcgttcacgttatcacgtacgtagaaattatgagcatgactgacggtttctacagattgaaaaccaaaacttattacatgcgctggaaacctgccactcactgtttacgttgggagttaataacactatgcaacatttaaatgctatggtaagcctctaaaaccgc

SEQ ID NO: 51350 - DNA, 1156 bp, Zea Mays
cttcctgctgcgcaaaccctaaacatgggacaaggtggacaagagaagtcgttcaatttccttcaagttttgctagagggcagcatagctggaggaactgctggtgttgtggtggaaacagcactttacccgattgatactataaaaaccaggcttcaggccgctcgaggtggaagccggattgaatggaaaggcttgtattctggattagctggaaatctcactggcgtccttccggcctctgcgatatttgtcggggtgtatgagccaactaaaagaaaattactggaaacccttcctgaaaatctgagtgcagttgcccattttactgcaggggccattggaggtattgctgcttccctcgtccgtgtccctacagaggtggtcaaacaaaggatgcaaactggtcaattcaagtctgcacctgatgctgttcgtctcattgttgctaaagaaggatttaaaggactgtacgctggttatggttcctttctacttcgagatctaccatttgatgccatccagttctgcatttatgagcaacttcgaattggctacaaacttgtggcgaaaagggagttgaatgatccagagaatgcacttatcggtgcttttgctggcgccatcactggagctataacaactccccttgatgtcatgaagacaagattgatggttcagggacaagggaaccaatacactggaattgtaagctgtgctcagacaatcctcagagaggaaggccctaaggcattcttgaagggcattgagccgcgagtgctgtggattggcatcggtgggtccatcttctttggcatgctggagaaaaccaagtcgatgctagccgagaggaggaaccgcgagcttcgggccgtcaaggacgaatgagtggagatcagctcttttttggcgttgagtccttaccctgaaacaaaatacacatttttacttgccggggacaacctcgccggcccgtacttgtactccacggcgttcacgttatcacgtacgtagaaattatgagcatgactgacggtttctacagattgaaaaccaaaacttattacatgcgctggaaacctgccactcactgtttacgttgggagttaataacactatgcaacatttaaatgctatggtaagcctctaaaaccgc

SEQ ID NO: 51351 - DNA, 1572 bp, Zea Mays
cttaaaggagctgcagataataactacttggtttaatatgttcttgctttgttaagctctgttctttgttacggtgtagtgtgacatttcggctatttcaggctagtaaagcaatatttattgacatatataattctcatttttagacaaatatgccagccttggctcttcaacctatcaaaatgatgttcgatggaaaactgaaaatagagctttttctgctataactttttccaccatggactattaccaaaatcctaccagcaccaaaactccctagtaaactacaaggaatgattggaacaaaagaatatcgtgataaacaactattagtaggttatggcgctgttctgaaaaagattaagaacatacctaaaagaagctttaggaaaactgagtcctaatgcatagaatgaaagattgatttattaagaaatgcctaaaaagacaaaatacggagaaaataaacataacattttacctgcatcctctggtcattgtagatgtaatgcaaggtcaaaacgaacaccataaacatgcatttctgttacccagtatctgcaacatcaaactcagttattagtgtataaacaattgcaccatctaatagaatgacaaccgacaaaggaaattaggagcaatttaatagaagttatatacaaatttgtacctcaagcaatcctctataaatccagggattacaggatgattacaattgaagttatttccacaaccagaataattataaaactctcagtacacaggtaaatgcccttcaaataaattgttatatagacatgaatgtatgaaatagaatacataactatttttgtggtccatgaaaatcataaaaccaacatacgttgctaaatgaaaaaaaacaaagagaagaatgatcttacagaagtcttctaaatgcagaacgggcacactccaaaaaacttcttcaatgtcaatttagttgttccaccaaaaaatagatttaagagggcaattgcaacttgtgtgggtgggagggttagggggatttctattgctacagagagcaatgccattagtgctactgctatgaggttcatttctatactttaattaagtccaatgcactgctatgatttctattggcagtatttcagaaacctagcaaaacagaaaaaacatatgactatcgatcgtaatcctacaacaattgttggataatggtttgccaaaatcattgaccggcacttctatgatttctaaacctagcaaaacagatagaatgtgttcatccaaaaatcgtgttcataagatatatacacaaccagacagaatgcaaaacggaaaacaaggctatagatgactatcgaccgtagccaggcaaccctaaacccttatgataatgaaaagaagatgcagttctcttatgataatgaaaacctcgccgaaattgacaattactggataatgatttcccaaaatcactggctaaacaaagcatgggtaccgaaaatctgtggagctgatgccaaatccgtggagcctttggtggagccgatgccgaattcgtcccaatctggcgggatgcggaac

SEQ ID NO: 51352 - DNA, 456 bp, Zea Mays
atgaagatgtcccggtcctccagcagcctcttcatgcagcagcagcaacgaccggacacgacgactctggcgggtgccgccggcgacgaagacgaagacgcgggctgctgccggtcgctcaatgccaacggctcaatgctgaaaaccaccttcgtgcagccaccacctacgtctcccctgcgcacctccaccgtctcgccggcgaggatgtgcgtggtcctcgggttggccccgcgcgagatgacacaagtttactcctcgcagtcggcgtactcgctcgcctgtttgcccagggttcagcggccccctcgccgtcctcctcccgaccgccttgcctttgtcacccttcttcttcttcttcttgagggactcgagcgccgcgaacacgttgccggtgtaaagcttgacctcctccgccgctccgccccgcctcccgccgcccaccataccccctga

SEQ ID NO: 51353 - DNA, 2306 bp, Zea Mays
ccacgctccactcccgacacctgttccgtttaaaatctccggcgtcgacgtggccgcgtgcgcagccacaaaccctccctcccgccgcaattaacaatccgctaatcagctcggcgcagcccgaaccctccctctaatcgcccgctaaaccgctccctccctccgccaaaaggccagtccgggggcttttcctatctccacttgttggcgacttggtagtagactcgcggatacgatccttctagacacttcgacgcgcccgttataaaggccggcgcatccgggccatgaccacacagccccttgctcattggctagggcggggaaggaaattgcgggaggatgcgaagccattggtgtattgcatatggtggcaccaagcatgaggcaggaactgcattacttgcaagaaagtcacaaaatccattgcaagatcatacttgtggctttcttgcaagttgtgcagttgttgcctcaagcttgctgcctccctttgccagagctatcggtaaaacaggaagtactgtcagtttccgagctacaaacaagctataagtttagaaaaataatttagaaatgtacaacaaagtctagtaatacattgttaaagataaatcaatactcaataagttcctcatgctttggatttggggataacatacctgttttatttacatgctaatatttggaccaacaaaaaataccttaggaacagccatttgagaaaaaaacaaagccttttagtcctaagcaagttagcatagcttagagttgcaacttctacatgagcacaataaacagaaaagaaagagaaaaggaaaataaatatatatggcaccaaaagctattaccatgttataatataaatttaatgaccgaaattataaacatttttacaatcttagcaaacctctcaacgtgtagtctgaatcgacagaacatcagtagagtaatttttgttacatttatagtccccaatgtcgtttcaaggcaaagtttgtttggtttctctgttttcctaaacactggcttctcaattgcattctcaatgtgcatctgtactagtttgacatctgtggctattgtgattcttcctggaatatcatctgtccatcacctttaaagcataacattaccctgatggccatgtgatctgtaggtccctagaaaggaaaatcgtgatttggaaaggaaattcatcaacaaacctgagtcggaaggatgcttaggaagcgggtactccctatgttccagattatagttcatttagatttgatgattcaatcaattatttctggggtggtctacagccaatgcatagtctctatctgtgtgtgtgttttgtgtttcccgtgcactctattcctttcgagaggcactctatgtcaggtgcctgaaatatggtttagcttcaggcaatgaagtggacgtcggatggagatccgagtgtccacgatgacagagaccgggttttgaatctctcgtctctccatctctcatgcgttcccaacttccaactccaatgccgtctccgctggctgatcagtgatcacctctgaccctctctggtgatgtgtacccattgttaatctctccaatgaagctaccctgcctgaccaggcccacaggctgtctcctgcatacggtggcaacacaccaacactgctggcctgccctaagacacatcttcgcgttgcgtccactggatacctgctttcttagtcagcagcatgccgaaaccctccatttgtgaaacctcagcggtgataggcggtggttgtcgaacgctggcatgaaggtgtgagctcccaactgctgaatcgtgttcctcttttacatgcacgtgtccaacaagaaccaagaaccgagattagcgctacctcagtacactgccggtgcaagataaacgaaggaagctgggattgcatggcactgcggtctgttatgtagccgtggaacagcaagacaaaaagacatggatattccttgtttggattggggtgtttgatccagaaacagtctcattgctaattgtttcattattactacaaatcttggtcgaggcgtgaatatccttgctcttgatataattatagtattttgaatccctattgtgttttttacttaagtgataaatgttgcaaagaaaccattagataattgttgaatgattagttattgattacattgattgattttgatttaatgaatcttaaataaaccagaagattcatgtgtatgaatatttgtgttgggaatttcttggtcacatgttttccgcataataatatcataaaactgtggaa

SEQ ID NO: 51354 - DNA, 2252 bp, Zea Mays
gctccactcccgacacctgttccgtttaaaatctccggcgtcgacgtggccgcgtgcgcagccacaaaccctccctcccgccgcaattaacaatccgctaatcagctcggcgcagcccgaaccctccctctaatcgcccgctaaaccgctccctccctccgccaaaaggccagtccgggggcttttcctatctccacttgttggcgacttggtagtagactcgcggatacgatccttctagacacttcgacgcgcccgttataaaggccggcgcatccgggccatgaccacacagccccttgctcattggctagggcggggaaggaaattgcgggaggatgcgaagccattggtgtattgcatatggtggcaccaagcatgaggcaggaactgcattacttgcaagaaagtcacaaaatccattgcaagatcatacttgtggctttcttgcaagttgtgcagttgttgcctcaagcttgctgcctccctttgccagagctatcggtaaaacaggaagtactgtcagtttccgagctacaaacaagctataagtttagaaaaataatttagaaatgtacaacaaagtctagtaatacattgttaaagataaatcaatactcaataagttcctcatgctttggatttggggataacatacctgttttatttacatgctaatatttggaccaacaaaaaataccttaggaacagccatttgagaaaaaaacaaagccttttagtcctaagcaagttagcatagcttagagttgcaacttctacatgagcacaataaacagaaaagaaagagaaaaggaaaataaatatatatggcaccaaaagctattaccatgttataatataaatttaatgaccgaaattataaacatttttacaatcttagcaaacctctcaacgtgtagtctgaatcgacagaacatcagtagagtaatttttgttacatttatagtccccaatgtcgtttcaaggcaaagtttgtttggtttctctgttttcctaaacactggcttctcaattgcattctcaatgtgcatctgtactagtttgacatctgtggctattgtgattcttcctggaatatcatctgtccatcacctttaaagcataacattaccctgatggccatgtgatctgtaggtccctagaaaggaaaatcgtgatttggaaaggaaattcatcaacaaacctgagtcggaaggatgcttaggaagcgggattcaatcaattatttctggggtggtctacagccaatgcatagtctctatctgtgtgtgtgttttgtgtttcccgtgcactctattcctttcgagaggcactctatgtcaggtgcctgaaatatggtttagcttcaggcaatgaagtggacgtcggatggagatccgagtgtccacgatgacagagaccgggttttgaatctctcgtctctccatctctcatgcgttcccaacttccaactccaatgccgtctccgctggctgatcagtgatcacctctgaccctctctggtgatgtgtacccattgttaatctctccaatgaagctaccctgcctgaccaggcccacaggctgtctcctgcatacggtggcaacacaccaacactgctggcctgccctaagacacatcttcgcgttgcgtccactggatacctgctttcttagtcagcagcatgccgaaaccctccatttgtgaaacctcaggcggtggttgtcgaacgctggcatgaaggtgtgagctcccaactgctgaatcgtgttcctcttttacatgcacgtgtccaacaagaaccaagaaccgagattagcgctacctcagtacactgccggtgcaagataaacgaaggaagctgggattgcatggcactgcggtctgttatgtagccgtggaacagcaagacaaaaagacatggatattccttgtttggattggggtgtttgatccagaaacagtctcattgctaattgtttcattattactacaaatcttggtcgaggcgtgaatatccttgctcttgatataattatagtattttgaatccctattgtgttttttacttaagtgataaatgttgcaaagaaaccattagataattgttgaatgattagttattgattacattgattgattttgatttaatgaatcttaaataaaccagaagattcatgtgtatgaatatttgtgttgggaatttcttggtcacatgttttccgcataataatatcataaaactgtggaa

SEQ ID NO: 51355 - DNA, 2406 bp, Zea Mays
gctccactcccgacacctgttccgtttaaaatctccggcgtcgacgtggccgcgtgcgcagccacaaaccctccctcccgccgcaattaacaatccgctaatcagctcggcgcagcccgaaccctccctctaatcgcccgctaaaccgctccctccctccgccaaaaggccagtccgggggcttttcctatctccacttgttggcgacttggtagtagactcgcggatacgatccttctagacacttcgacgcgcccgttataaaggccggcgcatccgggccatgaccacacagccccttgctcattggctagggcggggaaggaaattgcgggaggatgcgaagccattggtgtattgcatatggtggcaccaagcatgaggcaggaactgcattacttgcaagaaagtcacaagctcattccaatctgattctctaaactttggaggtctcttacacctaggcctgaaagctcctctcccattagttgcctacaacattggaaaagagtttctcacattatcttagaatccattgcaagatcatacttgtggctttcttgcaagttgtgcagttgttgcctcaagcttgctgcctccctttgccagagctatcggtaaaacaggaagtactgtcagtttccgagctacaaacaagctataagtttagaaaaataatttagaaatgtacaacaaagtctagtaatacattgttaaagataaatcaatactcaataagttcctcatgctttggatttggggataacatacctgttttatttacatgctaatatttggaccaacaaaaaataccttaggaacagccatttgagaaaaaaacaaagccttttagtcctaagcaagttagcatagcttagagttgcaacttctacatgagcacaataaacagaaaagaaagagaaaaggaaaataaatatatatggcaccaaaagctattaccatgttataatataaatttaatgaccgaaattataaacatttttacaatcttagcaaacctctcaacgtgtagtctgaatcgacagaacatcagtagagtaatttttgttacatttatagtccccaatgtcgtttcaaggcaaagtttgtttggtttctctgttttcctaaacactggcttctcaattgcattctcaatgtgcatctgtactagtttgacatctgtggctattgtgattcttcctggaatatcatctgtccatcacctttaaagcataacattaccctgatggccatgtgatctgtaggtccctagaaaggaaaatcgtgatttggaaaggaaattcatcaacaaacctgagtcggaaggatgcttaggaagcgggtactccctatgttccagattatagttcatttagatttgatgattcaatcaattatttctggggtggtctacagccaatgcatagtctctatctgtgtgtgtgttttgtgtttcccgtgcactctattcctttcgagaggcactctatgtcaggtgcctgaaatatggtttagcttcaggcaatgaagtggacgtcggatggagatccgagtgtccacgatgacagagaccgggttttgaatctctcgtctctccatctctcatgcgttcccaacttccaactccaatgccgtctccgctggctgatcagtgatcacctctgaccctctctggtgatgtgtacccattgttaatctctccaatgaagctaccctgcctgaccaggcccacaggctgtctcctgcatacggtggcaacacaccaacactgctggcctgccctaagacacatcttcgcgttgcgtccactggatacctgctttcttagtcagcagcatgccgaaaccctccatttgtgaaacctcaggcggtggttgtcgaacgctggcatgaaggtgtgagctcccaactgctgaatcgtgttcctcttttacatgcacgtgtccaacaagaaccaagaaccgagattagcgctacctcagtacactgccggtgcaagataaacgaaggaagctgggattgcatggcactgcggtctgttatgtagccgtggaacagcaagacaaaaagacatggatattccttgtttggattggggtgtttgatccagaaacagtctcattgctaattgtttcattattactacaaatcttggtcgaggcgtgaatatccttgctcttgatataattatagtattttgaatccctattgtgttttttacttaagtgataaatgttgcaaagaaaccattagataattgttgaatgattagttattgattacattgattgattttgatttaatgaatcttaaataaaccagaagattcatgtgtatgaatatttgtgttgggaatttcttggtcacatgttttccgcataataatatcataaaactgtggaa

SEQ ID NO: 51356 - DNA, 2229 bp, Zea Mays
ccgacacctgttccgtttaaaatctccggcgtcgacgtggccgcgtgcgcagccacaaaccctccctcccgccgcaattaacaatccgctaatcagctcggcgcagcccgaaccctccctctaatcgcccgctaaaccgctccctccctccgccaaaaggccagtccgggggcttttcctatctccacttgttggcgacttggtagtagactcgcggatacgatccttctagacacttcgacgcgcccgttataaaggccggcgcatccgggccatgaccacacagccccttgctcattggctagggcggggaaggaaattgcgggaggatgcgaagccattggtgtattgcatatggtggcaccaagcatgaggcaggaactgcattacttgcaagaaagtcacaaaatccattgcaagatcatacttgtggctttcttgcaagttgtgcagttgttgcctcaagcttgctgcctccctttgccagagctatcggtaaaacaggaagtactgtcagtttccgagctacaaacaagctataagtttagaaaaataatttagaaatgtacaacaaagtctagtaatacattgttaaagataaatcaatactcaataagttcctcatgctttggatttggggataacatacctgttttatttacatgctaatatttggaccaacaaaaaataccttaggaacagccatttgagaaaaaaacaaagccttttagtcctaagcaagttagcatagcttagagttgcaacttctacatgagcacaataaacagaaaagaaagagaaaaggaaaataaatatatatggcaccaaaagctattaccatgttataatataaatttaatgaccgaaattataaacatttttacaatcttagcaaacctctcaacgtgtagtctgaatcgacagaacatcagtagagtaatttttgttacatttatagtccccaatgtcgtttcaaggcaaagtttgtttggtttctctgttttcctaaacactggcttctcaattgcattctcaatgtgcatctgtactagtttgacatctgtggctattgtgattcttcctggaatatcatctgtccatcacctttaaagcataacattaccctgatggccatgtgatctgtaggtccctagaaaggaaaatcgtgatttggaaaggaaattcatcaacaaacctgagtcggaaggatgcttaggaagcgggattcaatcaattatttctggggtggtctacagccaatgcatagtctctatctgtgtgtgtgttttgtgtttcccgtgcactctattcctttcgagaggcactctatgtcaggtgcctgaaatatggtttagcttcaggcaatgaagtggacgtcggatggagatccgagtgtccacgatgacagagaccgggttttgaatctctcgtctctccatctctcatgcgttcccaacttccaactccaatgccgtctccgctggctgatcagtgatcacctctgaccctctctggtgatgtgtacccattgttaatctctccaatgaagctaccctgcctgaccaggcccacaggctgtctcctgcatacggtggcaacacaccaacactgctggcctgccctaagacacatcttcgcgttgcgtccactggatacctgctttcttagtcagcagcatgccgaaaccctccatttgtgaaacctcagcggtgataggcggtggttgtcgaacgctggcatgaaggtgtgagctcccaactgctgaatcgtgttcctcttttacatgcacgtgtccaacaagaaccaagtacactgccggtgcaagataaacgaaggaagctgggattgcatggcactgcggtctgttatgtagccgtggaacagcaagacaaaaagacatggatattccttgtttggattggggtgtttgatccagaaacagtctcattgctaattgtttcattattactacaaatcttggtcgaggcgtgaatatccttgctcttgatataattatagtattttgaatccctattgtgttttttacttaagtgataaatgttgcaaagaaaccattagataattgttgaatgattagttattgattacattgattgattttgatttaatgaatcttaaataaaccagaagattcatgtgtatgaatatttgtgttgggaatttcttggtcacatgttttccgcataataatatcataaaactgtggaa

SEQ ID NO: 51357 - DNA, 2282 bp, Zea Mays
ccgacacctgttccgtttaaaatctccggcgtcgacgtggccgcgtgcgcagccacaaaccctccctcccgccgcaattaacaatccgctaatcagctcggcgcagcccgaaccctccctctaatcgcccgctaaaccgctccctccctccgccaaaaggccagtccgggggcttttcctatctccacttgttggcgacttggtagtagactcgcggatacgatccttctagacacttcgacgcgcccgttataaaggccggcgcatccgggccatgaccacacagccccttgctcattggctagggcggggaaggaaattgcgggaggatgcgaagccattggtgtattgcatatggtggcaccaagcatgaggcaggaactgcattacttgcaagaaagtcacaagctcattccaatctgattctctaaactttggaggtctcttacacctaggcctgaaagctcctctcccattagttgcctacaacattggaaaagagtttctcacattatcttagaatccattgcaagatcatacttgtggctttcttgcaagttgtgcagttgttgcctcaagcttgctgcctccctttgccagagctatcggtaaaacaggaagtactgtcagtttccgagctacaaacaagctataagtttagaaaaataatttagaaatgtacaacaaagtctagtaatacattgttaaagataaatcaatactcaataagttcctcatgctttggatttggggataacatacctgttttatttacatgctaatatttggaccaacaaaaaataccttaggaacagccatttgagaaaaaaacaaagccttttagtcctaagcaagttagcatagcttagagttgcaacttctacatgagcacaataaacagaaaagaaagagaaaaggaaaataaatatatatggcaccaaaagctattaccatgttataatataaatttaatgaccgaaattataaacatttttacaatcttagcaaacctctcaacgtgtagtctgaatcgacagaacatcagtagagtaatttttgttacatttatagtccccaatgtcgtttcaaggcaaagtttgtttggtttctctgttttcctaaacactggcttctcaattgcattctcaatgtgcatctgtactagtttgacatctgtggctattgtgattcttcctggaatatcatctgtccatcacctttaaagcataacattaccctgatggccatgtgatctgtaggtccctagaaaggaaaatcgtgatttggaaaggaaattcatcaacaaacctgagtcggaaggatgcttaggaagcgggattcaatcaattatttctggggtggtctacagccaatgcatagtctctatctgtgcaatgaagtggacgtcggatggagatccgagtgtccacgatgacagagaccgggttttgaatctctcgtctctccatctctcatgcgttcccaacttccaactccaatgccgtctccgctggctgatcagtgatcacctctgaccctctctggtgatgtgtacccattgttaatctctccaatgaagctaccctgcctgaccaggcccacaggctgtctcctgcatacggtggcaacacaccaacactgctggcctgccctaagacacatcttcgcgttgcgtccactggatacctgctttcttagtcagcagcatgccgaaaccctccatttgtgaaacctcagcggtgataggcggtggttgtcgaacgctggcatgaaggtgtgagctcccaactgctgaatcgtgttcctcttttacatgcacgtgtccaacaagaaccaagaaccgagattagcgctacctcagtacactgccggtgcaagataaacgaaggaagctgggattgcatggcactgcggtctgttatgtagccgtggaacagcaagacaaaaagacatggatattccttgtttggattggggtgtttgatccagaaacagtctcattgctaattgtttcattattactacaaatcttggtcgaggcgtgaatatccttgctcttgatataattatagtattttgaatccctattgtgttttttacttaagtgataaatgttgcaaagaaaccattagataattgttgaatgattagttattgattacattgattgattttgatttaatgaatcttaaataaaccagaagattcatgtgtatgaatatttgtgttgggaatttcttggtcacatgttttccgcataataatatcataaaactgtggaa

SEQ ID NO: 51358 - DNA, 1712 bp, Zea Mays
gacacctgttccgtttaaaatctccggcgtcgacgtggccgcgtgcgcagccacaaaccctccctcccgccgcaattaacaatccgctaatcagctcggcgcagcccgaaccctccctctaatcgcccgctaaaccgctccctccctccgccaaaaggccagtccgggggcttttcctatctccacttgttggcgacttggtagtagactcgcggatacgatccttctagacacttcgacgcgcccgttataaaggccggcgcatccgggccatgaccacacagccccttgctcattggctagggcggggaaggaaattgcgggaggatgcgaagccattggtgtattgcatatggtggcaccaagcatgaggcaggaactgcattacttgcaagaaagtcacaagctcattccaatctgattctctaaactttggaggtctcttacacctaggcctgaaagctcctctcccattagttgcctacaacattggaaaagagtttctcacattatcttagaatccattgcaagatcatacttgtggctttcttgcaagttgtgcagttgttgcctcaagcttgctgcctccctttgccagagctatcggtccctagaaaggaaaatcgtgatttggaaaggaaattcatcaacaaacctgagtcggaaggatgcttaggaagcgggattcaatcaattatttctggggtggtctacagccaatgcatagtctctatctgtgtgtgtgttttgtgtttcccgtgcactctattcctttcgagaggcactctatgtcaggtgcctgaaatatggtttagcttcaggcaatgaagtggacgtcggatggagatccgagtgtccacgatgacagagaccgggttttgaatctctcgtctctccatctctcatgcgttcccaacttccaactccaatgccgtctccgctggctgatcagtgatcacctctgaccctctctggtgatgtgtacccattgttaatctctccaatgaagctaccctgcctgaccaggcccacaggctgtctcctgcatacggtggcaacacaccaacactgctggcctgccctaagacacatcttcgcgttgcgtccactggatacctgctttcttagtcagcagcatgccgaaaccctccatttgtgaaacctcagcggtgataggcggtggttgtcgaacgctggcatgaaggtgtgagctcccaactgctgaatcgtgttcctcttttacatgcacgtgtccaacaagaaccaagaaccgagattagcgctacctcagtacactgccggtgcaagataaacgaaggaagctgggattgcatggcactgcggtctgttatgtagccgtggaacagcaagacaaaaagacatggatattccttgtttggattggggtgtttgatccagaaacagtctcattgctaattgtttcattattactacaaatcttggtcgaggcgtgaatatccttgctcttgatataattatagtattttgaatccctattgtgttttttacttaagtgataaatgttgcaaagaaaccattagataattgttgaatgattagttattgattacattgattgattttgatttaatgaatcttaaataaaccagaagattcatgtgtatgaatatttgtgttgggaatttcttggtcacatgttttccgcataataatatcataaaactgtggaa

SEQ ID NO: 51359 - DNA, 1611 bp, Zea Mays
gacacctgttccgtttaaaatctccggcgtcgacgtggccgcgtgcgcagccacaaaccctccctcccgccgcaattaacaatccgctaatcagctcggcgcagcccgaaccctccctctaatcgcccgctaaaccgctccctccctccgccaaaaggccagtccgggggcttttcctatctccacttgttggcgacttggtagtagactcgcggatacgatccttctagacacttcgacgcgcccgttataaaggccggcgcatccgggccatgaccacacagccccttgctcattggctagggcggggaaggaaattgcgggaggatgcgaagccattggtgtattgcatatggtggcaccaagcatgaggcaggaactgcattacttgcaagaaagtcacaaaatccattgcaagatcatacttgtggctttcttgcaagttgtgcagttgttgcctcaagcttgctgcctccctttgccagagctatcggtaaaacaggaagtccctagaaaggaaaatcgtgatttggaaaggaaattcatcaacaaacctgagtcggaaggatgcttaggaagcgggattcaatcaattatttctggggtggtctacagccaatgcatagtctctatctgtgtgtgtgttttgtgtttcccgtgcactctattcctttcgagaggcactctatgtcaggtgcctgaaatatggtttagcttcaggcaatgaagtggacgtcggatggagatccgagtgtccacgatgacagagaccgggttttgaatctctcgtctctccatctctcatgcgttcccaacttccaactccaatgccgtctccgctggctgatcagtgatcacctctgaccctctctggtgatgtgtacccattgttaatctctccaatgaagctaccctgcctgaccaggcccacaggctgtctcctgcatacggtggcaacacaccaacactgctggcctgccctaagacacatcttcgcgttgcgtccactggatacctgctttcttagtcagcagcatgccgaaaccctccatttgtgaaacctcagcggtgataggcggtggttgtcgaacgctggcatgaaggtgtgagctcccaactgctgaatcgtgttcctcttttacatgcacgtgtccaacaagaaccaagaaccgagattagcgctacctcagtacactgccggtgcaagataaacgaaggaagctgggattgcatggcactgcggtctgttatgtagccgtggaacagcaagacaaaaagacatggatattccttgtttggattggggtgtttgatccagaaacagtctcattgctaattgtttcattattactacaaatcttggtcgaggcgtgaatatccttgctcttgatataattatagtattttgaatccctattgtgttttttacttaagtgataaatgttgcaaagaaaccattagataattgttgaatgattagttattgattacattgattgattttgatttaatgaatcttaaataaaccagaagattcatgtgtatgaatatttgtgttgggaatttcttggtcacatgttttccgcataataatatcataaaactgtggaa

SEQ ID NO: 51360 - DNA, 1602 bp, Zea Mays
gacacctgttccgtttaaaatctccggcgtcgacgtggccgcgtgcgcagccacaaaccctccctcccgccgcaattaacaatccgctaatcagctcggcgcagcccgaaccctccctctaatcgcccgctaaaccgctccctccctccgccaaaaggccagtccgggggcttttcctatctccacttgttggcgacttggtagtagactcgcggatacgatccttctagacacttcgacgcgcccgttataaaggccggcgcatccgggccatgaccacacagccccttgctcattggctagggcggggaaggaaattgcgggaggatgcgaagccattggtgtattgcatatggtggcaccaagcatgaggcaggaactgcattacttgcaagaaagtcacaaaatccattgcaagatcatacttgtggctttcttgcaagttgtgcagttgttgcctcaagcttgctgcctccctttgccagagctatcggtaaaacaggaagtccctagaaaggaaaatcgtgatttggaaaggaaattcatcaacaaacctgagtcggaaggatgcttaggaagcgggattcaatcaattatttctggggtggtctacagccaatgcatagtctctatctgtgtgtgtgttttgtgtttcccgtgcactctattcctttcgagaggcactctatgtcaggtgcctgaaatatggtttagcttcaggcaatgaagtggacgtcggatggagatccgagtgtccacgatgacagagaccgggttttgaatctctcgtctctccatctctcatgcgttcccaacttccaactccaatgccgtctccgctggctgatcagtgatcacctctgaccctctctggtgatgtgtacccattgttaatctctccaatgaagctaccctgcctgaccaggcccacaggctgtctcctgcatacggtggcaacacaccaacactgctggcctgccctaagacacatcttcgcgttgcgtccactggatacctgctttcttagtcagcagcatgccgaaaccctccatttgtgaaacctcaggcggtggttgtcgaacgctggcatgaaggtgtgagctcccaactgctgaatcgtgttcctcttttacatgcacgtgtccaacaagaaccaagaaccgagattagcgctacctcagtacactgccggtgcaagataaacgaaggaagctgggattgcatggcactgcggtctgttatgtagccgtggaacagcaagacaaaaagacatggatattccttgtttggattggggtgtttgatccagaaacagtctcattgctaattgtttcattattactacaaatcttggtcgaggcgtgaatatccttgctcttgatataattatagtattttgaatccctattgtgttttttacttaagtgataaatgttgcaaagaaaccattagataattgttgaatgattagttattgattacattgattgattttgatttaatgaatcttaaataaaccagaagattcatgtgtatgaatatttgtgttgggaatttcttggtcacatgttttccgcataataatatcataaaactgtggaa

SEQ ID NO: 51361 - DNA, 1844 bp, Zea Mays
gacacctgttccgtttaaaatctccggcgtcgacgtggccgcgtgcgcagccacaaaccctccctcccgccgcaattaacaatccgctaatcagctcggcgcagcccgaaccctccctctaatcgcccgctaaaccgctccctccctccgccaaaaggccagtccgggggcttttcctatctccacttgttggcgacttggtagtagactcgcggatacgatccttctagacacttcgacgcgcccgttataaaggccggcgcatccgggccatgaccacacagccccttgctcattggctagggcggggaaggaaattgcgggaggatgcgaagccattggtgtattgcatatggtggcaccaagcatgaggcaggaactgcattacttgcaagaaagtcacaagctcattccaatctgattctctaaactttggaggtctcttacacctaggcctgaaagctcctctcccattagttgcctacaacattggaaaagagtttctcacattatcttagaatccattgcaagatcatacttgtggctttcttgcaagttgtgcagttgttgcctcaagcttgctgcctccctttgccagagctatcggtccctagaaaggaaaatcgtgatttggaaaggaaattcatcaacaaacctgagtcggaaggatgcttaggaagcgggtactccctatgttccagattatagttcatttagatttgatgattcaatcaattatttctggggtggtctacagccaatgcatagtctctatctgtgtgtgtgttttgtgtttcccgtgcactctattcctttcgagaggcactctatgtcaggtgcctgaaatatggtttagcttcaggcaatgaagtggacgtcggatggagatccgagtgtccacgatgacagagaccgggttttgaatctctcgtctctccatctctcatgcgttcccaacttccaactccaatgccgtctccgctggctgatcagtgatcacctctgaccctctctggtgatgtgtacccattgttaatctctccaatgaagctaccctgcctgaccaggcccacaggctgtctcctgcatacggtggcaacacaccaacactgctggcctgccctaagacacatcttcgcgttgcgtccactggatacctgctttcttagtcagcagcatgccgaaaccctccatttgtgaaacctcagcggtgataggcggtggttgtcgaacgctggcatgaaggtgtgagctcccaactgctgaatcgtgttcctcttttacatgcacgtgtccaacaagaaccaaggtggaactgtaaagccttgtgtctttgaactttgcagccacgtattcagatttttttttgagttattgtaatttatttacattccctctagaaccgagattagcgctacctcagtacactgccggtgcaagataaacgaaggaagctgggattgcatggcactgcggtctgttatgtagccgtggaacagcaagacaaaaagacatggatattccttgtttggattggggtgtttgatccagaaacagtctcattgctaattgtttcattattactacaaatcttggtcgaggcgtgaatatccttgctcttgatataattatagtattttgaatccctattgtgttttttacttaagtgataaatgttgcaaagaaaccattagataattgttgaatgattagttattgattacattgattgattttgatttaatgaatcttaaataaaccagaagattcatgtgtatgaatatttgtgttgggaatttcttggtcacatgttttccgcataataatatcataaaactgtggaa

SEQ ID NO: 51362 - DNA, 1765 bp, Zea Mays
gacacctgttccgtttaaaatctccggcgtcgacgtggccgcgtgcgcagccacaaaccctccctcccgccgcaattaacaatccgctaatcagctcggcgcagcccgaaccctccctctaatcgcccgctaaaccgctccctccctccgccaaaaggccagtccgggggcttttcctatctccacttgttggcgacttggtagtagactcgcggatacgatccttctagacacttcgacgcgcccgttataaaggccggcgcatccgggccatgaccacacagccccttgctcattggctagggcggggaaggaaattgcgggaggatgcgaagccattggtgtattgcatatggtggcaccaagcatgaggcaggaactgcattacttgcaagaaagtcacaagctcattccaatctgattctctaaactttggaggtctcttacacctaggcctgaaagctcctctcccattagttgcctacaacattggaaaagagtttctcacattatcttagaatccattgcaagatcatacttgtggctttcttgcaagttgtgcagttgttgcctcaagcttgctgcctccctttgccagagctatcggtaaaacaggaagtccctagaaaggaaaatcgtgatttggaaaggaaattcatcaacaaacctgagtcggaaggatgcttaggaagcgggtactccctatgttccagattatagttcatttagatttgatgattcaatcaattatttctggggtggtctacagccaatgcatagtctctatctgtgtgtgtgttttgtgtttcccgtgcactctattcctttcgagaggcactctatgtcaggtgcctgaaatatggtttagcttcaggcaatgaagtggacgtcggatggagatccgagtgtccacgatgacagagaccgggttttgaatctctcgtctctccatctctcatgcgttcccaacttccaactccaatgccgtctccgctggctgatcagtgatcacctctgaccctctctggtgatgtgtacccattgttaatctctccaatgaagctaccctgcctgaccaggcccacaggctgtctcctgcatacggtggcaacacaccaacactgctggcctgccctaagacacatcttcgcgttgcgtccactggatacctgctttcttagtcagcagcatgccgaaaccctccatttgtgaaacctcagcggtgataggcggtggttgtcgaacgctggcatgaaggtgtgagctcccaactgctgaatcgtgttcctcttttacatgcacgtgtccaacaagaaccaagaaccgagattagcgctacctcagtacactgccggtgcaagataaacgaaggaagctgggattgcatggcactgcggtctgttatgtagccgtggaacagcaagacaaaaagacatggatattccttgtttggattggggtgtttgatccagaaacagtctcattgctaattgtttcattattactacaaatcttggtcgaggcgtgaatatccttgctcttgatataattatagtattttgaatccctattgtgttttttacttaagtgataaatgttgcaaagaaaccattagataattgttgaatgattagttattgattacattgattgattttgatttaatgaatcttaaataaaccagaagattcatgtgtatgaatatttgtgttgggaatttcttggtcacatgttttccgcataataatatcataaaactgtggaa

SEQ ID NO: 51363 - DNA, 2250 bp, Zea Mays
gacacctgttccgtttaaaatctccggcgtcgacgtggccgcgtgcgcagccacaaaccctccctcccgccgcaattaacaatccgctaatcagctcggcgcagcccgaaccctccctctaatcgcccgctaaaccgctccctccctccgccaaaaggccagtccgggggcttttcctatctccacttgttggcgacttggtagtagactcgcggatacgatccttctagacacttcgacgcgcccgttataaaggccggcgcatccgggccatgaccacacagccccttgctcattggctagggcggggaaggaaattgcgggaggatgcgaagccattggtgtattgcatatggtggcaccaagcatgaggcaggaactgcattacttgcaagaaagtcacaaaatccattgcaagatcatacttgtggctttcttgcaagttgtgcagttgttgcctcaagcttgctgcctccctttgccagagctatcggtaaaacaggaagtactgtcagtttccgagctacaaacaagctataagtttagaaaaataatttagaaatgtacaacaaagtctagtaatacattgttaaagataaatcaatactcaataagttcctcatgctttggatttggggataacatacctgttttatttacatgctaatatttggaccaacaaaaaataccttaggaacagccatttgagaaaaaaacaaagccttttagtcctaagcaagttagcatagcttagagttgcaacttctacatgagcacaataaacagaaaagaaagagaaaaggaaaataaatatatatggcaccaaaagctattaccatgttataatataaatttaatgaccgaaattataaacatttttacaatcttagcaaacctctcaacgtgtagtctgaatcgacagaacatcagtagagtaatttttgttacatttatagtccccaatgtcgtttcaaggcaaagtttgtttggtttctctgttttcctaaacactggcttctcaattgcattctcaatgtgcatctgtactagtttgacatctgtggctattgtgattcttcctggaatatcatctgtccatcacctttaaagcataacattaccctgatggccatgtgatctgtaggtccctagaaaggaaaatcgtgatttggaaaggaaattcatcaacaaacctgagtcggaaggatgcttaggaagcgggattcaatcaattatttctggggtggtctacagccaatgcatagtctctatctgtgtgtgtgttttgtgtttcccgtgcactctattcctttcgagaggcactctatgtcaggtgcctgaaatatggtttagcttcaggcaatgaagtggacgtcggatggagatccgagtgtccacgatgacagagaccgggttttgaatctctcgtctctccatctctcatgcgttcccaacttccaactccaatgccgtctccgctggctgatcagtgatcacctctgaccctctctggtgatgtgtacccattgttaatctctccaatgaagctaccctgcctgaccaggcccacaggctgtctcctgcatacggtggcaacacaccaacactgctggcctgccctaagacacatcttcgcgttgcgtccactggatacctgctttcttagtcagcagcatgccgaaaccctccatttgtgaaacctcagcggtgataggcggtggttgtcgaacgctggcatgaaggtgtgagctcccaactgctgaatcgtgttcctcttttacatgcacgtgtccaacaagaaccaagaaccgagattagcgctacctcagtacactgccggtgcaagataaacgaaggaagctgggattgcatggcactgcggtctgttatgtagccgtggaacagcaagacaaaaagacatggatattccttgtttggattggggtgtttgatccagaaacagtctcattgctaattgtttcattattactacaaatcttggtcgaggcgtgaatatccttgctcttgatataattatagtattttgaatccctattgtgttttttacttaagtgataaatgttgcaaagaaaccattagataattgttgaatgattagttattgattacattgattgattttgatttaatgaatcttaaataaaccagaagattcatgtgtatgaatatttgtgttgggaatttcttggtcacatgttttccgcataataatatcataaaactgtggaa

SEQ ID NO: 51364 - DNA, 1640 bp, Zea Mays
gacacctgttccgtttaaaatctccggcgtcgacgtggccgcgtgcgcagccacaaaccctccctcccgccgcaattaacaatccgctaatcagctcggcgcagcccgaaccctccctctaatcgcccgctaaaccgctccctccctccgccaaaaggccagtccgggggcttttcctatctccacttgttggcgacttggtagtagactcgcggatacgatccttctagacacttcgacgcgcccgttataaaggccggcgcatccgggccatgaccacacagccccttgctcattggctagggcggggaaggaaattgcgggaggatgcgaagccattggtgtattgcatatggtggcaccaagcatgaggcaggaactgcattacttgcaagaaagtcacaaaatccattgcaagatcatacttgtggctttcttgcaagttgtgcagttgttgcctcaagcttgctgcctccctttgccagagctatcggtccctagaaaggaaaatcgtgatttggaaaggaaattcatcaacaaacctgagtcggaaggatgcttaggaagcgggtactccctatgttccagattatagttcatttagatttgatgattcaatcaattatttctggggtggtctacagccaatgcatagtctctatctgtgtgtgtgttttgtgtttcccgtgcactctattcctttcgagaggcactctatgtcaggtgcctgaaatatggtttagcttcaggcaatgaagtggacgtcggatggagatccgagtgtccacgatgacagagaccgggttttgaatctctcgtctctccatctctcatgcgttcccaacttccaactccaatgccgtctccgctggctgatcagtgatcacctctgaccctctctggtgatgtgtacccattgttaatctctccaatgaagctaccctgcctgaccaggcccacaggctgtctcctgcatacggtggcaacacaccaacactgctggcctgccctaagacacatcttcgcgttgcgtccactggatacctgctttcttagtcagcagcatgccgaaaccctccatttgtgaaacctcagcggtgataggcggtggttgtcgaacgctggcatgaaggtgtgagctcccaactgctgaatcgtgttcctcttttacatgcacgtgtccaacaagaaccaagaaccgagattagcgctacctcagtacactgccggtgcaagataaacgaaggaagctgggattgcatggcactgcggtctgttatgtagccgtggaacagcaagacaaaaagacatggatattccttgtttggattggggtgtttgatccagaaacagtctcattgctaattgtttcattattactacaaatcttggtcgaggcgtgaatatccttgctcttgatataattatagtattttgaatccctattgtgttttttacttaagtgataaatgttgcaaagaaaccattagataattgttgaatgattagttattgattacattgattgattttgatttaatgaatcttaaataaaccagaagattcatgtgtatgaatatttgtgttgggaatttcttggtcacatgttttccgcataataatatcataaaactgtggaa

SEQ ID NO: 51365 - DNA, 1112 bp, Zea Mays
cgggaggatgcgaaggtccctagaaaggaaaatcgtgatttggaaaggaaattcatcaacaaacctgagtcggaaggatgcttaggaagcgggattcaatcaattatttctggggtggtctacagccaatgcatagtctctatctgtgtgtgtgttttgtgtttcccgtgcactctattcctttcgagaggcactctatgtcaggtgcctgaaatatggtttagcttcaggcaatgaagtggacgtcggatggagatccgagtgtccacgatgacagagaccgggttttgaatctctcgtctctccatctctcatgcgttcccaacttccaactccaatgccgtctccgctggctgatcagtgatcacctctgaccctctctggtgatgtgtacccattgttaatctctccaatgaagctaccctgcctgaccaggcccacaggctgtctcctgcatacggtggcaacacaccaacactgctggcctgccctaagacacatcttcgcgttgcgtccactggatacctgctttcttagtcagcagcatgccgaaaccctccatttgtgaaacctcaggcggtggttgtcgaacgctggcatgaaggtgtgagctcccaactgctgaatcgtgttcctcttttacatgcacgtgtccaacaagaaccaagaaccgagattagcgctacctcagtacactgccggtgcaagataaacgaaggaagctgggattgcatggcactgcggtctgttatgtagccgtggaacagcaagacaaaaagacatggatattccttgtttggattggggtgtttgatccagaaacagtctcattgctaattgtttcattattactacaaatcttggtcgaggcgtgaatatccttgctcttgatataattatagtattttgaatccctattgtgttttttacttaagtgataaatgttgcaaagaaaccattagataattgttgaatgattagttattgattacattgattgattttgatttaatgaatcttaaataaaccagaagattcatgtgtatgaatatttgtgttgggaatttcttggtcacatgttttccgcataataatatcataaaactgtggaa

SEQ ID NO: 51366 - DNA, 1994 bp, Zea Mays
ttccaatctgattctctaaactttggaggtctcttacacctaggcctgaaagctcctctcccattagttgcctacaacattggaaaagagtttctcacattatcttagaatccattgcaagatcatacttgtggctttcttgcaagttgtgcagttgttgcctcaagcttgctgcctccctttgccagagctatcggtaaaacaggaagtactgtcagtttccgagctacaaacaagctataagtttagaaaaataatttagaaatgtacaacaaagtctagtaatacattgttaaagataaatcaatactcaataagttcctcatgctttggatttggggataacatacctgttttatttacatgctaatatttggaccaacaaaaaataccttaggaacagccatttgagaaaaaaacaaagccttttagtcctaagcaagttagcatagcttagagttgcaacttctacatgagcacaataaacagaaaagaaagagaaaaggaaaataaatatatatggcaccaaaagctattaccatgttataatataaatttaatgaccgaaattataaacatttttacaatcttagcaaacctctcaacgtgtagtctgaatcgacagaacatcagtagagtaatttttgttacatttatagtccccaatgtcgtttcaaggcaaagtttgtttggtttctctgttttcctaaacactggcttctcaattgcattctcaatgtgcatctgtactagtttgacatctgtggctattgtgattcttcctggaatatcatctgtccatcacctttaaagcataacattaccctgatggccatgtgatctgtaggtccctagaaaggaaaatcgtgatttggaaaggaaattcatcaacaaacctgagtcggaaggatgcttaggaagcgggtactccctatgttccagattatagttcatttagatttgatgattcaatcaattatttctggggtggtctacagccaatgcatagtctctatctgtgtgtgtgttttgtgtttcccgtgcactctattcctttcgagaggcactctatgtcaggtgcctgaaatatggtttagcttcaggcaatgaagtggacgtcggatggagatccgagtgtccacgatgacagagaccgggttttgaatctctcgtctctccatctctcatgcgttcccaacttccaactccaatgccgtctccgctggctgatcagtgatcacctctgaccctctctggtgatgtgtacccattgttaatctctccaatgaagctaccctgcctgaccaggcccacaggctgtctcctgcatacggtggcaacacaccaacactgctggcctgccctaagacacatcttcgcgttgcgtccactggatacctgctttcttagtcagcagcatgccgaaaccctccatttgtgaaacctcagcggtgataggcggtggttgtcgaacgctggcatgaaggtgtgagctcccaactgctgaatcgtgttcctcttttacatgcacgtgtccaacaagaaccaagaaccgagattagcgctacctcagtacactgccggtgcaagataaacgaaggaagctgggattgcatggcactgcggtctgttatgtagccgtggaacagcaagacaaaaagacatggatattccttgtttggattggggtgtttgatccagaaacagtctcattgctaattgtttcattattactacaaatcttggtcgaggcgtgaatatccttgctcttgatataattatagtattttgaatccctattgtgttttttacttaagtgataaatgttgcaaagaaaccattagataattgttgaatgattagttattgattacattgattgattttgatttaatgaatcttaaataaaccagaagattcatgtgtatgaatatttgtgttgggaatttcttggtcacatgttttccgcataataatatcataaaactgtggaa

SEQ ID NO: 51367 - DNA, 1219 bp, Zea Mays
ctacaacattggaaaagagtttctcacattatcttagaatccattgcaagatcatacttgtggctttcttgcaagttgtgcagttgttgcctcaagcttgctgcctccctttgccagagctatcggtccctagaaaggaaaatcgtgatttggaaaggaaattcatcaacaaacctgagtcggaaggatgcttaggaagcgggattcaatcaattatttctggggtggtctacagccaatgcatagtctctatctgtgtgtgtgttttgtgtttcccgtgcactctattcctttcgagaggcactctatgtcaggtgcctgaaatatggtttagcttcaggcaatgaagtggacgtcggatggagatccgagtgtccacgatgacagagaccgggttttgaatctctcgtctctccatctctcatgcgttcccaacttccaactccaatgccgtctccgctggctgatcagtgatcacctctgaccctctctggtgatgtgtacccattgttaatctctccaatgaagctaccctgcctgaccaggcccacaggctgtctcctgcatacggtggcaacacaccaacactgctggcctgccctaagacacatcttcgcgttgcgtccactggatacctgctttcttagtcagcagcatgccgaaaccctccatttgtgaaacctcagcggtgataggcggtggttgtcgaacgctggcatgaaggtgtgagctcccaactgctgaatcgtgttcctcttttacatgcacgtgtccaacaagaaccaagcgctacctcagtacactgccggtgcaagataaacgaaggaagctgggattgcatggcactgcggtctgttatgtagccgtggaacagcaagacaaaaagacatggatattccttgtttggattggggtgtttgatccagaaacagtctcattgctaattgtttcattattactacaaatcttggtcgaggcgtgaatatccttgctcttgatataattatagtattttgaatccctattgtgttttttacttaagtgataaatgttgcaaagaaaccattagataattgttgaatgattagttattgattacattgattgattttgatttaatgaatcttaaataaaccagaagattcatgtgtatgaatatttgtgttgggaatttcttggtcacatgttttccgcataataatatcataaaactgtggaa

SEQ ID NO: 51368 - DNA, 1598 bp, Zea Mays
cctgaggtgaaaagatgtaagtgaacagatgggcaggcagtttgaggcgcttccatgaacaatttggcgctctcgatgctctcgccgtcgacctcaggtttcccgccaagccccctaccctccaaggccgccacgaacgccacagctccccgatgccgcgccgcgccctcgggcgacgcctcgctgtgcgccttccgcgcgcaccacagcgccggccacgccctccacactaacccggctctgatgcccgcgctcgccgcctgcgcgcggctgccctccgccgtggccgaggccgagcagatccacgcactcctcgtcaagtcaggcggctcgcgggctgtctcccacgtccaagccttcacgtccctgattcgcgcctacgcgaggctcggccgcgtgtgcgacgcgcggaaggtgttcgatggaatggccgaccggacggtggtcacctggaacgtgctgcttgatgcgcttatcagagatggcgacttggacgctgcgtgggaggtgtttgtgaaaatgccgcagcgcaatgcggtttcttggaacaccataatttctggttttgcaaggaacgggtgggcgccggtggcagtggacttgtttatcgagatgactgtggcttatggtttagcgccagatgaggccacgatggttggcttcgtgtcggctgttcgggacattggtctacttgcaattgggaagagcgcacacgggtatgttctccgtcgggagttctcacttgatggtcctctcggggttgcactggtcagtatgtacacgaggtgcgggagcatgggtgctgcacacagttgcttcttaagtgtcaccaccaagaatgtggagcattggacctctttgatcgcaggtttcgcagcacatggtcaaccagagaatgccttgaggttgttcgtcgagatgaggcaggtgggcattgagcctaatggtgtcaccttcgtagccgtcttgagtgcctgcagccatggcgggctcgtcgatgagggcttcaagtacttcgacctaatgaggagcatgggcatcaggccgatgatccagcactatggctgcttggttgatctccttggccgtgctgggttcttgaaggaggctttcaatcttgccagcaatctacctgaagatcctggttttgtaatctggagctcgctactagcagcctgccgtagccatggcaacgtcgagatggcagagctcactgcgtcgaagttggcagaggcaaaaccaagtcatggcagctcgtatgtgctgctatcgaacacatatgcacgagcggaacaatgggaggactcgaagaggacgcggaggaggatggaggaacatagagtagccaagaaacctgggctcagctggatagagatagatggaagcgtacattcctttgccactgcagacaagctgcatatagaaagcgagggtatttatcatatgttggaggatttgaaacataattttacatcagctgcatatgaacctgaaccgttcgctatttctgaacaattgtaataaatttctttggaggaagattatcacttgttaataaaaaatccatcatatcataaatattaaatatatattcaaac

SEQ ID NO: 51369 - DNA, 3646 bp, Zea Mays
tggtttgaggaatgacgtagtccatcatcttctctcttcgcacttttttgtttggtttgtggaatggagtgagttaatccatcaccacctcattccacatagttagttgtttagtactaatatatggaatggagtcatcccaccaaattttagaaatggacccatgatgcatcactttattttggatagagtgattcatcaaaccaaacacctcattactgtctgggcgatttatacaagctctcttagaagcatggacattcaagtcgccagatgcacccaaggcatgctaggtacaagttcaatgagagtaataaagtgtaagagaatcaaatgtaccaaattaagtcctccaaggattaataacaaattggaatatggatggcgtcatcttattattgaccatgccatagaaattgatagagggagaagtccttcatacaatagtgattggagatatggttacatatatgggctggtaggctagggttacaatcctaaagggcctcttgggttaggctctaggcccaagacacactaacaatctagcacacccacggtcgaaactctagccacgacatatgttgagactagatcaaaactccgaaaacgtcgagaagggtaggcccttggtgaaaatgttagcacactgcaaagttgtcgaaacgtggactcaaacatcctcgatggtgacgtgctcatgaacgaagtggagatcaatctcgtcattcttcgtgcgcttgcgctgaacgaggttgatggagaggtagatcgcgtagtagacaatggtactcctggtgagcgggttgtggagctcctacaagacctggaagagctagcctcggccataccatttgccaccacatgatattcggcctcgatgctcgagcgggagaccataggctactacttcgacgactaggaagatgaggtgcccctaaggaacacgacatatctggaggtggacctacgcgtgtccaggtaactgcccagttagcatcagtgtgacgacgagctcggttggcgaggaacaacggagaagaaggtcatagtcaagagtaccttgaaggtaccgaagaatccgctttacattggtaaggtgtggctcccgtggatcatgtatgtggaggcacacatgttgaatgacataagagatgtttggcctagtgaaggtaaggtactgaagggccccccccccccccacaagagggtaggcaatggggtcactgcctagagcactaaaccttcgcctaagcatccaagagcatcaccagtggtcgacgactgttcaccccgagctattgcttggctccataagctagcaagcaagagcatcaccagtggtacgctcttgctcctagacgagagcagcagcctgctcacactcccaagcaacagcaacaacaacgacagacttgatggtggtgatggcagcaacaatggcggagtgggtggcaagaatgtcatcgagggaaagtgacccgcagtggcaccgagtggggccaggacgacattgggttggataagagtggaatgagggggcctgtgacagggtaacgtggaagcaatcatgcctaggacgaccatgcccacgcccacgacggtagcagccaaggcggtgcgtgcctcggcagcactcacgcctgtggaggtcacacacacggtagtgtctaggctgacgactacagtgaggacgggcggcgtgctagccgcgtcggatgcccaagatgggcagcgcgctggccagagggagagacatgcgacaacaacatcagaggagaggggcatactgaccatggtgccggctgcgggggccgcaaaggagaaatttgtcaaaatgggtcgctctacgttgccgctctctaaaataggttatgtcttattgcacttgtcaaaataggtcggtctagtccaacatctttgccaaaataccccaaccaatatttataatgactgacaagtgggtcctatttaatgttatgaccaaattgccatcccctttctttctctcctgcctctcttcttgctcgattccagcaggctctggttcgctctgccgcttgaaatttcgtgaaaccttcctgattgggcagtctccctcgtcgtgtactcatcgcgaagcagctccccctcctgtcggtctcccgtgctagctagctggtgtcaggaataagaagtatgttcattatgggatttgaaaatgacacatgatccaggtacaatctgttgctgcacccggcacttgtgctctcaatgaagaccccacgatcaatgaaaatcatcagggtgagtgagtgagtggtatactaattaagtaattaggaagagcttagctatgcaagtgtcaaggcatgcagtaggattcctcttgatcgagttcctagatcttctcctgccgatggctgaaacggctagcctttggtgattgttctagaaacgacgtacatgctatgtgtaggtacttcctcgttgagtgcagcctcgtgttcgtggtggcgttcctcatcaaggtcatcgtcaccgggtccatctgcaatgcggacaacctcttctcggacgacgcagacgcgtgtggctacctcactcagcagtcgtcgtcttggcgctcacggccgcctacctcgtcttcgtcgtctacctggcgtttagtatgggtatttcggacatatccatggaagggacccactagtgagacgtaaaaaatatcaggtgacctattttgacaaacatcctgcactcaaacaggcctttttttacaagtgccacgagatccgacttttttgaagagaaccaactgagagggacccaatttgacaaatttctcgctgcagggctctaggagagaacctgttagagggacaaatctttcatacaaagtgattggagacagggttacatatatgggtcgtagtctaaggttacaaccctaatgggcctcttgggctgggctttaggcccaagacatactaacagtctaacataaatggacctcacaaaggaccaacaaaagaatacaatgttgtgtaggggaataaataggattttagttttggcctatgataaaaaaaatatagaaccttgcttgttccaggcttgtagaaactgactggttttcaacttagttcataagaattgcttatggttgactaatccaaattttcaaatcattcactctagatatcttgttaaaatggaaaacaaggccaaacctaggcacaagattggtatagcaacattggtggtttcatgtatggaaatgcaccaataaaggtcttggacaggaagaaaataattttggctgccaatgatgcacatagaatgatgggaatgggacttaagataacggcgttaagaaatgagtgggtattaatcataatcagaagaaatgagaacaaacctttgtaatttttgttgtctgatccaaagttcgtatcgggttgaacagataacactccaggaacatctgatatacaaagttaatttgtcaatggcttagtgcattcaaagacatggatttgtcataactctatacaaaggggtatgaaagcccaagttgctcaccagctaactcttttgcgcattcttcatcaatatgacaacagaaaccataatccctatcccatgaaacgtgatatatactaacctg

SEQ ID NO: 51370 - DNA, 1267 bp, Zea Mays
gaacgcacgagcctgctaaacctcctgccctagtctcctctctgtctcacagcacagcccctgctttccccccaccgtcccacggccgccacgccgccacgcttcttcttccctttcccgtccaacctccaaccctgccggctgccgcggcggcggattaacacaataccttggcgagagacgtaatagtttctgaactcaccgcgctacgcccgatgtcggagacggcggcgccgatcggcctgtcatgggctcccaagcttccttcctttgcaacgaccagcggcggcagcaagatcgaccacgcgccggatccgagcaccgcgcagggctcgctctggaagcgcacgagcgagctcgtggacgggctgttcgtgcccccgagggaccctaggcagctgaataagctggctaggaagaacgtcaaggacaccgccggcaagggctggttcgacatgcccgcgccgaccatcactcccgagttgaagaaggatctcgagattttgcagctgcccttggatcagtgtgtaggagactagtagggcgaacatggagagcagtttactgcaaccatctgacagtctgaggcatgtaattgacccaaaaaggcacttcaagcgggcaggaaagtccaaggcccttcccaagtacttccaagttggtacggttgttgagcctgcatctgagttctactcaagtaggctgaaaaatagggaacgcaaggcaacattggtggacgagctgctatcagatcaatctcttaagagctacaggatgcgcaaggtacgggaaattcaggagatccgtacaccaggaggcaaccaaaagtggaagaacaagggcaagaaaacactgaagagggcgaaggataggagaaaatgagactggtgcgcccagctttgtgctccagttgtgagggaaccaaggaacgccttcaagtcgctctagtgcttttctctcaactttgcagtatagattctggttccagtgtagtgttgtggacttcatgatgaattgatttgtatttctataaattttataatattgctgtaacagcggaattcagaaatatgagttggtagactctttcaagttagctagcttcatatatgggagaagcactgtctcagctcatttttcttgctgtgctgtgtctgcttatgatcatatctacagtttcatctttcttttgcttttgagagcccatctgggacagagatgttgcatgagaatgttttcaatcggaatttttattaccaaatgtttt

SEQ ID NO: 51371 - DNA, 1330 bp, Zea Mays
aaacctcctgccctagtctcctctctgtctcacagcacagcccctgctttccccccaccgtcccacggccgccacgccgccacgcttcttcttccctttcccgtccaacctccaaccctgccggctgccgcggcggcggattaacacaataccttggcgagagacgtaatagtttctgaactcaccgcgctacgcccgatgtcggagacggcggcgccgatcggcctgtcatgggctcccaagcttccttcctttgcaacgaccagcggcggcagcaagatcgaccacgcgccggatccgagcaccgcgcagggctcgctctggaagcgcacgagcgagctcgtggacgggctgttcgtgcccccgagggaccctaggcagctgaataagctggctaggaagaacgtcaaggacaccgccggcaagggctggttcgacatgcccgcgccgaccatcactcccgagttgaagaaggatctcgagattttgcagctgcccttggatcagtgtgtaggagactagtagggcgaacatggagagcagtttactgcaaccatctgacagtgtaaccatctgatcgaagctcttttacttttgcaagaaagaactggaattgttttacttgagattcaagcagtgttagatctgaggcatgtaattgacccaaaaaggcacttcaagcgggcaggaaagtccaaggcccttcccaagtacttccaagttggtacggttgttgagcctgcatctgagttctactcaagtaggctgaaaaatagggaacgcaaggcaacattggtggacgagctgctatcagatcaatctcttaagagctacaggatgcgcaaggtacgggaaattcaggagatccgtacaccaggaggcaaccaaaagtggaagaacaagggcaagaaaacactgaagagggcgaaggataggagaaaatgagactggtgcgcccagctttgtgctccagttgtgagggaaccaaggaacgccttcaagtcgctctagtgcttttctctcaactttgcagtatagattctggttccagtgtagtgttgtggacttcatgatgaattgatttgtatttctataaattttataatattgctgtaacagcggaattcagaaatatgagttggtagactctttcaagttagctagcttcatatatgggagaagcactgtctcagctcatttttcttgctgtgctgtgtctgcttatgatcatatctacagtttcatctttcttttgcttttgagagcccatctgggacagagatgttgcatgagaatgttttcaatcggaatttttattaccaaatgtttt

SEQ ID NO: 51372 - DNA, 2864 bp, Zea Mays
acccctctccctccttcccgttcggccggcctctacctcacccgccgcccgccccatttattaagcgcaccctctcctcccccgcctgccgtcgcgcacacctcagtctcctgccgtgcgtagtgtgtacgggccaggcggcagagctagctttcactacactcagtggccattgccgttgctagctttcactagctcttagctgcaatgtcggcggcggcgtcgcagagcagtgtcaaggcaatggcggcggccgcagccgctgtggcaatgctgctctcggccgcggcggcggtggccgcgcagcacgattacggcgacgccctgcacaagtgcatcctcttcttcgaggggcagcgctcggggaggctcccgccggaccagcgcctccgctggcgccgcgactccggcctccacgacggcgccgcggccggggtggatctgaccggagggtactacgacgccggcgacaacgtgaagttcgggttcccgatggcgttcacggcgacgctcatgtcgtggggcctgatcgacttcgggcgcagcttcggcccccacagggaggaggcccggaaggcggtgcggtgggcgacggactacctgatgaaggcgacggcgaagcggaacacggtgtacgtgcaggtgggcgacgcgttccgcgaccacgcgtgctgggagcggcccgaggacatggacaccccgcgcaccgtgtacaaggtggacccgtcccacccgggctccgacgtcgccgccgagaccgccgccgcgctcgccgccggctccatcgtcttccgcgacgccgaccccgcctactccaagcgcctcctcgaccgcgccgtcgccgtgttcgagttcgcggacaagtaccggggcccctacagcagcagcctccacgcggcggtgtgcccctgctactgcgactactccggataccaggacgagctgctgtggggcgcggcgtggctgcacaaggcgacgcggcggcgggagtaccgcgagtacatcaagaggaacgaggtggtgctcggcgccagcgacgccatcaacgagttcggctgggacaacaagcacgccggcatcaacgtcctcatctcaaaggtccatccatccatatcgcctcttggtctttttctgcgcaaacattagtcattgccttgccacgttaatgacttgttactacgcttaagtcagtactacggagacggagtgccgcaaatttgggctgttcgctgatgtcagaagcattggccacatccaaatcttttgctattattagaccgtcaccagcactggtcagcttggtgttaagaccggacagtatgcctttttattttggccgtttcttccatacctacgctgcaaaatctctgttgcgtaccgggcaacaggcgagagcacatggttggccacttggccttcgcccccatcgagggtgtcatcagcttttcggtgggctcggggcatgtcagcctccgcacgtccttgcctactttggcaatattatgttatcgaaacctcgaacacattattttatctcagcactagaatgtctagcggactttcggcatttttgcatcctttgctccaaacttatcttctataaactaaactttgaagctctacccactaaagctagtgaaagctattatagaattcagtactactactcatcagcctatttgtagattcagtactcatcgacttacccatcataggctatcactgttgttggggctgctgtagtaacatgcatgtctgctgcaatctcggtatcctcctaggcccttgtgcttcgcatgatgccgcacacgccgcacggtagagtagcagcaggggttcccagcgaagaagccttcttcacgggtgtactgaggttctgatggggaaggacgagtacttccagtccttccgtgtcaacgccgacaacttcatgtgcaccctcctccccggcatctccaatcacccccagatccagtactccccaggcgggctgctgttcaaggtcgggagcagcaacatgcagcacgtgacgcagctgtcgttcctcctgctggcctactccaactacctgagccacgccggcgggcgcgtctcgtgcggctcgtcgtcggcgtcgccggtgcagctccgccgcgtggccaagcggcaggtggactacatactgggcgacaacccgctgcggatgtcgtacatggtggggtacggcgcgcggttcccgcggcggatccaccaccgcgccagctcgctgccgtccgtggcggcgcacccggcgcggatcggctgcaaggccggcgccgcctactacaccagcccggcgcccaacccgaacctgctcgtgggcgccgtcgtgggcgggcccaccgacgactccgacgccttccccgacgcgcgcgccgtgttccagcagtccgagcccaccacgtacatcaacgcgccgctcatgggcctcctcgcctacttctcggcacatcccaacccagccgagtcgggcggcgactgaaaaaagcctagggagagtgatagatgacgaacgcacgcacgggcctgggtattttagatgggctttggtttgtcttgttcgggcccgattgttgcctggtgtatccgtacgagtagttgtaactagttaaccagagccactcccttgcctgcaaaagaaagaccagggaagaggaattagtaggctccaagattgtattagctgttaagattatatacgctagtagcaaggttaactgtgctacgtcgtctgcgtgacatgtttttgcaagtgcatgacgctttatgagtatgttatgtgactctctgtagctgcacactgacacaaaacgagctacgcacgaaaggagccgtaggtcacatgt

SEQ ID NO: 51373 - DNA, 937 bp, Zea Mays
atgtttagtacatgccaaaacttgtccagctaagctaaccttatttggcccggcgcgggagcccgtcctataactgaataacccgatcgaggcgcgcaaggcacacctccgattcaggacgagcggccggccagccagcgcgcgagaggacgtacggacgcacagctaggcggaggcgatggacggccgacgacgacggcaatggccgaggtcgcgctcgggagcggccgccgcgcgtctcctcctcctgctgctcctggcggtgtccttggaaggtgggcatggtgatcacggcgcggcggctgcgggcgtcgccccggcaggcggcaacggcatgacggagctgcagaagcacgtggcgttcttcgaccgcaaccacgacggcatcatcaccttcgacgagacctaccaaggacaattccaactcctcgcgcatggatatctacgtagagaacattcagaagggcaaacatggaagcgacacaggcgcctacgacgctcaaggaaggttcgttcccgcgaagctggacgagatgttcaccaagcacgccaagaccgtaccgaacgccctgacgaaagacgagctcgacgagatgctcaaggataaccgggagaagatggacgtcgcaggatggctgggagccaagtcggagtgggagatgctgtacaagctggccaaggacaaggacggccgcctgcccaaggacaccgtcagggccgtgtacgacggatccctcttttaccagctggcggcgcaggcgaagaagggctgattcgtttacgttaatttcagtaatcaataacaagcaacgtttttttttttgtcgtttctgaatgcttgcctgtgtggctgtgtaagaaagcgagtgggtcggactcaatggcaggcaacggttttgttttttttattattattttaacggatcggttctactaa

SEQ ID NO: 51374 - DNA, 1218 bp, Zea Mays
gatcgaaccgtttggctggtggggcgcgagcgcgaggtgacgacggcgacgcttcagttgagtgcgggtgtagtgctcctgcgacttcggcctgtccactttttagggggtgccgaggggcgtgggggtacggccgtccgcacaataatctgcgctgcgcggaagaagggaaggggaaaagcagttaagcttgagcgcgcgcgacagggtcaagtcgagggccggggaatcgccggagaatggaggtgggcagggctccgcgacgacgggtgtccccagcggcggcggcggcggctgtgccttcgctgcttctgttcgccgttctattcggcgccggcgcgacggcgctgtacaagcacgcgtcgttcttcgaccgcgatggcgacggcgtcgtctccttctcggagacgtacggcgcgtttcgggcactcgggtttggattcggcctgtccagcgtcagcgctgccctcatcaatggcgcccttggtagcaagtgcagacctcaaaatgcaacgtcatcgaagttggatatctacatagaggacatccagaaagggaaacatggaagcgattcagggtcatacgacgccgaaggaaggtttgttcctgacaagttcgaagagatattcgccaagcacgccaagactgtcccagacgccctgacgtcggacgagatcgaccagctgctgcaggcgaacagagagcccggggactacagcggatgggctggcgctgaagcggagtggaagaccctctacagcctcggcaaggacaaggacggcctcctccgcaaggacgtcgcgagaagcgtctacgacgggacactgttccacatgctcgcgcccaactggaaatctcccgacgaggaggaggaacaggaactaagcgtgatccgggagagctgaaccgagaggtacaagcaaagtctggttgagagataaggactctgggaccctctgaacatgctgtcaagcaacatgtactactagcggtgtgaacgggtggtgtgaacactcttttcatatcacatcataaaaaaaggtgtgaacagatatttcaatgtacattatcataaaataagataaattcataattcaaataaaaatattctgtgtcttaccaaaacaaacgagatacaaaacaactaaaagaaattaagggatgccggggctcggatgggtacacggctggttagtgcttgtcgccggcgaaaggcat

SEQ ID NO: 51375 - DNA, 753 bp, Zea Mays
cagactgtgacaacacaggcctgctgtttgctggctagcaaaatgcaacgtcatcgaagttggatatctacatagaggacatccagaaagggaaacatggaagcgattcagggtcatacgacgccgaaggaaggtttgttcctgacaagttcgaagagatattcgccaagcacgccaagactgtcccagacgccctgacgtcggacgagatcgaccagctgctgcaggcgaacagagagcccggggactacagcggatgggctggcgctgaagcggagtggaagaccctctacagcctcggcaaggacaaggacggcctcctccgcaaggacgtcgcgagaagcgtctacgacgggacactgttccacatgctcgcgcccaactggaaatctcccgacgaggaggaggaacaggaactaagcgtgatccgggagagctgaaccgagaggtacaagcaaagtctggttgagagataaggactctgggaccctctgaacatgctgtcaagcaacatgtactactagcggtgtgaacgggtggtgtgaacactcttttcatatcacatcataaaaaaaggtgtgaacagatatttcaatgtacattatcataaaataagataaattcataattcaaataaaaatattctgtgtcttaccaaaacaaacgagatacaaaacaactaaaagaaattaagggatgccggggctcggatgggtacacggctggttagtgcttgtcgccggcgaaaggcat

SEQ ID NO: 51376 - DNA, 3869 bp, Zea Mays
caatggtccaatagaacagacgttggtccacatttgcaatcgatgccctcgagccgccacgcagtcgggttgacagttctactactctccacgacttgacgcgagggcgaggcccttcttcggcggctctccgcacggcgctggacaagaaggtggaggaggtttggtttccctcgtggccccgtcgccacctcgccaaggctagggacggaacggaacgccgcccagaggctcctctgcctactcgaaggcctgggaggcaagggatcatcgatacaccatcctgagccaagagccctctgttgcctgatgtgcgcgctttcataagctcctagtttgactccaaagttggaaattgctggcagcttcagccaagtggtagttgattggaagctgaactgttggttcatgtaacagtagattgcaacgcgggttgcaagttcacggaccaacaagcagttacttagctattgggagttcatttgactcttctgcgataacacagtgagagatggacgggttcatggcaagtgcagcgacaggggtgatgagctcccttctcgccaagctcgctgagctgcttggggaggactacaagatgcagaggggcatgaggcgcgagatcgcgttcctcaaggatgagctgggcagcatgaacgcgctgctggagaggctagccggctcggaggcgctcgatccgcagaccaaggagtggagggaccaggtgagggagatgagctacgacatcgaggactgtgtcgatggttacatgcgtcagctgcagcacgagccgcagaggaacagtggaatcacgggattcttccttgggtatgtgcagaaggtgaaggatctcgttacccgtcacgagattgccgagcagattcaggagctcaaggctcggatcgttgaggctagccacagaaggaagaggtacaagattgatgacacagctaattctggtgccgccaatgtgatccctgtggaccgtcggttgccagcgctctatgcagaattgggtagccttgttggtagcgatgttcctagagatgagattatcaagctacttgatgatggggcgctggccgtaaaggtggtgtctattgtgggctgtggaggactgggaaagactactgtcgtgaatcaggtttacataaacatcgccgagaaatttgattgccaagcctctgtgtccttgtcccaaaatcctgatatggtgaacatattccggtcgatactgtctcaagtcaagaaagatgagtgtggtagcaccagctcatgtgacaaggaacttctcatcaatgaattgagggatttccttaaggacaagaggtattttattgtaattgatgacatatggagtacccaagcatggaagacaattaaatttgctttggttgagaatacttgcggcagtagagtaatagtgacaacaagaattggtactattgccaaatcttgttcatccccattccatcatctcgtatatgaattgaggatgctaggtgaagatgactccaaaaggctattctttagaagaatttttggctctgaggacaagtgccctcaccatttaaaagaggtttcagttgaaataattaagaagtgtggtggtttaccattggcaatcattactatggctagtttgttgactactaaatcatataccagagctgactggttgaaggtttctaattcaattggatctgggctagagaaaaattgtgatgtggaggaaatgaacatgatattatctctgagttacaatcaccttcctcatcatttaaagacttgtttattgtatctaagtatgtttcctgaagattatgtgatcaagagggattatttggtaagaaggtgggtagcagaaggatttgttagtgcacatggtagaagaaatctggacgatgaaggcgaatgctattttaatgaacttatcaacagaagcttaatacaaccggtagattttcagtatgatggtagagtatatgcatgccgggttcatgatatgattcttgatctgattacatgcaaggctgttgaagaaaatttcataactgttgttactaatagaaaacaaatgttgccctcacatggcaaggtccaccgactgtcacttgagtaccatggtcttgaaaccttaagaacaaatcccatttttactactcatgttcggtccctgaacatatttagatactctgaagaaatgcttcctctttcaggcttgcactccctaagagtgcttgatctagatggcaatgagaatttggaaagctgttaccttgaagatatagggaagttatatcagttgcgatacctacggattaaggcaagtaatattacacttctggaaaggatagaagagcttcagtgtttggtaatactggatcttctgaattgccctaatctaggtgaattgcctagaagtattgttcaacttcggaacttgaaatggttaactgttcatcgagcgaacttgccagatggagttgggaacatgcaagcgctagagtttctttcacttgtagttgtggactacactacctcaacaaacttattggaagagctgggcagcttgaccaaattgagaactcttaggttggattggcgcatcaaccccctgcacagggataaaaaaacatatgagggtaattttgtttcttcacttggcaaactaggcagttcaaacctttcgatacctaacactcatcagtccatggtcactcgacttcctgttggaaccttggtccccaactccacatttccttcaggagttagtgatcaaaggatggcatctcaacaatattccagtctggatggcctcgctaaccaacctcacctacctggacgttgaggttaaagttagacaagaaactctccagatcctcggagatttccctgccttacaattcctgaaggtgtcctcaaatgcagcaggatctgaggcaatgtgccttgtcgtcagcaacgatggattccgatgtctgaagaagttcagtttcgttggctgggtaaacatgatgttcaaagaaggagctgttccagcgcttgaaactcttgagtttcaaatcatagcgcacgagatgcatactgcacgcagatttggtcctcctgatttcggcatcagccacctctccaccctcaggaatctcgtcgtcaatgttcactgtgaaggttcaagggttaaagaggtggaggcagtagaggctgctatccagaagtcagccagtacgcttcctaattatcccacactaggtttgcacagatttctcgagtcagaactggtaaaagaatgacgttaatggagaagcggcagagccatgagggaggacaagaaacagctaataagccttgtctagttctgctcccaagtgccttaagctactcctttttcccgacgaatacgcgcagatgctagaggcctggtgctatcactatatcacaggaagtaacctgagcatcttggttccgccttggtgctactatctacctatcgggcatcatcagcaaactctatggtacatcatagtaagggtcacaaaaaaaaaaacatgctgaggattggaggaatcttttgacatgaaaagcaagacatagcaggttatacatacatagatgcgcacaggtgctctatctgaatcagatgcccttgctgaacaggagcagcagccacccattgtatctctagaatgaaatgcttactacaggctatcctctagctgacgttaaaaaccaaagtcccgttgttcatatccctacaaagagaaaccctgtgctggtgcaaggacaggaaatcgtgtgataaatacaaatggtgtggaaagagcttaacaatgcaacaatatctatgtagcactagcaccataatggag

SEQ ID NO: 51377 - DNA, 4442 bp, Zea Mays
cacatttgcaatcgatgccctcgagccgccacgcagtcgggttgacagttctactactctccacgacttgacgcgagggcgaggcccttcttcggcggctctccgcacggcgctggacaagaaggtggaggaggtttggtttccctcgtggccccgtcgccacctcgccaaggctagggacggaacggaacgccgcccagaggctcctctgcctactcgaaggcctgggaggcaagggatcatcgatacaccatcctgagccaagagccctctgttgcctgatgtgcgcgctttcataagctcctagtttgactccaaagttggaaattgctggcagcttcagccaagtggtagttgattggaagctgaactgttggttcatgtaacagtagattgcaacgcgggttgcaagttcacggaccaacaagcagttacttagctattgggagttcatttgactcttctgcgataacacagtgagagatggacgggttcatggcaagtgcagcgacaggggtgatgagctcccttctcgccaagctcgctgagctgcttggggaggactacaagatgcagaggggcatgaggcgcgagatcgcgttcctcaaggatgagctgggcagcatgaacgcgctgctggagaggctagccggctcggaggcgctcgatccgcagaccaaggagtggagggaccaggtgagggagatgagctacgacatcgaggactgtgtcgatggttacatgcgtcagctgcagcacgagccgcagaggaacagtggaatcacgggattcttccttgggtatgtgcagaaggtgaaggatctcgttacccgtcacgagattgccgagcagattcaggagctcaaggctcggatcgttgaggctagccacagaaggaagaggtacaagattgatgacacagctaattctggtgccgccaatgtgatccctgtggaccgtcggttgccagcgctctatgcagaattgggtagccttgttggtagcgatgttcctagagatgagattatcaagctacttgatgatggggcgctggccgtaaaggtggtgtctattgtgggctgtggaggactgggaaagactactgtcgtgaatcaggtttacataaacatcgccgagaaatttgattgccaagcctctgtgtccttgtcccaaaatcctgatatggtgaacatattccggtcgatactgtctcaagtcaagaaagatgagtgtggtagcaccagctcatgtgacaaggaacttctcatcaatgaattgagggatttccttaaggacaagaggtatcttaaatttatccaccttttagagtaattattttcgttattatgtcacaaactgaatactaacccacacatcaattttttttatattctcctaaaatcaatatctgtcttaacaggaattcagtgacaacagacactagaaaattaacttctccataacattattacattaggactcttaaatttaaaggtggagatatgaggcttttctcacattttccacaatatagtgtgcatatatcaatttacaggtttcgattgaatcatagctctatttcatatttaggtattttattgtaattgatgacatatggagtacccaagcatggaagacaattaaatttgctttggttgagaatacttgcggcagtagagtaatagtgacaacaagaattggtactattgccaaatcttgttcatccccattccatcatctcgtatatgaattgaggatgctaggtgaagatgactccaaaaggctattctttagaagaatttttggctctgaggacaagtgccctcaccatttaaaagaggtttcagttgaaataattaagaagtgtggtggtttaccattggcaatcattactatggctagtttgttgactactaaatcatataccagagctgactggttgaaggtttctaattcaattggatctgggctagagaaaaattgtgatgtggaggaaatgaacatgatattatctctgagttacaatcaccttcctcatcatttaaagacttgtttattgtatctaagtatgtttcctgaagattatgtgatcaagagggattatttggtaagaaggtgggtagcagaaggatttgttagtgcacatggtagaagaaatctggacgatgaaggcgaatgctattttaatgaacttatcaacagaagcttaatacaaccggtagattttcagtatgatggtagagtatatgcatgccgggttcatgatatgattcttgatctgattacatgcaaggctgttgaagaaaatttcataactgttgttactaatagaaaacaaatgttgccctcacatggcaaggtccaccgactgtcacttgagtaccatggtcttgaaaccttaagaacaaatcccatttttactactcatgttcggtccctgaacatatttagatactctgaagaaatgcttcctctttcaggcttgcactccctaagagtgcttgatctagatggcaatgagaatttggaaagctgttaccttgaagatatagggaagttatatcagttgcgatacctacggattaaggcaagtaatattacacttctggaaaggatagaagagcttcagtgtttggtaatactggatcttctgaattgccctaatctaggtgaattgcctagaagtattgttcaacttcggaacttgaaatggttaactgttcatcgagcgaacttgccagatggagttgggaacatgcaagcgctagagtttctttcacttgtagttgtggactacactacctcaacaaacttattggaagagctgggcagcttgaccaaattgagaactcttaggttggattggcgcatcaaccccctgcacagggataaaaaaacatatgagggtaattttgtttcttcacttggcaaactaggcagttcaaacctttcgatacctaacactcatcagtccatggtcactcgacttcctgttggaaccttggtccccaactccacatttccttcaggagttagtgatcaaaggatggcatctcaacaatattccagtctggatggcctcgctaaccaacctcacctacctggacgttgaggttaaagttagacaagaaactctccagatcctcggagatttccctgccttacaattcctgaaggtgtcctcaaatgcagcaggatctgaggcaatgtgccttgtcgtcagcaacgatggattccgatgtctgaagaagttcagtttcgttggctgggtaaacatgatgttcaaagaaggagctgttccagcgcttgaaactcttgagtttcaaatcatagcgcacgagatgcatactgcacgcagatttggtcctcctgatttcggcatcagccacctctccaccctcaggaatctcgtcgtcaatgttcactgtgaaggttcaagggttaaagaggtggaggcagtagaggctgctatccagaagtcagccagtacgcttcctaattatcccacactaggtttgcacagatttctcgagtcagaactggtaaaagaatgacgttaatggagaagcggcagagccatgagggaggacaagaaacagctaataagccttgtctagttctgctcccaagtgccttaaggtatggactatggagtaatgagtacttagctctatttgcagttcttatgcaagtcattggttatataatatacccaggatttgttttttatgtactgccttcaatcttcatgatgcaacaaatgcccactgtctaaagcttgacgatttggggagtttacttcagggatgaatatgttccactatattatgaagcttcagtccataccaagttaattagtttatatttgacctagttgtatgtcatatatacagtataacttagtacttacaataccaacttaaaggctgaccgaacagtgctagttttcagctactcctttttcccgacgaatacgcgcagatgctagaggcctggtgctatcactatatcacaggaagtaacctgagcatcttggttccgccttggtgctactatctacctatcgggcatcatcagcaaactctatggtacatcatagtaagggtcacaaaaaaaaaaacatgctgaggattggaggaatcttttgacatgaaaagcaagacatagcaggttatacatacatagatgcgcacaggtgctctatctgaatcagatgcccttgctgaacaggagcagcagccacccattgtatctctagaatgaaatgcttactacaggctatcctctagctgacgttaaaaaccaaagtcccgttgttcatatccctacaaagagaaaccctgtgctggtgcaaggacaggaaatcgtgtgataaatacaaatggtgtggaaagagcttaacaatgcaacaatatctatgtagcactagcaccataatggag

SEQ ID NO: 51378 - DNA, 3263 bp, Zea Mays
cacatttgcaatcgatgccctcgagccgccacgcagtcgggttgacagttctactactctccacgacttgacgcgagggcgaggcccttcttcggcggctctccgcacggcgctggacaagaaggtggaggaggtttggtttccctcgtggccccgtcgccacctcgccaaggctagggacggaacggaacgccgcccagaggctcctctgcctactcgaaggcctgggaggcaagggatcatcgatacaccatcctgagccaagagccctctgttgcctgatgtgcgcgctttcataagctcctagtttgactccaaagttggaaattgctggcagcttcagccaagtggtagttgattggaagctgaactgttggttcatgtaacagtagattgcaacgcgggttgcaagttcacggaccaacaagcagttacttagctattgggagttcatttgactcttctgcgataacacagtgagagatggacgggttcatggcaagtgcagcgacaggggtgatgagctcccttctcgccaagctcgctgagctgcttggggaggactacaagatgcagaggggcatgaggcgcgagatcgcgttcctcaaggatgagctgggcagcatgaacgcgctgctggagaggctagccggctcggaggcgctcgatccgcagaccaaggagtggagggaccaggtgagggagatgagctacgacatcgaggactgtgtcgatggttacatgcgtcagctgcagcacgagccgcagaggaacagtggaatcacgggattcttccttgggtatgtgcagaaggtgaaggatctcgttacccgtcacgagattgccgagcagattcaggagctcaaggctcggatcgttgaggctagccacagaaggaagaggtacaagattgatgacacagctaattctggtgccgccaatgtgatccctgtggaccgtcggttgccagcgctctatgcagaattgggtagccttgttggtagcgatgttcctagagatgagattatcaagctacttgatgatggggcgctggccgtaaaggtggtgtctattgtgggctgtggaggactgggaaagactactgtcgtgaatcaggtttacataaacatcgccgagaaatttgattgccaagcctctgtgtccttgtcccaaaatcctgatatggtgaacatattccggtcgatactgtctcaagtcaagaaagatgagtgtggtagcaccagctcatgtgacaaggaacttctcatcaatgaattgagggatttccttaaggacaagaggcttgcactccctaagagtgcttgatctagatggcaatgagaatttggaaagctgttaccttgaagatatagggaagttatatcagttgcgatacctacggattaaggcaagtaatattacacttctggaaaggatagaagagcttcagtgtttggtaatactggatcttctgaattgccctaatctaggtgaattgcctagaagtattgttcaacttcggaacttgaaatggttaactgttcatcgagcgaacttgccagatggagttgggaacatgcaagcgctagagtttctttcacttgtagttgtggactacactacctcaacaaacttattggaagagctgggcagcttgaccaaattgagaactcttaggttggattggcgcatcaaccccctgcacagggataaaaaaacatatgagggtaattttgtttcttcacttggcaaactaggcagttcaaacctttcgatacctaacactcatcagtccatggtcactcgacttcctgttggaaccttggtccccaactccacatttccttcaggagttagtgatcaaaggatggcatctcaacaatattccagtctggatggcctcgctaaccaacctcacctacctggacgttgaggttaaagttagacaagaaactctccagatcctcggagatttccctgccttacaattcctgaaggtgtcctcaaatgcagcaggatctgaggcaatgtgccttgtcgtcagcaacgatggattccgatgtctgaagaagttcagtttcgttggctgggtaaacatgatgttcaaagaaggagctgttccagcgcttgaaactcttgagtttcaaatcatagcgcacgagatgcatactgcacgcagatttggtcctcctgatttcggcatcagccacctctccaccctcaggaatctcgtcgtcaatgttcactgtgaaggttcaagggttaaagaggtggaggcagtagaggctgctatccagaagtcagccagtacgcttcctaattatcccacactaggtttgcacagatttctcgagtcagaactggtaaaagaatgacgttaatggagaagcggcagagccatgagggaggacaagaaacagctaataagccttgtctagttctgctcccaagtgccttaaggtatggactatggagtaatgagtacttagctctatttgcagttcttatgcaagtcattggttatataatatacccaggatttgttttttatgtactgccttcaatcttcatgatgcaacaaatgcccactgtctaaagcttgacgatttggggagtttacttcagggatgaatatgttccactatattatgaagcttcagtccataccaagttaattagtttatatttgacctagttgtatgtcatatatacagtataacttagtacttacaataccaacttaaaggctgaccgaacagtgctagttttcagctactcctttttcccgacgaatacgcgcagatgctagaggcctggtgctatcactatatcacaggaagtaacctgagcatcttggttccgccttggtgctactatctacctatcgggcatcatcagcaaactctatggtacatcatagtaagggtcacaaaaaaaaaaacatgctgaggattggaggaatcttttgacatgaaaagcaagacatagcaggttatacatacatagatgcgcacaggtgctctatctgaatcagatgcccttgctgaacaggagcagcagccacccattgtatctctagaatgaaatgcttactacaggctatcctctagctgacgttaaaaaccaaagtcccgttgttcatatccctacaaagagaaaccctgtgctggtgcaaggacaggaaatcgtgtgataaatacaaatggtgtggaaagagcttaacaatgcaacaatatctatgtagcactagcaccataatggag

SEQ ID NO: 51379 - DNA, 4112 bp, Zea Mays
cctcgagccgccacgcagtcgggttgacagttctactactctccacgacttgacgcgagggcgaggcccttcttcggcggctctccgcacggcgctggacaagaaggtggaggaggtttggtttccctcgtggccccgtcgccacctcgccaaggctagggacggaacggaacgccgcccagaggctcctctgcctactcgaaggcctgggaggcaagggatcatcgatacaccatcctgagccaagagccctctgttgcctgatgtgcgcgctttcataagctcctagtttgactccaaagttggaaattgctggcagcttcagccaagtggtagttgattggaagctgaactgttggttcatgtaacagtagattgcaacgcgggttgcaagttcacggaccaacaagcagttacttagctattgggagttcatttgactcttctgcgataacacagtgagagatggacgggttcatggcaagtgcagcgacaggggtgatgagctcccttctcgccaagctcgctgagctgcttggggaggactacaagatgcagaggggcatgaggcgcgagatcgcgttcctcaaggatgagctgggcagcatgaacgcgctgctggagaggctagccggctcggaggcgctcgatccgcagaccaaggagtggagggaccaggtgagggagatgagctacgacatcgaggactgtgtcgatggttacatgcgtcagctgcagcacgagccgcagaggaacagtggaatcacgggattcttccttgggtatgtgcagaaggtgaaggatctcgttacccgtcacgagattgccgagcagattcaggagctcaaggctcggatcgttgaggctagccacagaaggaagaggtacaagattgatgacacagctaattctggtgccgccaatgtgatccctgtggaccgtcggttgccagcgctctatgcagaattgggtagccttgttggtagcgatgttcctagagatgagattatcaagctacttgatgatggggcgctggccgtaaaggtggtgtctattgtgggctgtggaggactgggaaagactactgtcgtgaatcaggtttacataaacatcgccgagaaatttgattgccaagcctctgtgtccttgtcccaaaatcctgatatggtgaacatattccggtcgatactgtctcaagtcaagaaagatgagtgtggtagcaccagctcatgtgacaaggaacttctcatcaatgaattgagggatttccttaaggacaagaggtatcttaaatttatccaccttttagagtaattattttcgttattatgtcacaaactgaatactaacccacacatcaattttttttatattctcctaaaatcaatatctgtcttaacaggaattcagtgacaacagacactagaaaattaacttctccataacattattacattaggactcttaaatttaaaggtggagatatgaggcttttctcacattttccacaatatagtgtgcatatatcaatttacaggtttcgattgaatcatagctctatttcatatttaggtattttattgtaattgatgacatatggagtacccaagcatggaagacaattaaatttgctttggttgagaatacttgcggcagtagagtaatagtgacaacaagaattggtactattgccaaatcttgttcatccccattccatcatctcgtatatgaattgaggatgctaggtgaagatgactccaaaaggctattctttagaagaatttttggctctgaggacaagtgccctcaccatttaaaagaggtttcagttgaaataattaagaagtgtggtggtttaccattggcaatcattactatggctagtttgttgactactaaatcatataccagagctgactggttgaaggtttctaattcaattggatctgggctagagaaaaattgtgatgtggaggaaatgaacatgatattatctctgagttacaatcaccttcctcatcatttaaagacttgtttattgtatctaagtatgtttcctgaagattatgtgatcaagagggattatttggtaagaaggtgggtagcagaaggatttgttagtgcacatggtagaagaaatctggacgatgaaggcgaatgctattttaatgaacttatcaacagaagcttaatacaaccggtagattttcagtatgatggtagagtatatgcatgccgggttcatgatatgattcttgatctgattacatgcaaggctgttgaagaaaatttcataactgttgttactaatagaaaacaaatgttgccctcacatggcaaggtccaccgactgtcacttgagtaccatggtcttgaaaccttaagaacaaatcccatttttactactcatgttcggtccctgaacatatttagatactctgaagaaatgcttcctctttcaggcttgcactccctaagagtgcttgatctagatggcaatgagaatttggaaagctgttaccttgaagatatagggaagttatatcagttgcgatacctacggattaaggcaagtaatattacacttctggaaaggatagaagagcttcagtgtttggtaatactggatcttctgaattgccctaatctaggtgaattgcctagaagtattgttcaacttcggaacttgaaatggttaactgttcatcgagcgaacttgccagatggagttgggaacatgcaagcgctagagtttctttcacttgtagttgtggactacactacctcaacaaacttattggaagagctgggcagcttgaccaaattgagaactcttaggttggattggcgcatcaaccccctgcacagggataaaaaaacatatgagggtaattttgtttcttcacttggcaaactaggcagttcaaacctttcgatacctaacactcatcagtccatggtcactcgacttcctgttggaaccttggtccccaactccacatttccttcaggagttagtgatcaaaggatggcatctcaacaatattccagtctggatggcctcgctaaccaacctcacctacctggacgttgaggttaaagttagacaagaaactctccagatcctcggagatttccctgccttacaattcctgaaggtgtcctcaaatgcagcaggatctgaggcaatgtgccttgtcgtcagcaacgatggattccgatgtctgaagaagttcagtttcgttggctgggtaaacatgatgttcaaagaaggagctgttccagcgcttgaaactcttgagtttcaaatcatagcgcacgagatgcatactgcacgcagatttggtcctcctgatttcggcatcagccacctctccaccctcaggaatctcgtcgtcaatgttcactgtgaaggttcaagggttaaagaggtggaggcagtagaggctgctatccagaagtcagccagtacgcttcctaattatcccacactaggtttgcacagatttctcgagtcagaactggtaaaagaatgacgttaatggagaagcggcagagccatgagggaggacaagaaacagctaataagccttgtctagttctgctcccaagtgccttaagctactcctttttcccgacgaatacgcgcagatgctagaggcctggtgctatcactatatcacaggaagtaacctgagcatcttggttccgccttggtgctactatctacctatcgggcatcatcagcaaactctatggtacatcatagtaagggtcacaaaaaaaaaaacatgctgaggattggaggaatcttttgacatgaaaagcaagacatagcaggttatacatacatagatgcgcacaggtgctctatctgaatcagatgcccttgctgaacaggagcagcagccacccattgtatctctagaatgaaatgcttactacaggctatcctctagctgacgttaaaaaccaaagtcccgttgttcatatccctacaaagagaaaccctgtgctggtgcaaggacaggaaatcgtgtgataaatacaaatggtgtggaaagagcttaacaatgcaacaatatctatgtagcactagcaccataatggag

SEQ ID NO: 51380 - DNA, 1091 bp, Zea Mays
gatgctaaaacctcttgtgctctcctcccactcccagtcccacaggctcccagcagctcgattcgctcgcctagtcgccttctcgaattctcccgcaaacttgacgctgaagcctgcacgagaggacatggccatggccacgcccacgcgtgtcacggcagcagcagtcgtcctccgggttctctcgttgctgatcctgctgcgcacgggcacgtgcgccgacgactactcggcgttcgtgtacgcggggtgctcgcagggccgctacagcgccgattcgcagtacgcgtcgggggtggactccgtgctcacctcggtcgccagcagcgcgccgtacgccccctacgacaacttcacctcgccgaccgactcgtccgtggtcggcctctaccagtgccgctccgacctccccgcctccgtctgcagcggctgcgtccgctccgccatctccaggctctcctctctctgcgcctgggcggtcggcggcgcggtgcagctgcgggcctgcttcgtgcgatacgggaacgactcgttcctggggaagcaggacacggcggtgctgttcaagaaatgcggcggcacgcccggggacgccggcggggtggccatgagggactcggcgctcggcgcgctcgtggccgcggcggcgccggcgggcggagggttccgcaccggagggtccggcgccgtgcaggccatgtcgcagtgcgtgggggacctcggcgccaagccctgctccgactgcgtctcggccgcggccgcacagctcaaggccgggtgcggttacgccacggccggcgaggtctacctcggcaagtgctacgcgcgcttctgggccaacggtggcggaggtttcagtagcagcagcagcagcgccggccggcatggatttcgtctagtccacgtggtcgccgccggtttattcttcccctccttggcttatgcctcacttgccatataggggcggagctagagtcatttgtgagtgtcatctgacactgatggatcttagaaaaccagtaaagcagtaaaatgtactgtcttgtctctgttctcgaatatttgtcgccggctagttcatttttgaacta

SEQ ID NO: 51381 - DNA, 2305 bp, Zea Mays
ctggagacagcctaaagctctccaggcgaaggttttgatgtgcttccaggtgcgttgtagtatctgcactgctgctgacatgttgagtcctgtactccgtcatatatgggcctacgatacgaaactgggccttgcgaagtttcccagcaagtgctagagagtgccaggcgacacggttcgctcggcggcggcgccatctggcagcttctgcaaaactgaagtgcccattccagccctcccgtagcgatcgacctctgaactacgcagcggaaaaatcccatcaaaaaacaaggggaaaaaacaacacagcatgaactgcttgaagaactcgcgttctgtcctctcgcgactccttcgccacaggccccacgtagcagcgccaccgccgccgacgccggcgacggcgccgcagtcaccggcttcacggtactactactacgcctcccgcgtcaagccagccgtctcccgaccgccgccgccgccccagttgccgagatctaggcactactacacatccccgcggcggcagcaggtcgtccacttcaaccgccgccgcggcgggtcccggtggtaccacgaccagcggaagctcacggcggcggtcttaatcagcggcggcggggcggtcgcgttctacttcggccatttggagaccgtgccctacaccaaccgctcccacctcgtcgtcctctcgccgaagttcgagcgccagctcggcgagtcccagtttgcccagctcaagaaggagttcgggcccaagatcctgccaccgctccaccccgacagcatccgtgtccgcctcatcgcctcggagatcgtccgcgccgtccaccgtggcatctccgtccaacagcgccacgacgccttctacggagaggacgcctcgtatgggtatggcggcatcgccgacgacctctccatcaagaaccgcgacgccgacgctgctgcagcgctgcttggtgcttcccccggcaagaacgccagtgctgccgtggccgctcagcgagatgacgagctcctggatgacagggccgatgctgaggttgccactgttgttgggcatgaggttgggcatgctattgcgaggcactccgctgagcagatcactaagaacctctgggtggcaatcctgcagattgtcatcctgcagtttatttacatgccggacttgataaatacggtgtcaacactactactcaggctacccttctcacgaagaatggagatagaggctgaccacatcgggctcctgctgctcgcttctgctggttacgatccgcgtgtcgccccttcggtctatgagaagctaggaaagatcggaggagattcagcactgaataactacctctcgactcacccgtccagcaagaagagggcgcagcttctgtcgcaggccagtgtcatgaacgaggcgctgaaactgtatagggaggttagtgccggccaaggcaccgaaggtttcctctagattctgggacctgctcctctgcttgtttcaaacgcctcacaaagaggttggtggtcttgttagctgcagtagtgacggcctgtggcatcggcgttctgagtggttcagaagcctggaagattaaactaagctatttgctcctcgttatttccagtcgttctgatgtcgaacggggccctcgtcgcttcccctagcagacgcaggatagctgtttctgcatttgtcattaggaaaaaaaagaaattaagcaccgtattattgtcaataattgttggttgacaccagctcctgtttcaagtgtggttttgctctattcatgctgacgcctcaaatgtccgtccatgataaaaaaaaatcttgagcattatttcgtacgcagatatgacatctagtcaggattctaaatattcgccagtcgtaaatgacaaacaatatctcagctttgcttccatcagcagcaacaacatattatagagcaaggactggttggtattatctctgctcttgaatatttgtcatctattaatttatttttaaactaaaacatggtaaacaaaaaagaaattagagagtatttggtcctgacagcgtcatgactcacgagtgattagaccgcagcctgcttgtgtcgcttccgccggatttttgtctcatcggaggcgcggatcgatacgaatatgcagtgccatatacaattgcgctccacggaaacggagtagtttaatagtgagatttatcgatgacccagggctacaaggcaaggcagtgagccgtgatttgttgctttctgtcatgccggccaatcagccctttccggcagcaaaaggatggctggcc

SEQ ID NO: 51382 - DNA, 1287 bp, Zea Mays
gcaagtgctagagagtgccaggcgacacggttcgctcggcggcggcgccatctggcagcttctgcaaaactgaagtgcccattccagccctcccgtagcgatcgacctctgaactacgcagcggaaaaatcccatcaaaaaacaaggggaaaaaacaacacagcatgaactgcttgaagaactcgcgttctgtcctctcgcgactccttcgccacaggccccacgtagcagcgccaccgccgccgacgccggcgacggcgccgcagtcaccggcttcacggtactactactacgcctcccgcgtcaagccagccgtctcccgaccgccgccgccgccccagttgccgagatctaggcactactacacatccccgcggcggcagcaggtcgtccacttcaaccgccgccgcggcgggtcccggtggtaccacgaccagcggaagctcacggcggcggtcttaatcagcggcggcggggcggtcgcgttctacttcggccatttggagaccgtgccctacaccaaccgctcccacctcgtcgtcctctcgccgaagttcgagcgccagctcggcgagtcccagtttgcccagctcaagaaggagttcgggcccaagatcctgccaccgctccaccccgacagcatccgtgtccgcctcatcgcctcggagatcgtccgcgccgtccaccgtggcatctccgtccaacagcgccacgacgccttctacggagaggacgcctcgtatgggtatggcggcatcgccgacgacctctccatcaagaaccgcgacgccgacgctgctgcagcgctgcttggtgcttcccccggcaagaacgccagtgctgccgtggccgctcagcgagatgacgagctcctggatgacaggtgggtgaccgagagtcggagccgaggtaaggcacgtggggcgcaaccgcagacgggtcacctggacggggttaactgggaggtgatcgttgtcaaagatgacctcgtcaatgcattttgcctgcctggtggcaagattgtagtcttcactggattgcttaacaacttcagggccgatgctgaggttgccactgttgttgggcatgaggttgggcatgctattgcgaggcactccgctgagcagatcactaagaacctctgggtggcaatcctgcagattgtcatcctgcagtttatttacatgccggacttgataaatacggtgtcaacactactactcaggctacccttctcacgaaggcactggacataacaaattaagttattcagatgatttttttcca

SEQ ID NO: 51383 - DNA, 1345 bp, Zea Mays
gcaagtgctagagagtgccaggcgacacggttcgctcggcggcggcgccatctggcagcttctgcaaaactgaagtgcccattccagccctcccgtagcgatcgacctctgaactacgcagcggaaaaatcccatcaaaaaacaaggggaaaaaacaacacagcatgaactgcttgaagaactcgcgttctgtcctctcgcgactccttcgccacaggccccacgtagcagcgccaccgccgccgacgccggcgacggcgccgcagtcaccggcttcacggtactactactacgcctcccgcgtcaagccagccgtctcccgaccgccgccgccgccccagttgccgagatctaggcactactacacatccccgcggcggcagcaggtcgtccacttcaaccgccgccgcggcgggtcccggtggtaccacgaccagcggaagctcacggcggcggtcttaatcagcggcggcggggcggtcgcgttctacttcggccatttggagaccgtgccctacaccaaccgctcccacctcgtcgtcctctcgccgaagttcgagcgccagctcggcgagtcccagtttgcccagctcaagaaggagttcgggcccaagatcctgccaccgctccaccccgacagcatccgtgtccgcctcatcgcctcggagatcgtccgcgccgtccaccgtggcatctccgtccaacagcgccacgacgccttctacggagaggacgcctcgtatgggtatggcggcatcgccgacgacctctccatcaagaaccgcgacgccgacgctgctgcagcgctgcttggtgcttcccccggcaagaacgccagtgctgccgtggccgctcagcgagatgacgagctcctggatgacaggtgggtgaccgagagtcggagccgaggtaaggcacgtggggcgcaaccgcagacgggtcacctggacggggttaactgggaggtgatcgttgtcaaagatgacctcgtcaatgcattttgcctgcctggtggcaagattgtagtcttcactggattgcttaacaacttcagggccgatgctgaggttgccactgttgttgggcatgaggttgggcatgctattgcgaggcactccgctgagcagatcactaagaacctctgggtggcaatcctgcagattgtcatcctgcagtttatttacatgccggacttgataaatacggtgtcaacactactactcaggctacccttctcacgaaggagatctgtgtatctttatattaagaagagagagagagtaaccaatagaacacacaccacaccctgattcttagattacattcgcgcctgttacaaaaggat

SEQ ID NO: 51384 - DNA, 4733 bp, Zea Mays
gcaagtgctagagagtgccaggcgacacggttcgctcggcggcggcgccatctggcagcttctgcaaaactgaagtgcccattccagccctcccgtagcgatcgacctctgaactacgcagcggaaaaatcccatcaaaaaacaaggggaaaaaacaacacagcatgaactgcttgaagaactcgcgttctgtcctctcgcgactccttcgccacaggccccacgtagcagcgccaccgccgccgacgccggcgacggcgccgcagtcaccggcttcacggtactactactacgcctcccgcgtcaagccagccgtctcccgaccgccgccgccgccccagttgccgagatctaggcactactacacatccccgcggcggcagcaggtcgtccacttcaaccgccgccgcggcgggtcccggtggtaccacgaccagcggaagctcacggcggcggtcttaatcagcggcggcggggcggtcgcgttctacttcggccatttggagaccgtgccctacaccaaccgctcccacctcgtcgtcctctcgccgaagttcgagcgccagctcggcgagtcccagtttgcccagctcaagaaggagttcgggcccaagatcctgccaccgctccaccccgacagcatccgtgtccgcctcatcgcctcggagatcgtccgcgccgtccaccgtggcatctccgtccaacagcgccacgacgccttctacggagaggacgcctcgtatgggtatggcggcatcgccgacgacctctccatcaagaaccgcgacgccgacgctgctgcagcgctgcttggtgcttcccccggcaagaacgccagtgctgccgtggccgctcagcgagatgacgagctcctggatgacaggtgggtgaccgagagtcggagccgaggtaaggcacgtggggcgcaaccgcagacgggtcacctggacggggttaactgggaggtgatcgttgtcaaagatgacctcgtcaatgcattttgcctgcctggtggcaagattgtagtcttcactggattgcttaacaacttcagggccgatgctgaggttgccactgttgttgggcatgaggttgggcatgctattgcgaggcactccgctgagcagatcactaagaacctctgggtggcaatcctgcagattgtcatcctgcagtttatttacatgccggacttgataaatacggtgtcaacactactactcaggctacccttctcacgaaggtaaggcttctgtatttcaagttgctaattgtgatgcatcctagatgtgataagcttcatgttttactaaaggtggctcacctaatattctaaaacaagtaaaatgcaaaattgaactgtataagtagacctcaatgttgctatgtgtcatgcgttaggtcagattccttcaagtagacacacaacaaactagcaggggcatctaaatatgtcagctcattgtatggttgtatcataggtcgatgaacatacagaccaagatatcaaaacttagcgggcccttttactgttattggcatcagttgtgtaggtgcattaatatcagttgccacttgacatgacagcttctttgaatattgaagatggctgtaaactgtgttttaaattatgcccttttatggataggcactggacataacaaattaagttattcagatgatttttttccaggacccagcatgtaatacttacatttctatgaactaacagtcactcttgacattattatgtttccttgtgattggcactattagaaatgaggtcgtaactgctagttattgtctcaataggccaacagggacattggagagagacccgtgtctaaatttcacccttatgttttcttggcattgtttttttaacacgaatcttcaaacaagtgccttccctttttgctttaggaagtaaacccaataagcttggaagtagcatatagaatgtgctcggcatggctttgcttccaatatgtcaaaaccgcttatattgatatcctttttgctcaaccactagagtttcaccacgtaggtatttataattgaagtatgctctttgaatttctgacaaattttcttgtagctggatgcttcagaattttttgagtatgtgaaaattgaccatttgaaagatgcattagtctatagtgatattttttttctcgaacacgcaggagatctgtgtatctttatattaagaagagagagagagtaaccaatagaacacacaccacaccctgattcttagattacattcgcgcctgttacaaaaggatgatcctctacacgcactggatgcaacgaaaccccaggaattgggatggccaggagggatagccctctagcaccagccatctcccaaagctctcgctcctctgcaggactctttaagactccggccaagctagggctagcccatcaaaaacacatcgattgttatgcttccatagagaccaagctcctaagacaatgaaggaattgaggccttgatgtagtaagccatttgttgcattgcttacatcctgccatcatcatgaaaggaaatcactcctggctgtggtggtagaacctgcaaaccgacctggtgaaggaggtgaaccagaaaataatcaatagattcaccaacaaatgatcaatagattcctcttcttggtcacagaaaggacaacaatcaggatgatctatcccatggcgtgcaaaactatcagcagtccagcattttttatgtgccacaagccatagaaaaaaaatacattttggtggagctcaagtcttccagatcctctcccaaggcccaaactgagtagagcccacaagcaaaccgtcataggctgatttggctgagtattgtccaccagttcagaaacaccaaataataacatcttttacgcctggttgtagctcaaagtcagaaatgatgtcccattatcttaagaattctataagaatccctactgtgagctgcccttgaatatttgagatccatgcctggtttgtgagagcttcctgtacagtgtgctttctcgatattctcttcggaattattgcatgtaagcatgggataatatccacagcgcattgatcttgcaaccaccgatcactccgaaataaagtgtttgctccatctccaatatcagaccacaaagctatggataagaaacccaacctgacactccaaaataaagtgtttgctccatctccaatatcagaccacaaagctatggagaagaaactccgaacttgatctggaacatgaattgggagagtagcccaaggatggtttggttctgtttttttgcaaccataaccaccacattctcaaggcccaattcaagttttgaagatcggaaaaaccaagtcctcgaagctccaatggacgacagacttcttccaagcttctagacaatggccacctttggcttctttacgagccccataggaaaccgtgtctgatttcatcaatagcttttagcacccaggatggaagatcgagcgccactgcaagatatatcaacacggcagtgagaacaaactgaacctgaactctcctcccggctcttgtcattaagtacactttccaagctggtagttgatctgcaatacgatcaattggtttccatgtttacttaagaatggagatagaggctgaccacatcgggctcctgctgctcgcttctgctggttacgatccgcgtgtcgccccttcggtctatgagaagctaggaaagatcggaggagattcagcactgaataactacctctcgactcacccgtccagcaagaagagggcgcagcttctgtcgcaggccagtgtcatgaacgaggcgctgaaactgtatagggaggttagtgccggccaaggcaccgaaggtttcctctagattctgggacctgctcctctgcttgtttcaaacgcctcacaaagaggttggtggtcttgttagctgcagtagtgacggcctgtggcatcggcgttctgagtggttcagaagcctggaagattaaactaagctatttgctcctcgttatttccagtcgttctgatgtcgaacggggccctcgtcgcttcccctagcagacgcaggatagctgtttctgcatttgtcattaggaaaaaaaagaaattaagcaccgtattattgtcaataattgttggttgacaccagctcctgtttcaagtgtggttttgctctattcatgctgacgcctcaaatgtccgtccatgataaaaaaaaatcttgagcattatttcgtacgcagatatgacatctagtcaggattctaaatattcgccagtcgtaaatgacaaacaatatctcagctttgcttccatcagcagcaacaacatattatagagcaaggactggttggtattatctctgctcttgaatatttgtcatctattaatttatttttaaactaaaacatggtaaacaaaaaagaaattagagagtatttggtcctgacagcgtcatgactcacgagtgattagaccgcagcctgcttgtgtcgcttccgccggatttttgtctcatcggaggcgcggatcgatacgaatatgcagtgccatatacaattgcgctccacggaaacggagtagtttaatagtgagatttatcgatgacccagggctacaaggcaaggcagtgagccgtgatttgttgctttctgtcatgccggccaatcagccctttccggcagcaaaaggatggctggcc

SEQ ID NO: 51385 - DNA, 2468 bp, Zea Mays
atgtgtatctctgtgccgtataaacgagattgaagcctaagggagtatgacttacaatctgttcccaaagtataggttcgacatcaatttagcttgattaaattctccaggagcacgtcttgattaaaactaaccaaactagagaacttaaaagggtggcatatattagtctaaacaccaatcgttcaacagcacaaatggtagcacttgttcgatgatgagaacaccgaacgcttcagtatttgcatccgagaaccaaagccgtgattcgcgtctgaaattctgaatctgttttttgctcgattggcaagacacaggtgcgttccgcctcgcgtcagtctcgctgcaacaaaccaaggtgggagtgcgacggtgcgaggccccatggaatgcaatggaaagcaccgggtgcccgtcccgtcccgtccggggtgctctcctctccctcttgctccctgccgcgtgccgctcctttcactttctgccgctggtattcttctacggagaaaaggagtggcaaaggatctcacagccgccaaggaaagcaaagcaaaaccgagtccacatcggtccaggtccacttgaccactaccgcggcgaccgcactccgcaccaccaatcaatcaggcgctggagtgacagcggcggcaacaccacgcccacgcggctgccggagccgaccccccgatggatctcccgccgctctcccaccaagcgctcttcgccgccgtccgatccgccgacgcggccgccgtccgcgcgctcctggccgacgccgaggcgtcgggcacctccctggccgcgctcgccgccgcgcagacggacgcgggggagaccgcgctgtacgtcgccgcggaggccggcagcgaggagaccgtgagcctcctcctcccgctctacgacctcgaggccgccaccgtccgctcacgcctcgatctcgacgccttccatgtcgccgccaagcagggccacaccggggttgtgaaagagtttttggggcggtggccagggctttgctcagtctgtgactcttccaacactagccccctctactccgctgctgtcaaggatcacttggatgtggtaaatgctatactggacactgatgatagctgcataaggattgtgcggaaaaacgggaagacatccctacatactgctgcaaggattggataccatcgtattgtcaaggcactcatagagagggatccaggaattgttccgatcaaggataggaagggacaaactgcacttcacatggctgtgaaaggcaagaacacagatgtagtggaagagttactgatggctgatgtttccattctcaatgtgcgggacaagaagggaaatactgctttgcacatagctacacggaaatggaggccccagatggtacagcttcttcttagctacgaatcacttgaaattaatgctatcaatattcaaaatgaaacagctatggatttggctgacaaagttccttatggtgagtctaaaacggaaataatagagtggttgacagaggctggtgcaaagaatgccagaaatgtggggaaaattgatgaggcatcagaactgaggagaactgtgagtgatatcaagcacaatgttcaggcacagcttagcgagaatgctaagaccaataaacgagtgactgggattcgcaaagaattgcagaaactgcatagagaagctattcagaacaccatcaattcagtcaccatggtagcaaccctgattgcctccattgccttcgttgccatattcaatttgccaggtcaatacttccaagatgtgaatagcgggggagacattgatcaccttggttgcctgggaaactggtgcccagaagcaagttatcaagatcgtaaataagctcatgtggaccgcatgccttagcacaggtgcggcttttatctcactggcatatgttgtagttggcccgcagcatgcctggatggccttcacagtatcagccatcggaggtccgatcatgattggaaccctcctgttcctagcctatctgttgttgcgcccacggttcaagtttggcgaagacagacagcgccgcatcaagagggcaagcggcagcaagtccttctcctggtcactccatgatggtttttcagatctggaagccttctctgatcatgagaagaagatatatgccctgtaggaaggtgtaacagtaattactcttgcatgagaagaggcaattgggagagtgcaaatggttcgtgtatatatttggtttagctgttttaaccttttaggtctgtggtgagccgcagttggaccttctcgtgtactatatctaagaatgaagagctgcacctattatgaagtgcaagtatatgaccaaaagttactcgtgtactgagcatgcttgaaactgttgccgcttgtgaattggctacacgttgtatcgtatcattattccccttctaaaccaaaaaagtggaatgtaaaag

SEQ ID NO: 51386 - DNA, 1553 bp, Zea Mays
cccttctgttgatgttgtgggagcggatcgaaggggttgtgaaagagtttttggggcggtggccagggctttgctcagtctgtgactcttccaacactagccccctctactccgctgctgtcaaggatcacttggatgtggtaaatgctatactggacactgatgatagctgcataaggattgtgcggaaaaacgggaagacatccctacatactgctgcaaggattggataccatcgtattgtcaaggcactcatagagagggatccaggaattgttccgatcaaggataggaagggacaaactgcacttcacatggctgtgaaaggcaagaacacagatgtagtggaagagttactgatggctgatgtttccattctcaatgtgcgggacaagaagggaaatactgctttgcacatagctacacggaaatggaggccccagctatggatttggctgacaaagttccttatggtgagtctaaaacggaaataatagagtggttgacagaggctggtgcaaagaatgccagaaatgtggggaaaattgatgaggcatcagaactgaggagaactgtgagtgatatcaagcacaatgttcaggcacagcttagcgagaatgctaagaccaataaacgagtgactgggattcgcaaagaattgcagaaactgcatagagaagctattcagaacaccatcaattcagtcaccatggtagcaaccctgattgcctccattgccttcgttgccatattcaatttgccaggtcaatacttccaagatgtgaatagcgggggagacattggtgaggctcaaatagccaagcttactggttttcgtgtcttctgccttctgaatgcaactgctctcttcatttccctcgcggtggtcgtcgtgcagatcaccttggttgcctgggaaactggtgcccagaagcaagttatcaagatcgtaaataagctcatgtggaccgcatgccttagcacaggtgcggcttttatctcactggcatatgttgtagttggcccgcagcatgcctggatggccttcacagtatcagccatcggaggtccgatcatgattggaaccctcctgttcctagcctatctgttgttgcgcccacggttcaagtttggcgaagacagacagcgccgcatcaagagggcaagcggcagcaagtccttctcctggtcactccatgatggtttttcagatctggaagccttctctgatcatgagaagaagatatatgccctgtaggaaggtgtaacagtaattactcttgcatgagaagaggcaattgggagagtgcaaatggttcgtgtatatatttggtttagctgttttaaccttttaggtctgtggtgagccgcagttggaccttctcgtgtactatatctaagaatgaagagctgcacctattatgaagtgcaagtatatgaccaaaagttactcgtgtactgagcatgcttgaaactgttgccgcttgtgaattggctacacgttgtatcgtatcattattccccttctaaaccaaaaaagtggaatgtaaaag

SEQ ID NO: 51387 - DNA, 2195 bp, Zea Mays
gtggacgggagtggagtggtgttgccagattttaagtgcgaagcatggcaggcatgggcaaatagctcagaggagggactcggactcggactcgaactaagctgggtttagcaggagtttgaactttgaacgcaaggcatcagaatcgtgtttgtttctgctcactgctgaattagagaaggtggatgagaagctcaagttgacagagtctctccttgaaagcaaaaacctagaactgaagaaaacaaatgatgagaaaaaggctgctatggctgctcagtttgcggcggaagcaacactacgaagagtacatggagctcagaaagatgatgatatgccacctattgaagccatccttgcgccgcttgaagcagagttaaagctttgtaggaaggagattgcaaagcttcaagacgacaatagagctttggaccgtttaacaaagcaaaaggaggcagcactgctagaagcggaaaggactgtacaaatcgcaatggctaaagctgctatggttgatgacatgcaaaataagaaccaagagttgatgaagcaaattgaaatttgccaggaggaaaataagatcttggataggctgcaccgccaaaaagttgcggaagtggaaaagctgagtcaaactgtgagagagttggaagaggatgttctgcaaggtggtgcagctgccaatgtcgttagggattaccaacgaaaagttcaagaaatgaataaaagaaaattcgtgaccgtgaacttgctcgagctaaagttactgcaaatagggttgctgttgtggtcgcaaacgagtggaaagatgctaatgacaaagtaatgcctgttaaacagtggctggaagagcgaaggttcctgcagggtgagatgcagcagcttcgtgacaaacttgctattgcagagagaactgctcgatcggaagctcaattaaaggaaaagtatcagttgcgcttaaaagttttagaagatggcttgaggggcactccaagtggatcttgtcgtccttccatggaaggaaaatgtataagtaatggacctccccgtcgactttcactaggtggtgctgatagtatatccaaaatctctccaaacggtgtgttaatgaggaggtctccatctttcaattcaagatcccccctctctaccagcagttgtttggtcctgaagcatgcaggaagaacttcaaagtcatttgatggtggtaccaggtcattagaccagggaaaagttctggggagtggacctcattcactcaatagatctacggatgcagttagagattgtgagacagctgatagttggaaggctaatgcagaagaaaaaagtaatgaaaccgcaaacaatgattcagctgacatggtctctggtgtactctatgacgtgttgcaaaaggaggtggtttccttgagaaaggcatgccatgagaaagaccaaactctaaaggacaaagaagatgcaatggagatgctagcaaagaaagtagatacattacataaagcaaaggaagtggaggctaaaaagaagaggcaagagatagctgctttggagaaaaaatttgccgcggtgtgccttgaacaagaacggcttggtaatttgagaggacctggaacttctcagactgtttcgggaagaactgcatcacgaggtggattgacgcgcaacctccaatagcatacatctaacttcaggcagagttggagcgtgctactcaagacaagggaacatgcgatgttggaagatataatggactcagtgaagaagtggttacaggagcagcattcggttgaggaaaattgcagtgacattgaagtggtctgaagtggaagaagtcccttatttttgtttggagagatgccctttccagcttgcttggcgctttttagtctgttgctttatgtttcagatgctagttcctggtcatctgtgtgccggcagcatgtgcttctttctatgctgttccaggctgtggatctcgtatgtgcttagctgcaggttgactggtgttgtggttctctgatatgtggttgtaaactggtatccctagtgtgtctgtttgaactctattgttctttggtttcttaaaaggagagtaatttctcgttgaaaaaaaacttggatgattataggtcaaagggatctcttgaggggtcaccacaacatcatcataatgacattcaatttgagcaagt

SEQ ID NO: 51388 - DNA, 2062 bp, Zea Mays
cttctcttctacccgctgaataactcactgctgaattagagaaggtggatgagaagctcaagttgacagagtctctccttgaaagcaaaaacctagaactgaagaaaacaaatgatgagaaaaaggctgctatggctgctcagtttgcggcggaagcaacactacgaagagtacatggagctcagaaagatgatgatatgccacctattgaagccatccttgcgccgcttgaagcagagttaaagctttgtaggaaggagattgcaaagcttcaagacgacaatagagctttggaccgtttaacaaagcaaaaggaggcagcactgctagaagcggaaaggactgtacaaatcgcaatggctaaagctgctatggttgatgacatgcaaaataagaaccaagagttgatgaagcaaattgaaatttgccaggaggaaaataagatcttggataggctgcaccgccaaaaagttgcggaagtggaaaagctgagtcaaactgtgagagagttggaagaggatgttctgcaaggtggtgcagctgccaatgtcgttagggattaccaacgaaaagttcaagaaatgaatgaagaaaagaaaattcgtgaccgtgaacttgctcgagctaaagttactgcaaatagggttgctgttgtggtcgcaaacgagtggaaagatgctaatgacaaagtaatgcctgttaaacagtggctggaagagcgaaggttcctgcagggtgagatgcagcagcttcgtgacaaacttgctattgcagagagaactgctcgatcggaagctcaattaaaggaaaagtatcagttgcgcttaaaagttttagaagatggcttgaggggcactccaagtggatcttgtcgtccttccatggaaggaaaatgtataagtaatggacctccccgtcgactttcactaggtggtgctgatagtatatccaaaatctctccaaacggtgtgttaatgaggaggtctccatctttcaattcaagatcccccctctctaccagcagttgtttggtcctgaagcatgcaggaagaacttcaaagtcatttgatggtggtaccaggtcattagaccagggaaaagttctggggagtggacctcattcactcaatagatctacggatgcagttagagattgtgagacagctgatagttggaaggctaatgcagaagaaaaaagtaatgaaaccgcaaacaatgattcagctgacatggtctctggtgtactctatgacgtgttgcaaaaggaggtggtttccttgagaaaggcatgccatgagaaagaccaaactctaaaggacaaagaagatgcaatggagatgctagcaaagaaagtagatacattacataaagcaaaggaagtggaggctaaaaagaagaggcaagagatagctgctttggagaaaaaatttgccgcggtgtgccttgaacaagaacggcttggtaatttgagaggacctggaacttctcagactgtttcgggaagaactgcatcacgaggtggattgacgcgcaacctccaatagcatacatctaacttcaggcagagttggagcgtgctactcaagacaagggaacatgcgatgttggaagatataatggactcagtgaagaagtggttacaggagcagcattcggttgaggaaaattgcagtgacattgaagtggtctgaagtggaagaagtcccttatttttgtttggagagatgccctttccagcttgcttggcgctttttagtctgttgctttatgtttcagatgctagttcctggtcatctgtgtgccggcagcatgtgcttctttctatgctgttccaggctgtggatctcgtatgtgcttagctgcaggttgactggtgttgtggttctctgatatgtggttgtaaactggtatccctagtgtgtctgtttgaactctattgttctttggtttcttaaaaggagagtaatttctcgttgaaaaaaaacttggatgattataggtcaaagggatctcttgaggggtcaccacaacatcatcataatgacattcaatttgagcaagt

SEQ ID NO: 51389 - DNA, 2191 bp, Zea Mays
tcaatagcagcatctcatatcttggtttcattttcttagtttatcaacaaggcatagtacatatgatctggagtgtcaataattgctgagaaaaataagaatgagactagttatggaagactttaggagttcactgaagtgaatagaatctgctcactgctgaattagagaaggtggatgagaagctcaagttgacagagtctctccttgaaagcaaaaacctagaactgaagaaaacaaatgatgagaaaaaggctgctatggctgctcagtttgcggcggaagcaacactacgaagagtacatggagctcagaaagatgatgatatgccacctattgaagccatccttgcgccgcttgaagcagagttaaagctttgtaggaaggagattgcaaagcttcaagacgacaatagagctttggaccgtttaacaaagcaaaaggaggcagcactgctagaagcggaaaggactgtacaaatcgcaatggctaaagctgctatggttgatgacatgcaaaataagaaccaagagttgatgaagcaaattgaaatttgccaggaggaaaataagatcttggataggctgcaccgccaaaaagttgcggaagtggaaaagctgagtcaaactgtgagagagttggaagaggatgttctgcaaggtggtgcagctgccaatgtcgttagggattaccaacgaaaagttcaagaaatgaatgaagaaaagaaaattcgtgaccgtgaacttgctcgagctaaagttactgcaaatagggttgctgttgtggtcgcaaacgagtggaaagatgctaatgacaaagtaatgcctgttaaacagtggctggaagagcgaaggttcctgcagggtgagatgcagcagcttcgtgacaaacttgctattgcagagagaactgctcgatcggaagctcaattaaaggaaaagtatcagttgcgcttaaaagttttagaagatggcttgaggggcactccaagtggatcttgtcgtccttccatggaaggaaaatgtataagtaatggacctccccgtcgactttcactaggtggtgctgatagtatatccaaaatctctccaaacggtgtgttaatgaggaggtctccatctttcaattcaagatcccccctctctaccagcagttgtttggtcctgaagcatgcaggaagaacttcaaagtcatttgatggtggtaccaggtcattagaccagggaaaagttctggggagtggacctcattcactcaatagatctacggatgcagttagagattgtgagacagctgatagttggaaggctaatgcagaagaaaaaagtaatgaaaccgcaaacaatgattcagctgacatggtctctggtgtactctatgacgtgttgcaaaaggaggtggtttccttgagaaaggcatgccatgagaaagaccaaactctaaaggacaaagaagatgcaatggagatgctagcaaagaaagtagatacattacataaagcaaaggaagtggaggctaaaaagaagaggcaagagatagctgctttggagaaaaaatttgccgcggtgtgccttgaacaagaacggcttggtaatttgagaggacctggaacttctcagactgtttcgggaagaactgcatcacgaggtggattgacgcgcaacctccaatagcatacatctaacttcaggcagagttggagcgtgctactcaagacaagggaacatgcgatgttggaagatataatggactcagtgaagaagtggttacaggagcagcattcggttgaggaaaattgcagtgacattgaagtggtctgaagtggaagaagtcccttatttttgtttggagagatgccctttccagcttgcttggcgctttttagtctgttgctttatgtttcagatgctagttcctggtcatctgtgtgccggcagcatgtgcttctttctatgctgttccaggctgtggatctcgtatgtgcttagctgcaggttgactggtgttgtggttctctgatatgtggttgtaaactggtatccctagtgtgtctgtttgaactctattgttctttggtttcttaaaaggagagtaatttctcgttgaaaaaaaacttggatgattataggtcaaagggatctcttgaggggtcaccacaacatcatcataatgacattcaatttgagcaagt

SEQ ID NO: 51390 - DNA, 2104 bp, Zea Mays
tgctgagaaaaataagaatgagactagttatggaagactttaggagttcactgaagtgaatagaatctgctcactgctgaattagagaaggtggatgagaagctcaagttgacagagtctctccttgaaagcaaaaacctagaactgaagaaaacaaatgatgagaaaaaggctgctatggctgctcagtttgcggcggaagcaacactacgaagagtacatggagctcagaaagatgatgatatgccacctattgaagccatccttgcgccgcttgaagcagagttaaagctttgtaggaaggagattgcaaagcttcaagacgacaatagagctttggaccgtttaacaaagcaaaaggaggcagcactgctagaagcggaaaggactgtacaaatcgcaatggctaaagctgctatggttgatgacatgcaaaataagaaccaagagttgatgaagcaaattgaaatttgccaggaggaaaataagatcttggataggctgcaccgccaaaaagttgcggaagtggaaaagctgagtcaaactgtgagagagttggaagaggatgttctgcaaggtggtgcagctgccaatgtcgttagggattaccaacgaaaagttcaagaaatgaatgaagaaaagaaaattcgtgaccgtgaacttgctcgagctaaagttactgcaaatagggttgctgttgtggtcgcaaacgagtggaaagatgctaatgacaaagtaatgcctgttaaacagtggctggaagagcgaaggttcctgcagggtgagatgcagcagcttcgtgacaaacttgctattgcagagagaactgctcgatcggaagctcaattaaaggaaaagtatcagttgcgcttaaaagttttagaagatggcttgaggggcactccaagtggatcttgtcgtccttccatggaaggaaaatgtataagtaatggacctccccgtcgactttcactaggtggtgctgatagtatatccaaaatctctccaaacggtgtgttaatgaggaggtctccatctttcaattcaagatcccccctctctaccagcagttgtttggtcctgaagcatgcaggaagaacttcaaagtcatttgatggtggtaccaggtcattagaccagggaaaagttctggggagtggacctcattcactcaatagatctacggatgcagttagagattgtgagacagctgatagttggaaggctaatgcagaagaaaaaagtaatgaaaccgcaaacaatgattcagctgacatggtctctggtgtactctatgacgtgttgcaaaaggaggtggtttccttgagaaaggcatgccatgagaaagaccaaactctaaaggacaaagaagatgcaatggagatgctagcaaagaaagtagatacattacataaagcaaaggaagtggaggctaaaaagaagaggcaagagatagctgctttggagaaaaaatttgccgcggtgtgccttgaacaagaacggcttggtaatttgagaggacctggaacttctcagactgtttcgggaagaactgcatcacgaggtggattgacgcgcaacctccaatagcatacatctaacttcagagttggagcgtgctactcaagacaagggaacatgcgatgttggaagatataatggactcagtgaagaagtggttacaggagcagcattcggttgaggaaaattgcagtgacattgaagtggtctgaagtggaagaagtcccttatttttgtttggagagatgccctttccagcttgcttggcgctttttagtctgttgctttatgtttcagatgctagttcctggtcatctgtgtgccggcagcatgtgcttctttctatgctgttccaggctgtggatctcgtatgtgcttagctgcaggttgactggtgttgtggttctctgatatgtggttgtaaactggtatccctagtgtgtctgtttgaactctattgttctttggtttcttaaaaggagagtaatttctcgttgaaaaaaaacttggatgattataggtcaaagggatctcttgaggggtcaccacaacatcatcataatgacattcaatttgagcaagt

SEQ ID NO: 51391 - DNA, 1920 bp, Zea Mays
gaagactttaggagttcactgaagtgaatagaatctgctcactgctgaattagagaaggtggatgagaagctcaagttgacagagtctctccttgaaagcaaaaacctagaactgaagaaaacaaatgatgagaaaaaggctgctatggctgctcagtttgcggcggaagcaacactacgaagagtacatggagctcagaaagatgatgatatgccacctattgaagccatccttgcgccgcttgaagcagagttaaagctttgtaggaaggagattgcaaagcttcaagacgacaatagagctttggaccgtttaacaaagcaaaaggaggcagcactgctagaagcggaaaggactgtacaaatcgcaatggctaaagctgctatggttgatgacatgcaaaataagaaccaagagttgatgaagcaaattgaaatttgccaggaagaaaagaaaattcgtgaccgtgaacttgctcgagctaaagttactgcaaatagggttgctgttgtggtcgcaaacgagtggaaagatgctaatgacaaagtaatgcctgttaaacagtggctggaagagcgaaggttcctgcagggtgagatgcagcagcttcgtgacaaacttgctattgcagagagaactgctcgatcggaagctcaattaaaggaaaagtatcagttgcgcttaaaagttttagaagatggcttgaggggcactccaagtggatcttgtcgtccttccatggaaggaaaatgtataagtaatggacctccccgtcgactttcactaggtggtgctgatagtatatccaaaatctctccaaacggtgtgttaatgaggaggtctccatctttcaattcaagatcccccctctctaccagcagttgtttggtcctgaagcatgcaggaagaacttcaaagtcatttgatggtggtaccaggtcattagaccagggaaaagttctggggagtggacctcattcactcaatagatctacggatgcagttagagattgtgagacagctgatagttggaaggctaatgcagaagaaaaaagtaatgaaaccgcaaacaatgattcagctgacatggtctctggtgtactctatgacgtgttgcaaaaggaggtggtttccttgagaaaggcatgccatgagaaagaccaaactctaaaggacaaagaagatgcaatggagatgctagcaaagaaagtagatacattacataaagcaaaggaagtggaggctaaaaagaagaggcaagagatagctgctttggagaaaaaatttgccgcggtgtgccttgaacaagaacggcttggtaatttgagaggacctggaacttctcagactgtttcgggaagaactgcatcacgaggtggattgacgcgcaacctccaatagcatacatctaacttcaggcagagttggagcgtgctactcaagacaagggaacatgcgatgttggaagatataatggactcagtgaagaagtggttacaggagcagcattcggttgaggaaaattgcagtgacattgaagtggtctgaagtggaagaagtcccttatttttgtttggagagatgccctttccagcttgcttggcgctttttagtctgttgctttatgtttcagatgctagttcctggtcatctgtgtgccggcagcatgtgcttctttctatgctgttccaggctgtggatctcgtatgtgcttagctgcaggttgactggtgttgtggttctctgatatgtggttgtaaactggtatccctagtgtgtctgtttgaactctattgttctttggtttcttaaaaggagagtaatttctcgttgaaaaaaaacttggatgattataggtcaaagggatctcttgaggggtcaccacaacatcatcataatgacattcaatttgagcaagt

SEQ ID NO: 51392 - DNA, 2063 bp, Zea Mays
gtttgttgagcctgtccaatttagctcactgctgaattagagaaggtggatgagaagctcaagttgacagagtctctccttgaaagcaaaaacctagaactgaagaaaacaaatgatgagaaaaaggctgctatggctgctcagtttgcggcggaagcaacactacgaagagtacatggagctcagaaagatgatgatatgccacctattgaagccatccttgcgccgcttgaagcagagttaaagctttgtaggaaggagattgcaaagcttcaagacgacaatagagctttggaccgtttaacaaagcaaaaggaggcagcactgctagaagcggaaaggactgtacaaatcgcaatggctaaagctgctatggttgatgacatgcaaaataagaaccaagagttgatgaagcaaattgaaatttgccaggaggaaaataagatcttggataggctgcaccgccaaaaagttgcggaagtggaaaagctgagtcaaactgtgagagagttggaagaggatgttctgcaaggtggtgcagctgccaatgtcgttagggattaccaacgaaaagttcaagaaatgaatgaagaaaagaaaattcgtgaccgtgaacttgctcgagctaaagttactgcaaatagggttgctgttgtggtcgcaaacgagtggaaagatgctaatgacaaagtaatgcctgttaaacagtggctggaagagcgaaggttcctgcagggtgagatgcagcagcttcgtgacaaacttgctattgcagagagaactgctcgatcggaagctcaattaaaggaaaagtatcagttgcgcttaaaagttttagaagatggcttgaggggcactccaagtggatcttgtcgtccttccatggaaggaaaatgtataagtaatggacctccccgtcgactttcactaggtggtgctgatagtatatccaaaatctctccaaacggtgtgttaatgaggaggtctccatctttcaattcaagatcccccctctctaccagcagttgtttggtcctgaagcatgcaggaagaacttcaaagtcatttgatggtggtaccaggtcattagaccagggaaaagttctggggagtggacctcattcactcaatagatctacggatgcagttagagattgtgagacagctgatagttggaaggctaatgcagaagaaaaaagtaatgaaaccgcaaacaatgattcagctgacatggtctctggtgtactctatgacgtgttgcaaaaggaggtggtttccttgagaaaggcatgccatgagaaagaccaaactctaaaggacaaagaagatgcaatggagatgctagcaaagaaagtagatacattacataaagcaaaggaagtggaggctaaaaagaagaggcaagagatagctgctttggagaaaaaatttgccgcggtgtgccttgaacaagaacggcttggtaatttgagaggacctggaacttctcagactgtttcgggaagaactgcatcacgaggtggattgacgcgcaacctccaatagcatacatctaacttcaggcagagttggagcgtgctactcaagacaagggaacatgcgatgttggaagatataatggactcagtgaagaagtggttacaggagcagcattcggttgaggaaaattgcagtgacattgaagtggtctgaagtggaagaagtcccttatttttgtttggagagatgccctttccagcttgcttggcgctttttagtctgttgctttatgtttcagatgctagttcctggtcatctgtgtgccggcagcatgtgcttctttctatgctgttccaggctgtggatctcgtatgtgcttagctgcaggttgactggtgttgtggttctctgatatgtggttgtaaactggtatccctagtgtgtctgtttgaactctattgttctttggtttcttaaaaggagagtaatttctcgttgaaaaaaaacttggatgattataggtcaaagggatctcttgaggggtcaccacaacatcatcataatgacattcaatttgagcaagt

SEQ ID NO: 51393 - DNA, 1957 bp, Zea Mays
caaacatttgatttaggactggttaatgaaatcaatccggtgattgggattttgccctttttgggttccaaggcaaagctcactgctgaattagagaaggtggatgagaagctcaagttgacagagtctctccttgaaagcaaaaacctagaactgaagaaaacaaatgatgagaaaaaggctgctatggctgctcagtttgcggcggaagcaacactacgaagagtacatggagctcagaaagatgatgatatgccacctattgaagccatccttgcgccgcttgaagcagagttaaagctttgtaggaaggagattgcaaagcttcaagacgacaatagagctttggaccgtttaacaaagcaaaaggaggcagcactgctagaagcggaaaggactgtacaaatcgcaatggctaaagctgctatggttgatgacatgcaaaataagaaccaagagttgatgaagcaaattgaaatttgccaggaagaaaagaaaattcgtgaccgtgaacttgctcgagctaaagttactgcaaatagggttgctgttgtggtcgcaaacgagtggaaagatgctaatgacaaagtaatgcctgttaaacagtggctggaagagcgaaggttcctgcagggtgagatgcagcagcttcgtgacaaacttgctattgcagagagaactgctcgatcggaagctcaattaaaggaaaagtatcagttgcgcttaaaagttttagaagatggcttgaggggcactccaagtggatcttgtcgtccttccatggaaggaaaatgtataagtaatggacctccccgtcgactttcactaggtggtgctgatagtatatccaaaatctctccaaacggtgtgttaatgaggaggtctccatctttcaattcaagatcccccctctctaccagcagttgtttggtcctgaagcatgcaggaagaacttcaaagtcatttgatggtggtaccaggtcattagaccagggaaaagttctggggagtggacctcattcactcaatagatctacggatgcagttagagattgtgagacagctgatagttggaaggctaatgcagaagaaaaaagtaatgaaaccgcaaacaatgattcagctgacatggtctctggtgtactctatgacgtgttgcaaaaggaggtggtttccttgagaaaggcatgccatgagaaagaccaaactctaaaggacaaagaagatgcaatggagatgctagcaaagaaagtagatacattacataaagcaaaggaagtggaggctaaaaagaagaggcaagagatagctgctttggagaaaaaatttgccgcggtgtgccttgaacaagaacggcttggtaatttgagaggacctggaacttctcagactgtttcgggaagaactgcatcacgaggtggattgacgcgcaacctccaatagcatacatctaacttcagagttggagcgtgctactcaagacaagggaacatgcgatgttggaagatataatggactcagtgaagaagtggttacaggagcagcattcggttgaggaaaattgcagtgacattgaagtggtctgaagtggaagaagtcccttatttttgtttggagagatgccctttccagcttgcttggcgctttttagtctgttgctttatgtttcagatgctagttcctggtcatctgtgtgccggcagcatgtgcttctttctatgctgttccaggctgtggatctcgtatgtgcttagctgcaggttgactggtgttgtggttctctgatatgtggttgtaaactggtatccctagtgtgtctgtttgaactctattgttctttggtttcttaaaaggagagtaatttctcgttgaaaaaaaacttggatgattataggtcaaagggatctcttgaggggtcaccacaacatcatcataatgacattcaatttgagcaagt

SEQ ID NO: 51394 - DNA, 3736 bp, Zea Mays
gcagtccgcagccatagaaaccatctgactcccgtcggcgagccgcgagaggcgcaacagaagttgtgatatgcaccatggttgggagaactattcaggtccaaggttttgctctaactgacagtgccgaatctgtcaaattgtttttggagcgaattgctggtgctggaaccatctgtgctctcaagctcaggcatccaaggaacatctctgccaactcaagggcatttgctatagttcagttccagtcacaggaaagtgcttcattggtagagaatgcggctcaaagacaggttctcaagattggacggttttatctgagaaccagacctgcagaccgggacattgttccaagaccaaggattccaatgttttctctagaggacattgtgctgcatttgggatgcttggttaaggaaaatatcctatctgctctttttagagcaagtaatgtttcggttcaatttggatttgatatgaaaaagatctacttctacctctcctacaattttactaaatttaaacttgaactttcttacgaaagtatatgggagatgcagcttcaccgtccacctgcttataggtcacggacacagttccttttgattcagggatgacacagatgaacaatggaccaggacaattgattttactccatcagctagcatcgggcaatcatctattttatgtctggaggtgccacaacagtgtgagcttccaagaattggcgactactttgtttactataaagagcagaatcttgactttgaatgtcggaatgggtattcatattcctgtggtagcaaccttgtaccaattgtgaaatctcctgattacatagaggtcccttatgagatactcttcaaaatcaaccatttggttcagaatgggacactcagtgggccaacagttgatcatagtttcttccgtcatgttagcccaaaatttgaacctattgatcatataaaacgagcacttttaaagatgacatatttgaaaagcacctgcttgaacccaacagattggttatctgtgcaatactccagaatacggaaatcacgccatgcatcacaaaagttatctaatatatctctggatgatggcttggtctatgtccacagggtgcaagttacccctgctaaagtgtatttttatggacctgagataaatgtctccaatcgcgttgtgcggcatttctctgcagacatagataacttccttcggatttcatttgttgatgaagactgtgagaagctccgttcagctgatttgtcacctcgatctacttctggaaatgatgcaaggagaactgctctgtataatagagttttgtcagtcctttcaaatggcatcaatattggtgacaagcactttgagtttcttgccttttcttcaagtcagcttcgagataactctgcatggatgtttgcttctcggcagggattgactgcgagcgacataaggaagtggatgggggactttcgagatatcagaaatgtggcaaagtatgctgcaagacttgggcaatctttcagttcctcaacagaaactttaaaagtacacaaatctgaggtggaacgaattcctgatattacaaatggcacaaagtacatattctctgatggagttggaaagatctcagctaattttgcagtggaggtggctatgaagtgcaaattgaaacgctttgctccttctgtttttcagataaggtatggcggttacaaaggtgttgtcgctgtagatacaagatcaaatcataagctttctttgagaaaaagcatgtcaaagttccagtcagaaaatatcactcttgatgtccttgcatacagcaagtaccaaccatgcttcctgaatcggcagttgattactcttctctcaacacttggggttagcgataatgtctttgagctaaagcagaaggaagccttaaggcagttgaacagaatggtaactgaaccacaggctgctcgtgaagcagttgaacttatgcccatgggagaagtaaccaatgtagttaaagaattgttgtcatgtggctaccagcctgatcatgagccatatctttccatgctgctacaaacttttagagcatccaagcttctagagttgaaaacaaagtcaaggatattcatcacacaggggcgagcaatgatgggttgcctggatgaaacctgcacacttaagtacggccaggtattcgtccaagcttcttacagtgcagatgaccatcgcaaggtcgttgtaactggaaaagtagttgtcgccaaaaatccttgtctccaccctggtgacatacgggttctccaggctgttgatgttcctgctctgcaccacttgtttgactgtgttgtctttccacagcagggaccaaggccgcaccctaacgagtgttcagggagtgatcttgatggggacatatattttgtttcttgggatccacatcttattccgagtcgtttggtggatcctatggactatactccagcttcagcagaaacattagaccatgatgtcactattgaggagatacaggagtacttcacaaactacatagttaatgagagtcttgggattatcgccaatgcgcatgtggtctttgcagatcaggaacgtatgaaggctgagagtccaccgtgcgttcaactggccaagctcttctctatagctgtcgatttcccaaagactggagtgccggctctgattccacatgagctacatgtcaaggagtatcctgacttcatggagaaactcgacaaagtcacctatgaatcaaagggtgtgatcgggaagctctatagggaaataaagaagcacacaccacacataaagcacttcacgagggaagtggcaaggcggtcttatgacaccgatttgattgttgatggctatgaagattacattactgaggctatagagttcaaggaagagtacgatttcaggctgggtaatcttatggaccactatggcataaaaagtgaagctgagataataagtggatgtattctaaagatggcaaagaatttcaccaagagtagtgatgctgatgcaattagaatggcggtgagatctttgaggaaagaagctaggtcgtggttcaatgagatgagcacaggagaggatggccaagatgccatggaggccaaggcctctgcttggtaccatgttacttatcatcagcagtactggggcagctacaatgaagggtatgatcggccgcatcttattagcttcccatggtgcgtatatgacaagcttgtggccatcaagcaggggaggaatctcctcacgcggatggatcgaaacttgaggttccgttgagcattgccagcaggtttgctcctgtacatatccctgatcgtttgcactcagcactgccagcaagtgtgcatgaacgatctgatgaattaagacgggcaaactgccgcaagctgacgctctggcctacgtgcgtcttgaaactttcggatgctgccgtctaactaaatgcatgttccttgatttccactgggaccttgagtttgaagtgtgtaaatatgctgcttatgatgtttttagtattggacctctatcaactgccgttctagttagtaacaatggttgccagtcatggattaccaggtttcgccgagctcctgtatggacgaccacgaaggtctatttcttccattaccaagtgcgaagtgtcacatctaacttgcgtagttgcattcaccttttttctcaaaaaaaaaat

SEQ ID NO: 51395 - DNA, 3819 bp, Zea Mays
gcagtccgcagccatagaaaccatctgactcccgtcggcgagccgcgagaggcgcaacagaagttgtgatatgcaccatggttgggagaactattcaggtccaaggttttgctctaactgacagtgccgaatctgtcaaattgtttttggagcgaattgctggtgctggaaccatctgtgctctcaagctcaggcatccaaggaacatctctgccaactcaagggcatttgctatagttcagttccagtcacaggaaagtgcttcattggtagagaatgcggctcaaagacaggttctcaagattggacggttttatctgagaaccagacctgcagaccgggacattgttccaagaccaaggattccaatgttttctctagaggacattgtgctgcatttgggatgcttggttaaggaaaatatcctatctgctctttttagagcaagtaatgtttcggttcaatttggatttgatatgaaaaagatctacttctacctctcctacaattttactaaatttaaacttgaactttcttacgaaagtatatgggagatgcagcttcaccgtccacctgcttataggtcacggacacagttccttttgattcaggttcaggcagctcctaaaatttataaactgctcccaggccgtccaggtcttatgtttgaggatcctttcttcaactggtttagggatgacacagatgaacaatggaccaggacaattgattttactccatcagctagcatcgggcaatcatctattttatgtctggaggtgccacaacagtgtgagcttccaagaattggcgactactttgtttactataaagagcagaatcttgactttgaatgtcggaatgggtattcatattcctgtggtagcaaccttgtaccaattgtgaaatctcctgattacatagaggtcccttatgagatactcttcaaaatcaaccatttggttcagaatgggacactcagtgggccaacagttgatcatagtttcttccgtcatgttagcccaaaatttgaacctattgatcatataaaacgagcacttttaaagatgacatatttgaaaagcacctgcttgaacccaacagattggttatctgtgcaatactccagaatacggaaatcacgccatgcatcacaaaagttatctaatatatctctggatgatggcttggtctatgtccacagggtgcaagttacccctgctaaagtgtatttttatggacctgagataaatgtctccaatcgcgttgtgcggcatttctctgcagacatagataacttccttcggatttcatttgttgatgaagactgtgagaagctccgttcagctgatttgtcacctcgatctacttctggaaatgatgcaaggagaactgctctgtataatagagttttgtcagtcctttcaaatggcatcaatattggtgacaagcactttgagtttcttgccttttcttcaagtcagcttcgagataactctgcatggatgtttgcttctcggcagggattgactgcgagcgacataaggaagtggatgggggactttcgagatatcagaaatgtggcaaagtatgctgcaagacttgggcaatctttcagttcctcaacagaaactttaaaagtacacaaatctgaggtggaacgaattcctgatattacaaatggcacaaagtacatattctctgatggagttggaaagatctcagctaattttgcagtggaggtggctatgaagtgcaaattgaaacgctttgctccttctgtttttcagataaggtatggcggttacaaaggtgttgtcgctgtagatacaagatcaaatcataagctttctttgagaaaaagcatgtcaaagttccagtcagaaaatatcactcttgatgtccttgcatacagcaagtaccaaccatgcttcctgaatcggcagttgattactcttctctcaacacttggggttagcgataatgtctttgagctaaagcagaaggaagccttaaggcagttgaacagaatggtaactgaaccacaggctgctcgtgaagcagttgaacttatgcccatgggagaagtaaccaatgtagttaaagaattgttgtcatgtggctaccagcctgatcatgagccatatctttccatgctgctacaaacttttagagcatccaagcttctagagttgaaaacaaagtcaaggatattcatcacacaggggcgagcaatgatgggttgcctggatgaaacctgcacacttaagtacggccaggtattcgtccaagcttcttacagtgcagatgaccatcgcaaggtcgttgtaactggaaaagtagttgtcgccaaaaatccttgtctccaccctggtgacatacgggttctccaggctgttgatgttcctgctctgcaccacttgtttgactgtgttgtctttccacagcagggaccaaggccgcaccctaacgagtgttcagggagtgatcttgatggggacatatattttgtttcttgggatccacatcttattccgagtcgtttggtggatcctatggactatactccagcttcagcagaaacattagaccatgatgtcactattgaggagatacaggagtacttcacaaactacatagttaatgagagtcttgggattatcgccaatgcgcatgtggtctttgcagatcaggaacgtatgaaggctgagagtccaccgtgcgttcaactggccaagctcttctctatagctgtcgatttcccaaagactggagtgccggctctgattccacatgagctacatgtcaaggagtatcctgacttcatggagaaactcgacaaagtcacctatgaatcaaagggtgtgatcgggaagctctatagggaaataaagaagcacacaccacacataaagcacttcacgagggaagtggcaaggcggtcttatgacaccgatttgattgttgatggctatgaagattacattactgaggctatagagttcaaggaagagtacgatttcaggctgggtaatcttatggaccactatggcataaaaagtgaagctgagataataagtggatgtattctaaagatggcaaagaatttcaccaagagtagtgatgctgatgcaattagaatggcggtgagatctttgaggaaagaagctaggtcgtggttcaatgagatgagcacaggagaggatggccaagatgccatggaggccaaggcctctgcttggtaccatgttacttatcatcagcagtactggggcagctacaatgaagggtatgatcggccgcatcttattagcttcccatggtgcgtatatgacaagcttgtggccatcaagcaggggaggaatctcctcacgcggatggatcgaaacttgaggttccgttgagcattgccagcaggtttgctcctgtacatatccctgatcgtttgcactcagcactgccagcaagtgtgcatgaacgatctgatgaattaagacgggcaaactgccgcaagctgacgctctggcctacgtgcgtcttgaaactttcggatgctgccgtctaactaaatgcatgttccttgatttccactgggaccttgagtttgaagtgtgtaaatatgctgcttatgatgtttttagtattggacctctatcaactgccgttctagttagtaacaatggttgccagtcatggattaccaggtttcgccgagctcctgtatggacgaccacgaaggtctatttcttccattaccaagtgcgaagtgtcacatctaacttgcgtagttgcattcaccttttttctcaaaaaaaaaat

SEQ ID NO: 51396 - DNA, 3814 bp, Zea Mays
cagccatagaaaccatctgactcccgtcggcgagccgcgagaggcgcaacagaagtagttgtgatatgcaccatggttgggagaactattcaggtccaaggttttgctctaactgacagtgccgaatctgtcaaattgtttttggagcgaattgctggtgctggaaccatctgtgctctcaagctcaggcatccaaggaacatctctgccaactcaagggcatttgctatagttcagttccagtcacaggaaagtgcttcattggtagagaatgcggctcaaagacaggttctcaagattggacggttttatctgagaaccagacctgcagaccgggacattgttccaagaccaaggattccaatgttttctctagaggacattgtgctgcatttgggatgcttggttaaggaaaatatcctatctgctctttttagagcaagtaatgtttcggttcaatttggatttgatatgaaaaagatctacttctacctctcctacaattttactaaatttaaacttgaactttcttacgaaagtatatgggagatgcagcttcaccgtccacctgcttataggtcacggacacagttccttttgattcaggttcaggcagctcctaaaatttataaactgctcccaggccgtccaggtcttatgtttgaggatcctttcttcaactggtttagggatgacacagatgaacaatggaccaggacaattgattttactccatcagctagcatcgggcaatcatctattttatgtctggaggtgccacaacagtgtgagcttccaagaattggcgactactttgtttactataaagagcagaatcttgactttgaatgtcggaatgggtattcatattcctgtggtagcaaccttgtaccaattgtgaaatctcctgattacatagaggtcccttatgagatactcttcaaaatcaaccatttggttcagaatgggacactcagtgggccaacagttgatcatagtttcttccgtcatgttagcccaaaatttgaacctattgatcatataaaacgagcacttttaaagatgacatatttgaaaagcacctgcttgaacccaacagattggttatctgtgcaatactccagaatacggaaatcacgccatgcatcacaaaagttatctaatatatctctggatgatggcttggtctatgtccacagggtgcaagttacccctgctaaagtgtatttttatggacctgagataaatgtctccaatcgcgttgtgcggcatttctctgcagacatagataacttccttcggatttcatttgttgatgaagactgtgagaagctccgttcagctgatttgtcacctcgatctacttctggaaatgatgcaaggagaactgctctgtataatagagttttgtcagtcctttcaaatggcatcaatattggtgacaagcactttgagtttcttgccttttcttcaagtcagcttcgagataactctgcatggatgtttgcttctcggcagggattgactgcgagcgacataaggaagtggatgggggactttcgagatatcagaaatgtggcaaagtatgctgcaagacttgggcaatctttcagttcctcaacagaaactttaaaagtacacaaatctgaggtggaacgaattcctgatattacaaatggcacaaagtacatattctctgatggagttggaaagatctcagctaattttgcagtggaggtggctatgaagtgcaaattgaaacgctttgctccttctgtttttcagataaggtatggcggttacaaaggtgttgtcgctgtagatacaagatcaaatcataagctttctttgagaaaaagcatgtcaaagttccagtcagaaaatatcactcttgatgtccttgcatacagcaagtaccaaccatgcttcctgaatcggcagttgattactcttctctcaacacttggggttagcgataatgtctttgagctaaagcagaaggaagccttaaggcagttgaacagaatggtaactgaaccacaggctgctcgtgaagcagttgaacttatgcccatgggagaagtaaccaatgtagttaaagaattgttgtcatgtggctaccagcctgatcatgagccatatctttccatgctgctacaaacttttagagcatccaagcttctagagttgaaaacaaagtcaaggatattcatcacacaggggcgagcaatgatgggttgcctggatgaaacctgcacacttaagtacggccaggtattcgtccaagcttcttacagtgcagatgaccatcgcaaggtcgttgtaactggaaaagtagttgtcgccaaaaatccttgtctccaccctggtgacatacgggttctccaggctgttgatgttcctgctctgcaccacttgtttgactgtgttgtctttccacagcagggaccaaggccgcaccctaacgagtgttcagggagtgatcttgatggggacatatattttgtttcttgggatccacatcttattccgagtcgtttggtggatcctatggactatactccagcttcagcagaaacattagaccatgatgtcactattgaggagatacaggagtacttcacaaactacatagttaatgagagtcttgggattatcgccaatgcgcatgtggtctttgcagatcaggaacgtatgaaggctgagagtccaccgtgcgttcaactggccaagctcttctctatagctgtcgatttcccaaagactggagtgccggctctgattccacatgagctacatgtcaaggagtatcctgacttcatggagaaactcgacaaagtcacctatgaatcaaagggtgtgatcgggaagctctatagggaaataaagaagcacacaccacacataaagcacttcacgagggaagtggcaaggcggtcttatgacaccgatttgattgttgatggctatgaagattacattactgaggctatagagttcaaggaagagtacgatttcaggctgggtaatcttatggaccactatggcataaaaagtgaagctgagataataagtggatgtattctaaagatggcaaagaatttcaccaagagtagtgatgctgatgcaattagaatggcggtgagatctttgaggaaagaagctaggtcgtggttcaatgagatgagcacaggagaggatggccaagatgccatggaggccaaggcctctgcttggtaccatgttacttatcatcagcagtactggggcagctacaatgaagggtatgatcggccgcatcttattagcttcccatggtgcgtatatgacaagcttgtggccatcaagcaggggaggaatctcctcacgcggatggatcgaaacttgaggttccgttgagcattgccagcaggtttgctcctgtacatatccctgatcgtttgcactcagcactgccagcaagtgtgcatgaacgatctgatgaattaagacgggcaaactgccgcaagctgacgctctggcctacgtgcgtcttgaaactttcggatgctgccgtctaactaaatgcatgttccttgatttccactgggaccttgagtttgaagtgtgtaaatatgctgcttatgatgtttttagtattggacctctatcaactgccgttctagttagtaacaatggttgccagtcatggattaccaggtttcgccgagctcctgtatggacgaccacgaaggtctatttcttccattaccaagtgcgaagtgtcacatctaacttgcgtagttgcattcaccttttttctcaaaaaaaaaat

SEQ ID NO: 51397 - DNA, 3258 bp, Zea Mays
atagaaaccatctgactcccgtcggcgagccgcgagaggcgcaacagaaggttcaggcagctcctaaaatttataaactgctcccaggccgtccaggtcttatgtttgaggatcctttcttcaactggtttagggatgacacagatgaacaatggaccaggacaattgattttactccatcagctagcatcgggcaatcatctattttatgtctggaggtgccacaacagtgtgagcttccaagaattggcgactactttgtttactataaagagcagaatcttgactttgaatgtcggaatgggtattcatattcctgtggtagcaaccttgtaccaattgtgaaatctcctgattacatagaggtcccttatgagatactcttcaaaatcaaccatttggttcagaatgggacactcagtgggccaacagttgatcatagtttcttccgtcatgttagcccaaaatttgaacctattgatcatataaaacgagcacttttaaagatgacatatttgaaaagcacctgcttgaacccaacagattggttatctgtgcaatactccagaatacggaaatcacgccatgcatcacaaaagttatctaatatatctctggatgatggcttggtctatgtccacagggtgcaagttacccctgctaaagtgtatttttatggacctgagataaatgtctccaatcgcgttgtgcggcatttctctgcagacatagataacttccttcggatttcatttgttgatgaagactgtgagaagctccgttcagctgatttgtcacctcgatctacttctggaaatgatgcaaggagaactgctctgtataatagagttttgtcagtcctttcaaatggcatcaatattggtgacaagcactttgagtttcttgccttttcttcaagtcagcttcgagataactctgcatggatgtttgcttctcggcagggattgactgcgagcgacataaggaagtggatgggggactttcgagatatcagaaatgtggcaaagtatgctgcaagacttgggcaatctttcagttcctcaacagaaactttaaaagtacacaaatctgaggtggaacgaattcctgatattacaaatggcacaaagtacatattctctgatggagttggaaagatctcagctaattttgcagtggaggtggctatgaagtgcaaattgaaacgctttgctccttctgtttttcagataaggtatggcggttacaaaggtgttgtcgctgtagatacaagatcaaatcataagctttctttgagaaaaagcatgtcaaagttccagtcagaaaatatcactcttgatgtccttgcatacagcaagtaccaaccatgcttcctgaatcggcagttgattactcttctctcaacacttggggttagcgataatgtctttgagctaaagcagaaggaagccttaaggcagttgaacagaatggtaactgaaccacaggctgctcgtgaagcagttgaacttatgcccatgggagaagtaaccaatgtagttaaagaattgttgtcatgtggctaccagcctgatcatgagccatatctttccatgctgctacaaacttttagagcatccaagcttctagagttgaaaacaaagtcaaggatattcatcacacaggggcgagcaatgatgggttgcctggatgaaacctgcacacttaagtacggccaggtattcgtccaagcttcttacagtgcagatgaccatcgcaaggtcgttgtaactggaaaagtagttgtcgccaaaaatccttgtctccaccctggtgacatacgggttctccaggctgttgatgttcctgctctgcaccacttgtttgactgtgttgtctttccacagcagggaccaaggccgcaccctaacgagtgttcagggagtgatcttgatggggacatatattttgtttcttgggatccacatcttattccgagtcgtttggtggatcctatggactatactccagcttcagcagaaacattagaccatgatgtcactattgaggagatacaggagtacttcacaaactacatagttaatgagagtcttgggattatcgccaatgcgcatgtggtctttgcagatcaggaacgtatgaaggctgagagtccaccgtgcgttcaactggccaagctcttctctatagctgtcgatttcccaaagactggagtgccggctctgattccacatgagctacatgtcaaggagtatcctgacttcatggagaaactcgacaaagtcacctatgaatcaaagggtgtgatcgggaagctctatagggaaataaagaagcacacaccacacataaagcacttcacgagggaagtggcaaggcggtcttatgacaccgatttgattgttgatggctatgaagattacattactgaggctatagagttcaaggaagagtacgatttcaggctgggtaatcttatggaccactatggcataaaaagtgaagctgagataataagtggatgtattctaaagatggcaaagaatttcaccaagagtagtgatgctgatgcaattagaatggcggtgagatctttgaggaaagaagctaggtcgtggttcaatgagatgagcacaggagaggatggccaagatgccatggaggccaaggcctctgcttggtaccatgttacttatcatcagcagtactggggcagctacaatgaagggtatgatcggccgcatcttattagcttcccatggtgcgtatatgacaagcttgtggccatcaagcaggggaggaatctcctcacgcggatggatcgaaacttgaggttccgttgagcattgccagcaggtttgctcctgtacatatccctgatcgtttgcactcagcactgccagcaagtgtgcatgaacgatctgatgaattaagacgggcaaactgccgcaagctgacgctctggcctacgtgcgtcttgaaactttcggatgctgccgtctaactaaatgcatgttccttgatttccactgggaccttgagtttgaagtgtgtaaatatgctgcttatgatgtttttagtattggacctctatcaactgccgttctagttagtaacaatggttgccagtcatggattaccaggtttcgccgagctcctgtatggacgaccacgaaggtctatttcttccattaccaagtgcgaagtgtcacatctaacttgcgtagttgcattcaccttttttctcaaaaaaaaaat

SEQ ID NO: 51398 - DNA, 3829 bp, Zea Mays
cgccccttttcgtgttggtggtttcactgcggagttccaggccgcttccgccctttcaggccgcgtggggaagttgtgatatgcaccatggttgggagaactattcaggtccaaggttttgctctaactgacagtgccgaatctgtcaaattgtttttggagcgaattgctggtgctggaaccatctgtgctctcaagctcaggcatccaaggaacatctctgccaactcaagggcatttgctatagttcagttccagtcacaggaaagtgcttcattggtagagaatgcggctcaaagacaggttctcaagattggacggttttatctgagaaccagacctgcagaccgggacattgttccaagaccaaggattccaatgttttctctagaggacattgtgctgcatttgggatgcttggttaaggaaaatatcctatctgctctttttagagcaagtaatgtttcggttcaatttggatttgatatgaaaaagatctacttctacctctcctacaattttactaaatttaaacttgaactttcttacgaaagtatatgggagatgcagcttcaccgtccacctgcttataggtcacggacacagttccttttgattcaggttcaggcagctcctaaaatttataaactgctcccaggccgtccaggtcttatgtttgaggatcctttcttcaactggtttagggatgacacagatgaacaatggaccaggacaattgattttactccatcagctagcatcgggcaatcatctattttatgtctggaggtgccacaacagtgtgagcttccaagaattggcgactactttgtttactataaagagcagaatcttgactttgaatgtcggaatgggtattcatattcctgtggtagcaaccttgtaccaattgtgaaatctcctgattacatagaggtcccttatgagatactcttcaaaatcaaccatttggttcagaatgggacactcagtgggccaacagttgatcatagtttcttccgtcatgttagcccaaaatttgaacctattgatcatataaaacgagcacttttaaagatgacatatttgaaaagcacctgcttgaacccaacagattggttatctgtgcaatactccagaatacggaaatcacgccatgcatcacaaaagttatctaatatatctctggatgatggcttggtctatgtccacagggtgcaagttacccctgctaaagtgtatttttatggacctgagataaatgtctccaatcgcgttgtgcggcatttctctgcagacatagataacttccttcggatttcatttgttgatgaagactgtgagaagctccgttcagctgatttgtcacctcgatctacttctggaaatgatgcaaggagaactgctctgtataatagagttttgtcagtcctttcaaatggcatcaatattggtgacaagcactttgagtttcttgccttttcttcaagtcagcttcgagataactctgcatggatgtttgcttctcggcagggattgactgcgagcgacataaggaagtggatgggggactttcgagatatcagaaatgtggcaaagtatgctgcaagacttgggcaatctttcagttcctcaacagaaactttaaaagtacacaaatctgaggtggaacgaattcctgatattacaaatggcacaaagtacatattctctgatggagttggaaagatctcagctaattttgcagtggaggtggctatgaagtgcaaattgaaacgctttgctccttctgtttttcagataaggtatggcggttacaaaggtgttgtcgctgtagatacaagatcaaatcataagctttctttgagaaaaagcatgtcaaagttccagtcagaaaatatcactcttgatgtccttgcatacagcaagtaccaaccatgcttcctgaatcggcagttgattactcttctctcaacacttggggttagcgataatgtctttgagctaaagcagaaggaagccttaaggcagttgaacagaatggtaactgaaccacaggctgctcgtgaagcagttgaacttatgcccatgggagaagtaaccaatgtagttaaagaattgttgtcatgtggctaccagcctgatcatgagccatatctttccatgctgctacaaacttttagagcatccaagcttctagagttgaaaacaaagtcaaggatattcatcacacaggggcgagcaatgatgggttgcctggatgaaacctgcacacttaagtacggccaggtattcgtccaagcttcttacagtgcagatgaccatcgcaaggtcgttgtaactggaaaagtagttgtcgccaaaaatccttgtctccaccctggtgacatacgggttctccaggctgttgatgttcctgctctgcaccacttgtttgactgtgttgtctttccacagcagggaccaaggccgcaccctaacgagtgttcagggagtgatcttgatggggacatatattttgtttcttgggatccacatcttattccgagtcgtttggtggatcctatggactatactccagcttcagcagaaacattagaccatgatgtcactattgaggagatacaggagtacttcacaaactacatagttaatgagagtcttgggattatcgccaatgcgcatgtggtctttgcagatcaggaacgtatgaaggctgagagtccaccgtgcgttcaactggccaagctcttctctatagctgtcgatttcccaaagactggagtgccggctctgattccacatgagctacatgtcaaggagtatcctgacttcatggagaaactcgacaaagtcacctatgaatcaaagggtgtgatcgggaagctctatagggaaataaagaagcacacaccacacataaagcacttcacgagggaagtggcaaggcggtcttatgacaccgatttgattgttgatggctatgaagattacattactgaggctatagagttcaaggaagagtacgatttcaggctgggtaatcttatggaccactatggcataaaaagtgaagctgagataataagtggatgtattctaaagatggcaaagaatttcaccaagagtagtgatgctgatgcaattagaatggcggtgagatctttgaggaaagaagctaggtcgtggttcaatgagatgagcacaggagaggatggccaagatgccatggaggccaaggcctctgcttggtaccatgttacttatcatcagcagtactggggcagctacaatgaagggtatgatcggccgcatcttattagcttcccatggtgcgtatatgacaagcttgtggccatcaagcaggggaggaatctcctcacgcggatggatcgaaacttgaggttccgttgagcattgccagcaggtttgctcctgtacatatccctgatcgtttgcactcagcactgccagcaagtgtgcatgaacgatctgatgaattaagacgggcaaactgccgcaagctgacgctctggcctacgtgcgtcttgaaactttcggatgctgccgtctaactaaatgcatgttccttgatttccactgggaccttgagtttgaagtgtgtaaatatgctgcttatgatgtttttagtattggacctctatcaactgccgttctagttagtaacaatggttgccagtcatggattaccaggtttcgccgagctcctgtatggacgaccacgaaggtctatttcttccattaccaagtgcgaagtgtcacatctaacttgcgtagttgcattcaccttttttctcaaaaaaaaaat

SEQ ID NO: 51399 - DNA, 4778 bp, Zea Mays
ctcaaaggcccgaaaaaacacaggtcaccgtcctctcctctagcgccgcccatccatccagccgtccaacgcctactaccgccgccacccgcctcccgcctctcctctagccccagccgttcagcgccgcccgcctccctcctctcctcctctcctccctcctccagtgccgccacgacgctcgccactagcgccgttcgcctcctccaacgcccgagcaccgcctccctcctccctcctccagcgccgactgcccctaacaccgccctctagctcctctagcagccagcgtcgcttacagccatcaagttccagggcaggagtcaagacagtgaatcacccagctgctctattcggccggctgtgctcgtttcgtcccttgtgcgggagctttgtttgagatttgagtcgttgcagctaaatcatggaagatagtaatgccctgattttgccctgcaaaaggaagaacaaggcgcaagtgaaagccaaggatggtaagaaagccaagaaggaagacccaaagatgagcaagacgaagctcaaaaagctgcaaaaattggaggaggaaaagaaaaagaagctgctacaagctaaaagcatcgaggttttgcagaagcacaagatctcagaggatgcatattcactgcttcatgcttcagggactattggtcaagctgagactttgaaagaaaaacggaggcgtgctgtgcaattctcaaaggctggcctggatgttcctgaagaactctcactgttcaagaaaagcggtggtacgaaagttcctgaaaacagtgatgttggggagcaagtttccccattaaagtttgttgagccagcaccaattgtggattctggtagagaatgtaataacaaaatgaaggatctagtgaaagctattgaatgccaaccgattatgggttttggagctggcattccagagccagaaactgaagagcctagtgatgatgctcatatgttgacaaatcagaaaattcagttgtcaattccaagttgttctggagcagaattagatttgcagggtaaagaactaggacaagggcagcattctgtacaggagtgcataaatcctccaattgttgtacctgtgtcaagactgcatgaagttgagaaggcaaggagggatctcccaataataatgatggagcaagaaataatggaagctatctatgaaaattctgtagtaattctgtgcggagagactggctgcggtaaaactacccaggttccccagttcctatacgaagctggcttcggcactagtgaccgagctgatagaaaagggatgattggtatcacacaaccacggcgcgtagctgttcatgccacagctaagagggtttcctatgagttaggacttaagctgggaagagaagttggttttcaagttaggcatgatagaaaggtaggaagtgaatgctccatcaagttcatgacagatggtattttgctgcgagaaatccagggtgattttctgttgaagcgctattcagtgatcatattggatgaggcacacgaaaggagcttgaacacagatatacttattgggatgctttctagaattataaagattcgcaaggatttgtatgcaaagcagcaggaaaaattacggtctggatttaagatcaaaccagaggataagatcagtcagttaaaggtggtgctcatgagtgctactctgcagttaaaggactttatttcaaatagaaggttgtttggcgtgatcccaccagctgttaaggtacctgtgcggcagtttccagtatcagttcacttctcaaagaggacacatgatgattatttagggctagcttataaaaaggttatgtcaatccacaagaggcttccaccaggtggaatcctcgtatttgtcactggacaacgggaagtggagtacttgtgtaagaaactgcgaagagcatccaaggtgcaaactgctaagaatcctgggaaaactgatggtgaagacaatggtccatgcccaaaagtagatgaaaaggaaatttttgaagcatatgatattgacagagatgaacccgagcaccgatatgacatgttttcctcgtatgatgacgatggtatgtatgatgacgatggtatgaatgttgagacaaatattgattcttctgacaacgaaacggagagcgaaatggatactgaaaccgatgacgaagagtctgttactattgaaactacagaagaggatgttccagtattagcatttttgaaagatgctgagagctcatctgcgttgaaggcatcatttggagctttgtcgggaataccaaatgtgctggaaagtgtcgaggaattaagtgatgctaaatgtgaagaaaagaccagcacttcacttcgttgttttagtaaatgcacagaacataagcctgtttcacatggtagacttcgtgtcttgccactttatgcaaagttatcagcttcacaacagcttcaagtgtttgaagatgtcccagagggggaaagattagttgtggtggcaactaatgttgccgaaacctctctaacaattccaggcataaaatatgtagttgatactggaaaagaaaaggttaagaattatgatcatgctactgggatgtcaagttatgatgtccaatggataagcaaggcatcagcatcccagcgtgctggaagagcaggaagaacagggcctggccactgttaccgtctctactcagctgcagcatatggtaaagatgatttattccctgaattcgctgaacctcagattaagaaaattccagttgaaggtgttgtcctgatgctcaagttcatgtctattgataaggttgagaactttcctttcccaacaccaccaaacaaggaaagtttggttgaagctgagcgttgcttaaagacattggaagcacttcatagtgatggaaaacttacacctatgggcaaggcaatggcacagtaccccatgagcccaagacattctcgtcttcttcttacagtgattaagaatttgaagaataagcagcaaggctttgctagatctaacttcatattaggatatgctgctgctgctgcatcaggtttgaattttactaatccttttctcaagcaattggatgaatgtgacacttatggtgaatcagtagaaaacactaatctggaagctaatggtccatgggaaaggaagagacagaagaagctcaaggctgtggttagagaggcacgggaaaagttttctaaccctagcagtgatgctttaaccatcgctcgtgccctgcagttctttgagttgtcagaaaacccagtggaattctgcagagccaattcacttcatcttaaaaccatggaagagatgtcaaagttgagaaagcagcttctgcagttaatatttcgccatagcaaatggtgcgaggagtttgcttggaattcgggtgactctgctgaggttgaacgggcctggaggaacgagcccagtatattgcagttgaatgaagaggaacttcttgggcaaggaatttgcgctggatgggctgatagagttgcaaggaggattcacacctatttgaaaccatcagaagacgatcgaaaggttcgagccgttcgttatcagtcttgtgcacttgatgatacaatatatctgcaccgatcatcatctgtcgcccaagttgccccagagcttgtagtttactcggagctacttagtacaaagaggctatacatgcacggtgtaacgaccgtaaagccagggtggcttttgaagtatgctagttccctctgcaccttctctgcaccgttggaagatccgaagccgtactatgacccactgaacgaccaagtctactgctacgttagcccggtcttctctcgtcataactggcagcttccgttgcacagtttacctatcaaagacggtgcgagccggctgcaggtgtttgcatgcgcgttgcttaaaggggacgtcctgccatgtctacgggacgccaaggatttcctcgcgctgtcaccatccgctgtgttggggcctgccaggcaacggagagtgggagatcttcttagcaggatgaagatcggtccgaagttagtcgacagcagggcagcactgagaggcgtgtggaattttgatcctggttttctctatcctgagctcaagttgtggtaccaggatagattccatgaccagtttgacttggtgtgggagcagatgcaccaacaggttctccttgaggggcgcaagcttttcccaaagaggtccaagaaagttaaaggctaggccaaaatttttggtgcagttggttggctggcagaagcttttttgtgtgtgtggttttaaggaatagatacgagagatgcagtgagacatcatgcacaagcagttttgtctagacattttgccttgatctggatttgttccattgcatctccgtgttgaactgttgatgtacaccgttcctctgcaagcaaccttcaccctgccatctgtgtcagaaatgttttctgatccaaccatttgctcaaaaccttgaacctgaaaaatatcctgatatccaaccatcgccatggcccatggggattggagggaattggcttcgagtgagggccaggggtaggattcgccagaaacaaacaggggatggtcgtgcgcagattgattacatttctctcctttccgtctctcgctctatttgcttttagcatatgaagtgtccgattccaggggtaaaaacagcggtagagtcgatataaaaatgtagcactaaactatattaccctcagttcaagaaaac

SEQ ID NO: 51400 - DNA, 4809 bp, Zea Mays
ctcaaaggcccgaaaaaacacaggtcaccgtcctctcctctagcgccgcccatccatccagccgtccaacgcctactaccgccgccacccgcctcccgcctctcctctagccccagccgttcagcgccgcccgcctccctcctctcctcctctcctccctcctccagtgccgccacgacgctcgccactagcgccgttcgcctcctccaacgcccgagcaccgcctccctcctccctcctccagcgccgactgcccctaacaccgccctctagctcctctagcagccagcgtcgcttacagccatcaagttccagggcaggagtcaagacagtgaatcacccagctgctctattcggttcaaatcctgtgtcggccactgcccatatggtttcaggccggctgtgctcgtttcgtcccttgtgcgggagctttgtttgagatttgagtcgttgcagctaaatcatggaagatagtaatgccctgattttgccctgcaaaaggaagaacaaggcgcaagtgaaagccaaggatggtaagaaagccaagaaggaagacccaaagatgagcaagacgaagctcaaaaagctgcaaaaattggaggaggaaaagaaaaagaagctgctacaagctaaaagcatcgaggaagcacaagatctcagaggatgcatattcactgcttcatgcttcagggactattggtcaagctgagactttgaaagaaaaacggaggcgtgctgtgcaattctcaaaggctggcctggatgttcctgaagaactctcactgttcaagaaaagcggtggtacgaaagttcctgaaaacagtgatgttggggagcaagtttccccattaaagtttgttgagccagcaccaattgtggattctggtagagaatgtaataacaaaatgaaggatctagtgaaagctattgaatgccaaccgattatgggttttggagctggcattccagagccagaaactgaagagcctagtgatgatgctcatatgttgacaaatcagaaaattcagttgtcaattccaagttgttctggagcagaattagatttgcagggtaaagaactaggacaagggcagcattctgtacaggagtgcataaatcctccaattgttgtacctgtgtcaagactgcatgaagttgagaaggcaaggagggatctcccaataataatgatggagcaagaaataatggaagctatctatgaaaattctgtagtaattctgtgcggagagactggctgcggtaaaactacccaggttccccagttcctatacgaagctggcttcggcactagtgaccgagctgatagaaaagggatgattggtatcacacaaccacggcgcgtagctgttcatgccacagctaagagggtttcctatgagttaggacttaagctgggaagagaagttggttttcaagttaggcatgatagaaaggtaggaagtgaatgctccatcaagttcatgacagatggtattttgctgcgagaaatccagggtgattttctgttgaagcgctattcagtgatcatattggatgaggcacacgaaaggagcttgaacacagatatacttattgggatgctttctagaattataaagattcgcaaggatttgtatgcaaagcagcaggaaaaattacggtctggatttaagatcaaaccagaggataagatcagtcagttaaaggtggtgctcatgagtgctactctgcagttaaaggactttatttcaaatagaaggttgtttggcgtgatcccaccagctgttaaggtacctgtgcggcagtttccagtatcagttcacttctcaaagaggacacatgatgattatttagggctagcttataaaaaggttatgtcaatccacaagaggcttccaccaggtggaatcctcgtatttgtcactggacaacgggaagtggagtacttgtgtaagaaactgcgaagagcatccaaggtgcaaactgctaagaatcctgggaaaactgatggtgaagacaatggtccatgcccaaaagtagatgaaaaggaaatttttgaagcatatgatattgacagagatgaacccgagcaccgatatgacatgttttcctcgtatgatgacgatggtatgtatgatgacgatggtatgaatgttgagacaaatattgattcttctgacaacgaaacggagagcgaaatggatactgaaaccgatgacgaagagtctgttactattgaaactacagaagaggatgttccagtattagcatttttgaaagatgctgagagctcatctgcgttgaaggcatcatttggagctttgtcgggaataccaaatgtgctggaaagtgtcgaggaattaagtgatgctaaatgtgaagaaaagaccagcacttcacttcgttgttttagtaaatgcacagaacataagcctgtttcacatggtagacttcgtgtcttgccactttatgcaaagttatcagcttcacaacagcttcaagtgtttgaagatgtcccagagggggaaagattagttgtggtggcaactaatgttgccgaaacctctctaacaattccaggcataaaatatgtagttgatactggaaaagaaaaggttaagaattatgatcatgctactgggatgtcaagttatgatgtccaatggataagcaaggcatcagcatcccagcgtgctggaagagcaggaagaacagggcctggccactgttaccgtctctactcagctgcagcatatggtaaagatgatttattccctgaattcgctgaacctcagattaagaaaattccagttgaaggtgttgtcctgatgctcaagttcatgtctattgataaggttgagaactttcctttcccaacaccaccaaacaaggaaagtttggttgaagctgagcgttgcttaaagacattggaagcacttcatagtgatggaaaacttacacctatgggcaaggcaatggcacagtaccccatgagcccaagacattctcgtcttcttcttacagtgattaagaatttgaagaataagcagcaaggctttgctagatctaacttcatattaggatatgctgctgctgctgcatcaggtttgaattttactaatccttttctcaagcaattggatgaatgtgacacttatggtgaatcagtagaaaacactaatctggaagctaatggtccatgggaaaggaagagacagaagaagctcaaggctgtggttagagaggcacgggaaaagttttctaaccctagcagtgatgctttaaccatcgctcgtgccctgcagttctttgagttgtcagaaaacccagtggaattctgcagagccaattcacttcatcttaaaaccatggaagagatgtcaaagttgagaaagcagcttctgcagttaatatttcgccatagcaaatggtgcgaggagtttgcttggaattcgggtgactctgctgaggttgaacgggcctggaggaacgagcccagtatattgcagttgaatgaagaggaacttcttgggcaaggaatttgcgctggatgggctgatagagttgcaaggaggattcacacctatttgaaaccatcagaagacgatcgaaaggttcgagccgttcgttatcagtcttgtgcacttgatgatacaatatatctgcaccgatcatcatctgtcgcccaagttgccccagagcttgtagtttactcggagctacttagtacaaagaggctatacatgcacggtgtaacgaccgtaaagccagggtggcttttgaagtatgctagttccctctgcaccttctctgcaccgttggaagatccgaagccgtactatgacccactgaacgaccaagtctactgctacgttagcccggtcttctctcgtcataactggcagcttccgttgcacagtttacctatcaaagacggtgcgagccggctgcaggtgtttgcatgcgcgttgcttaaaggggacgtcctgccatgtctacgggacgccaaggatttcctcgcgctgtcaccatccgctgtgttggggcctgccaggcaacggagagtgggagatcttcttagcaggatgaagatcggtccgaagttagtcgacagcagggcagcactgagaggcgtgtggaattttgatcctggttttctctatcctgagctcaagttgtggtaccaggatagattccatgaccagtttgacttggtgtgggagcagatgcaccaacaggttctccttgaggggcgcaagcttttcccaaagaggtccaagaaagttaaaggctaggccaaaatttttggtgcagttggttggctggcagaagcttttttgtgtgtgtggttttaaggaatagatacgagagatgcagtgagacatcatgcacaagcagttttgtctagacattttgccttgatctggatttgttccattgcatctccgtgttgaactgttgatgtacaccgttcctctgcaagcaaccttcaccctgccatctgtgtcagaaatgttttctgatccaaccatttgctcaaaaccttgaacctgaaaaatatcctgatatccaaccatcgccatggcccatggggattggagggaattggcttcgagtgagggccaggggtaggattcgccagaaacaaacaggggatggtcgtgcgcagattgattacatttctctcctttccgtctctcgctctatttgcttttagcatatgaagtgtccgattccaggggtaaaaacagcggtagagtcgatataaaaatgtagcactaaactatattaccctcagttcaagaaaac

SEQ ID NO: 51401 - DNA, 4817 bp, Zea Mays
ctcaaaggcccgaaaaaacacaggtcaccgtcctctcctctagcgccgcccatccatccagccgtccaacgcctactaccgccgccacccgcctcccgcctctcctctagccccagccgttcagcgccgcccgcctccctcctctcctcctctcctccctcctccagtgccgccacgacgctcgccactagcgccgttcgcctcctccaacgcccgagcaccgcctccctcctccctcctccagcgccgactgcccctaacaccgccctctagctcctctagcagccagcgtcgcttacagccatcaagttccagggcaggagtcaagacagtgaatcacccagctgctctattcggttcaaatcctgtgtcggccactgcccatatggtttcaggccggctgtgctcgtttcgtcccttgtgcgggagctttgtttgagatttgagtcgttgcagctaaatcatggaagatagtaatgccctgattttgccctgcaaaaggaagaacaaggcgcaagtgaaagccaaggatggtaagaaagccaagaaggaagacccaaagatgagcaagacgaagctcaaaaagctgcaaaaattggaggaggaaaagaaaaagaagctgctacaagctaaaagcatcgaggttttgcagaagcacaagatctcagaggatgcatattcactgcttcatgcttcagggactattggtcaagctgagactttgaaagaaaaacggaggcgtgctgtgcaattctcaaaggctggcctggatgttcctgaagaactctcactgttcaagaaaagcggtggtacgaaagttcctgaaaacagtgatgttggggagcaagtttccccattaaagtttgttgagccagcaccaattgtggattctggtagagaatgtaataacaaaatgaaggatctagtgaaagctattgaatgccaaccgattatgggttttggagctggcattccagagccagaaactgaagagcctagtgatgatgctcatatgttgacaaatcagaaaattcagttgtcaattccaagttgttctggagcagaattagatttgcagggtaaagaactaggacaagggcagcattctgtacaggagtgcataaatcctccaattgttgtacctgtgtcaagactgcatgaagttgagaaggcaaggagggatctcccaataataatgatggagcaagaaataatggaagctatctatgaaaattctgtagtaattctgtgcggagagactggctgcggtaaaactacccaggttccccagttcctatacgaagctggcttcggcactagtgaccgagctgatagaaaagggatgattggtatcacacaaccacggcgcgtagctgttcatgccacagctaagagggtttcctatgagttaggacttaagctgggaagagaagttggttttcaagttaggcatgatagaaaggtaggaagtgaatgctccatcaagttcatgacagatggtattttgctgcgagaaatccagggtgattttctgttgaagcgctattcagtgatcatattggatgaggcacacgaaaggagcttgaacacagatatacttattgggatgctttctagaattataaagattcgcaaggatttgtatgcaaagcagcaggaaaaattacggtctggatttaagatcaaaccagaggataagatcagtcagttaaaggtggtgctcatgagtgctactctgcagttaaaggactttatttcaaatagaaggttgtttggcgtgatcccaccagctgttaaggtacctgtgcggcagtttccagtatcagttcacttctcaaagaggacacatgatgattatttagggctagcttataaaaaggttatgtcaatccacaagaggcttccaccaggtggaatcctcgtatttgtcactggacaacgggaagtggagtacttgtgtaagaaactgcgaagagcatccaaggtgcaaactgctaagaatcctgggaaaactgatggtgaagacaatggtccatgcccaaaagtagatgaaaaggaaatttttgaagcatatgatattgacagagatgaacccgagcaccgatatgacatgttttcctcgtatgatgacgatggtatgtatgatgacgatggtatgaatgttgagacaaatattgattcttctgacaacgaaacggagagcgaaatggatactgaaaccgatgacgaagagtctgttactattgaaactacagaagaggatgttccagtattagcatttttgaaagatgctgagagctcatctgcgttgaaggcatcatttggagctttgtcgggaataccaaatgtgctggaaagtgtcgaggaattaagtgatgctaaatgtgaagaaaagaccagcacttcacttcgttgttttagtaaatgcacagaacataagcctgtttcacatggtagacttcgtgtcttgccactttatgcaaagttatcagcttcacaacagcttcaagtgtttgaagatgtcccagagggggaaagattagttgtggtggcaactaatgttgccgaaacctctctaacaattccaggcataaaatatgtagttgatactggaaaagaaaaggttaagaattatgatcatgctactgggatgtcaagttatgatgtccaatggataagcaaggcatcagcatcccagcgtgctggaagagcaggaagaacagggcctggccactgttaccgtctctactcagctgcagcatatggtaaagatgatttattccctgaattcgctgaacctcagattaagaaaattccagttgaaggtgttgtcctgatgctcaagttcatgtctattgataaggttgagaactttcctttcccaacaccaccaaacaaggaaagtttggttgaagctgagcgttgcttaaagacattggaagcacttcatagtgatggaaaacttacacctatgggcaaggcaatggcacagtaccccatgagcccaagacattctcgtcttcttcttacagtgattaagaatttgaagaataagcagcaaggctttgctagatctaacttcatattaggatatgctgctgctgctgcatcaggtttgaattttactaatccttttctcaagcaattggatgaatgtgacacttatggtgaatcagtagaaaacactaatctggaagctaatggtccatgggaaaggaagagacagaagaagctcaaggctgtggttagagaggcacgggaaaagttttctaaccctagcagtgatgctttaaccatcgctcgtgccctgcagttctttgagttgtcagaaaacccagtggaattctgcagagccaattcacttcatcttaaaaccatggaagagatgtcaaagttgagaaagcagcttctgcagttaatatttcgccatagcaaatggtgcgaggagtttgcttggaattcgggtgactctgctgaggttgaacgggcctggaggaacgagcccagtatattgcagttgaatgaagaggaacttcttgggcaaggaatttgcgctggatgggctgatagagttgcaaggaggattcacacctatttgaaaccatcagaagacgatcgaaaggttcgagccgttcgttatcagtcttgtgcacttgatgatacaatatatctgcaccgatcatcatctgtcgcccaagttgccccagagcttgtagtttactcggagctacttagtacaaagaggctatacatgcacggtgtaacgaccgtaaagccagggtggcttttgaagtatgctagttccctctgcaccttctctgcaccgttggaagatccgaagccgtactatgacccactgaacgaccaagtctactgctacgttagcccggtcttctctcgtcataactggcagcttccgttgcacagtttacctatcaaagacggtgcgagccggctgcaggtgtttgcatgcgcgttgcttaaaggggacgtcctgccatgtctacgggacgccaaggatttcctcgcgctgtcaccatccgctgtgttggggcctgccaggcaacggagagtgggagatcttcttagcaggatgaagatcggtccgaagttagtcgacagcagggcagcactgagaggcgtgtggaattttgatcctggttttctctatcctgagctcaagttgtggtaccaggatagattccatgaccagtttgacttggtgtgggagcagatgcaccaacaggttctccttgaggggcgcaagcttttcccaaagaggtccaagaaagttaaaggctaggccaaaatttttggtgcagttggttggctggcagaagcttttttgtgtgtgtggttttaaggaatagatacgagagatgcagtgagacatcatgcacaagcagttttgtctagacattttgccttgatctggatttgttccattgcatctccgtgttgaactgttgatgtacaccgttcctctgcaagcaaccttcaccctgccatctgtgtcagaaatgttttctgatccaaccatttgctcaaaaccttgaacctgaaaaatatcctgatatccaaccatcgccatggcccatggggattggagggaattggcttcgagtgagggccaggggtaggattcgccagaaacaaacaggggatggtcgtgcgcagattgattacatttctctcctttccgtctctcgctctatttgcttttagcatatgaagtgtccgattccaggggtaaaaacagcggtagagtcgatataaaaatgtagcactaaactatattaccctcagttcaagaaaac

SEQ ID NO: 51402 - DNA, 4705 bp, Zea Mays
aaaaaacacaggtcaccgtcctctcctctagcgccgcccatccatccagccgtccaacgcctactaccgccgccacccgcctcccgcctctcctctagccccagccgttcagcgccgcccgcctccctcctctcctcctctcctccctcctccagtgccgccacgacgctcgccactagcgccgttcgcctcctccaacgcccgagcaccgcctccctcctccctcctccagcgccgactgcccctaacaccgccctctagctcctctagcagccagcgtcgcttacagccatcaagttccagggcaggagtcaagacagtgaatcacccagctgctctattcgctaaatcatggaagatagtaatgccctgattttgccctgcaaaaggaagaacaaggcgcaagtgaaagccaaggatggtaagaaagccaagaaggaagacccaaagatgagcaagacgaagctcaaaaagctgcaaaaattggaggaggaaaagaaaaagaagctgctacaagctaaaagcatcgaggttttgcagaagcacaagatctcagaggatgcatattcactgcttcatgcttcagggactattggtcaagctgagactttgaaagaaaaacggaggcgtgctgtgcaattctcaaaggctggcctggatgttcctgaagaactctcactgttcaagaaaagcggtggtacgaaagttcctgaaaacagtgatgttggggagcaagtttccccattaaagtttgttgagccagcaccaattgtggattctggtagagaatgtaataacaaaatgaaggatctagtgaaagctattgaatgccaaccgattatgggttttggagctggcattccagagccagaaactgaagagcctagtgatgatgctcatatgttgacaaatcagaaaattcagttgtcaattccaagttgttctggagcagaattagatttgcagggtaaagaactaggacaagggcagcattctgtacaggagtgcataaatcctccaattgttgtacctgtgtcaagactgcatgaagttgagaaggcaaggagggatctcccaataataatgatggagcaagaaataatggaagctatctatgaaaattctgtagtaattctgtgcggagagactggctgcggtaaaactacccaggttccccagttcctatacgaagctggcttcggcactagtgaccgagctgatagaaaagggatgattggtatcacacaaccacggcgcgtagctgttcatgccacagctaagagggtttcctatgagttaggacttaagctgggaagagaagttggttttcaagttaggcatgatagaaaggtaggaagtgaatgctccatcaagttcatgacagatggtattttgctgcgagaaatccagggtgattttctgttgaagcgctattcagtgatcatattggatgaggcacacgaaaggagcttgaacacagatatacttattgggatgctttctagaattataaagattcgcaaggatttgtatgcaaagcagcaggaaaaattacggtctggatttaagatcaaaccagaggataagatcagtcagttaaaggtggtgctcatgagtgctactctgcagttaaaggactttatttcaaatagaaggttgtttggcgtgatcccaccagctgttaaggtacctgtgcggcagtttccagtatcagttcacttctcaaagaggacacatgatgattatttagggctagcttataaaaaggttatgtcaatccacaagaggcttccaccaggtggaatcctcgtatttgtcactggacaacgggaagtggagtacttgtgtaagaaactgcgaagagcatccaaggtgcaaactgctaagaatcctgggaaaactgatggtgaagacaatggtccatgcccaaaagtagatgaaaaggaaatttttgaagcatatgatattgacagagatgaacccgagcaccgatatgacatgttttcctcgtatgatgacgatggtatgtatgatgacgatggtatgaatgttgagacaaatattgattcttctgacaacgaaacggagagcgaaatggatactgaaaccgatgacgaagagtctgttactattgaaactacagaagaggatgttccagtattagcatttttgaaagatgctgagagctcatctgcgttgaaggcatcatttggagctttgtcgggaataccaaatgtgctggaaagtgtcgaggaattaagtgatgctaaatgtgaagaaaagaccagcacttcacttcgttgttttagtaaatgcacagaacataagcctgtttcacatggtagacttcgtgtcttgccactttatgcaaagttatcagcttcacaacagcttcaagtgtttgaagatgtcccagagggggaaagattagttgtggtggcaactaatgttgccgaaacctctctaacaattccaggcataaaatatgtagttgatactggaaaagaaaaggttaagaattatgatcatgctactgggatgtcaagttatgatgtccaatggataagcaaggcatcagcatcccagcgtgctggaagagcaggaagaacagggcctggccactgttaccgtctctactcagctgcagcatatggtaaagatgatttattccctgaattcgctgaacctcagattaagaaaattccagttgaaggtgttgtcctgatgctcaagttcatgtctattgataaggttgagaactttcctttcccaacaccaccaaacaaggaaagtttggttgaagctgagcgttgcttaaagacattggaagcacttcatagtgatggaaaacttacacctatgggcaaggcaatggcacagtaccccatgagcccaagacattctcgtcttcttcttacagtgattaagaatttgaagaataagcagcaaggctttgctagatctaacttcatattaggatatgctgctgctgctgcatcaggtttgaattttactaatccttttctcaagcaattggatgaatgtgacacttatggtgaatcagtagaaaacactaatctggaagctaatggtccatgggaaaggaagagacagaagaagctcaaggctgtggttagagaggcacgggaaaagttttctaaccctagcagtgatgctttaaccatcgctcgtgccctgcagttctttgagttgtcagaaaacccagtggaattctgcagagccaattcacttcatcttaaaaccatggaagagatgtcaaagttgagaaagcagcttctgcagttaatatttcgccatagcaaatggtgcgaggagtttgcttggaattcgggtgactctgctgaggttgaacgggcctggaggaacgagcccagtatattgcagttgaatgaagaggaacttcttgggcaaggaatttgcgctggatgggctgatagagttgcaaggaggattcacacctatttgaaaccatcagaagacgatcgaaaggttcgagccgttcgttatcagtcttgtgcacttgatgatacaatatatctgcaccgatcatcatctgtcgcccaagttgccccagagcttgtagtttactcggagctacttagtacaaagaggctatacatgcacggtgtaacgaccgtaaagccagggtggcttttgaagtatgctagttccctctgcaccttctctgcaccgttggaagatccgaagccgtactatgacccactgaacgaccaagtctactgctacgttagcccggtcttctctcgtcataactggcagcttccgttgcacagtttacctatcaaagacggtgcgagccggctgcaggtgtttgcatgcgcgttgcttaaaggggacgtcctgccatgtctacgggacgccaaggatttcctcgcgctgtcaccatccgctgtgttggggcctgccaggcaacggagagtgggagatcttcttagcaggatgaagatcggtccgaagttagtcgacagcagggcagcactgagaggcgtgtggaattttgatcctggttttctctatcctgagctcaagttgtggtaccaggatagattccatgaccagtttgacttggtgtgggagcagatgcaccaacaggttctccttgaggggcgcaagcttttcccaaagaggtccaagaaagttaaaggctaggccaaaatttttggtgcagttggttggctggcagaagcttttttgtgtgtgtggttttaaggaatagatacgagagatgcagtgagacatcatgcacaagcagttttgtctagacattttgccttgatctggatttgttccattgcatctccgtgttgaactgttgatgtacaccgttcctctgcaagcaaccttcaccctgccatctgtgtcagaaatgttttctgatccaaccatttgctcaaaaccttgaacctgaaaaatatcctgatatccaaccatcgccatggcccatggggattggagggaattggcttcgagtgagggccaggggtaggattcgccagaaacaaacaggggatggtcgtgcgcagattgattacatttctctcctttccgtctctcgctctatttgcttttagcatatgaagtgtccgattccaggggtaaaaacagcggtagagtcgatataaaaatgtagcactaaactatattaccctcagttcaagaaaac

SEQ ID NO: 51403 - DNA, 4758 bp, Zea Mays
aaaaaacacaggtcaccgtcctctcctctagcgccgcccatccatccagccgtccaacgcctactaccgccgccacccgcctcccgcctctcctctagccccagccgttcagcgccgcccgcctccctcctctcctcctctcctccctcctccagtgccgccacgacgctcgccactagcgccgttcgcctcctccaacgcccgagcaccgcctccctcctccctcctccagcgccgactgcccctaacaccgccctctagctcctctagcagccagcgtcgcttacagccatcaagttccagggcaggagtcaagacagtgaatcacccagctgctctattcggccggctgtgctcgtttcgtcccttgtgcgggagctttgtttgagatttgagtcgttgcagctaaatcatggaagatagtaatgccctgattttgccctgcaaaaggaagaacaaggcgcaagtgaaagccaaggatggtaagaaagccaagaaggaagacccaaagatgagcaagacgaagctcaaaaagctgcaaaaattggaggaggaaaagaaaaagaagctgctacaagctaaaagcatcgaggaagcacaagatctcagaggatgcatattcactgcttcatgcttcagggactattggtcaagctgagactttgaaagaaaaacggaggcgtgctgtgcaattctcaaaggctggcctggatgttcctgaagaactctcactgttcaagaaaagcggtggtacgaaagttcctgaaaacagtgatgttggggagcaagtttccccattaaagtttgttgagccagcaccaattgtggattctggtagagaatgtaataacaaaatgaaggatctagtgaaagctattgaatgccaaccgattatgggttttggagctggcattccagagccagaaactgaagagcctagtgatgatgctcatatgttgacaaatcagaaaattcagttgtcaattccaagttgttctggagcagaattagatttgcagggtaaagaactaggacaagggcagcattctgtacaggagtgcataaatcctccaattgttgtacctgtgtcaagactgcatgaagttgagaaggcaaggagggatctcccaataataatgatggagcaagaaataatggaagctatctatgaaaattctgtagtaattctgtgcggagagactggctgcggtaaaactacccaggttccccagttcctatacgaagctggcttcggcactagtgaccgagctgatagaaaagggatgattggtatcacacaaccacggcgcgtagctgttcatgccacagctaagagggtttcctatgagttaggacttaagctgggaagagaagttggttttcaagttaggcatgatagaaaggtaggaagtgaatgctccatcaagttcatgacagatggtattttgctgcgagaaatccagggtgattttctgttgaagcgctattcagtgatcatattggatgaggcacacgaaaggagcttgaacacagatatacttattgggatgctttctagaattataaagattcgcaaggatttgtatgcaaagcagcaggaaaaattacggtctggatttaagatcaaaccagaggataagatcagtcagttaaaggtggtgctcatgagtgctactctgcagttaaaggactttatttcaaatagaaggttgtttggcgtgatcccaccagctgttaaggtacctgtgcggcagtttccagtatcagttcacttctcaaagaggacacatgatgattatttagggctagcttataaaaaggttatgtcaatccacaagaggcttccaccaggtggaatcctcgtatttgtcactggacaacgggaagtggagtacttgtgtaagaaactgcgaagagcatccaaggtgcaaactgctaagaatcctgggaaaactgatggtgaagacaatggtccatgcccaaaagtagatgaaaaggaaatttttgaagcatatgatattgacagagatgaacccgagcaccgatatgacatgttttcctcgtatgatgacgatggtatgtatgatgacgatggtatgaatgttgagacaaatattgattcttctgacaacgaaacggagagcgaaatggatactgaaaccgatgacgaagagtctgttactattgaaactacagaagaggatgttccagtattagcatttttgaaagatgctgagagctcatctgcgttgaaggcatcatttggagctttgtcgggaataccaaatgtgctggaaagtgtcgaggaattaagtgatgctaaatgtgaagaaaagaccagcacttcacttcgttgttttagtaaatgcacagaacataagcctgtttcacatggtagacttcgtgtcttgccactttatgcaaagttatcagcttcacaacagcttcaagtgtttgaagatgtcccagagggggaaagattagttgtggtggcaactaatgttgccgaaacctctctaacaattccaggcataaaatatgtagttgatactggaaaagaaaaggttaagaattatgatcatgctactgggatgtcaagttatgatgtccaatggataagcaaggcatcagcatcccagcgtgctggaagagcaggaagaacagggcctggccactgttaccgtctctactcagctgcagcatatggtaaagatgatttattccctgaattcgctgaacctcagattaagaaaattccagttgaaggtgttgtcctgatgctcaagttcatgtctattgataaggttgagaactttcctttcccaacaccaccaaacaaggaaagtttggttgaagctgagcgttgcttaaagacattggaagcacttcatagtgatggaaaacttacacctatgggcaaggcaatggcacagtaccccatgagcccaagacattctcgtcttcttcttacagtgattaagaatttgaagaataagcagcaaggctttgctagatctaacttcatattaggatatgctgctgctgctgcatcaggtttgaattttactaatccttttctcaagcaattggatgaatgtgacacttatggtgaatcagtagaaaacactaatctggaagctaatggtccatgggaaaggaagagacagaagaagctcaaggctgtggttagagaggcacgggaaaagttttctaaccctagcagtgatgctttaaccatcgctcgtgccctgcagttctttgagttgtcagaaaacccagtggaattctgcagagccaattcacttcatcttaaaaccatggaagagatgtcaaagttgagaaagcagcttctgcagttaatatttcgccatagcaaatggtgcgaggagtttgcttggaattcgggtgactctgctgaggttgaacgggcctggaggaacgagcccagtatattgcagttgaatgaagaggaacttcttgggcaaggaatttgcgctggatgggctgatagagttgcaaggaggattcacacctatttgaaaccatcagaagacgatcgaaaggttcgagccgttcgttatcagtcttgtgcacttgatgatacaatatatctgcaccgatcatcatctgtcgcccaagttgccccagagcttgtagtttactcggagctacttagtacaaagaggctatacatgcacggtgtaacgaccgtaaagccagggtggcttttgaagtatgctagttccctctgcaccttctctgcaccgttggaagatccgaagccgtactatgacccactgaacgaccaagtctactgctacgttagcccggtcttctctcgtcataactggcagcttccgttgcacagtttacctatcaaagacggtgcgagccggctgcaggtgtttgcatgcgcgttgcttaaaggggacgtcctgccatgtctacgggacgccaaggatttcctcgcgctgtcaccatccgctgtgttggggcctgccaggcaacggagagtgggagatcttcttagcaggatgaagatcggtccgaagttagtcgacagcagggcagcactgagaggcgtgtggaattttgatcctggttttctctatcctgagctcaagttgtggtaccaggatagattccatgaccagtttgacttggtgtgggagcagatgcaccaacaggttctccttgaggggcgcaagcttttcccaaagaggtccaagaaagttaaaggctaggccaaaatttttggtgcagttggttggctggcagaagcttttttgtgtgtgtggttttaaggaatagatacgagagatgcagtgagacatcatgcacaagcagttttgtctagacattttgccttgatctggatttgttccattgcatctccgtgttgaactgttgatgtacaccgttcctctgcaagcaaccttcaccctgccatctgtgtcagaaatgttttctgatccaaccatttgctcaaaaccttgaacctgaaaaatatcctgatatccaaccatcgccatggcccatggggattggagggaattggcttcgagtgagggccaggggtaggattcgccagaaacaaacaggggatggtcgtgcgcagattgattacatttctctcctttccgtctctcgctctatttgcttttagcatatgaagtgtccgattccaggggtaaaaacagcggtagagtcgatataaaaatgtagcactaaactatattaccctcagttcaagaaaac

SEQ ID NO: 51404 - DNA, 4779 bp, Zea Mays
caccgtcctctcctctagcgccgcccatccatccagccgtccaacgcctactaccgccgccacccgcctcccgcctctcctctagccccagccgttcagcgccgcccgcctccctcctctcctcctctcctccctcctccagtgccgccacgacgctcgccactagcgccgttcgcctcctccaacgcccgagcaccgcctccctcctccctcctccagcgccgactgcccctaacaccgccctctagctcctctagcagccagcgtcgcttacagccatcaagttccagggcaggagtcaagacagtgaatcacccagctgctctattcgctaaatcatggaagatagtaatgccctgattttgccctgcaaaaggaagaacaaggcgcaagtgaaagccaaggatggtaagaaagccaagaaggaagacccaaagatgagcaagacgaagctcaaaaagctgcaaaaattggaggaggaaaagaaaaagaagctgctacaagctaaaagcatcgaggttttgcagaagcacaagatctcagaggatgcatattcactgcttcatgcttcagggactattggtcaagtatggcagatcaaccctaccacactaagaatttagttattttctgaatatatactagtgcatcatgcttcagggactattggtcaagctgagactttgaaagaaaaacggaggcgtgctgtgcaattctcaaaggctggcctggatgttcctgaagaactctcactgttcaagaaaagcggtggtacgaaagttcctgaaaacagtgatgttggggagcaagtttccccattaaagtttgttgagccagcaccaattgtggattctggtagagaatgtaataacaaaatgaaggatctagtgaaagctattgaatgccaaccgattatgggttttggagctggcattccagagccagaaactgaagagcctagtgatgatgctcatatgttgacaaatcagaaaattcagttgtcaattccaagttgttctggagcagaattagatttgcagggtaaagaactaggacaagggcagcattctgtacaggagtgcataaatcctccaattgttgtacctgtgtcaagactgcatgaagttgagaaggcaaggagggatctcccaataataatgatggagcaagaaataatggaagctatctatgaaaattctgtagtaattctgtgcggagagactggctgcggtaaaactacccaggttccccagttcctatacgaagctggcttcggcactagtgaccgagctgatagaaaagggatgattggtatcacacaaccacggcgcgtagctgttcatgccacagctaagagggtttcctatgagttaggacttaagctgggaagagaagttggttttcaagttaggcatgatagaaaggtaggaagtgaatgctccatcaagttcatgacagatggtattttgctgcgagaaatccagggtgattttctgttgaagcgctattcagtgatcatattggatgaggcacacgaaaggagcttgaacacagatatacttattgggatgctttctagaattataaagattcgcaaggatttgtatgcaaagcagcaggaaaaattacggtctggatttaagatcaaaccagaggataagatcagtcagttaaaggtggtgctcatgagtgctactctgcagttaaaggactttatttcaaatagaaggttgtttggcgtgatcccaccagctgttaaggtacctgtgcggcagtttccagtatcagttcacttctcaaagaggacacatgatgattatttagggctagcttataaaaaggttatgtcaatccacaagaggcttccaccaggtggaatcctcgtatttgtcactggacaacgggaagtggagtacttgtgtaagaaactgcgaagagcatccaaggtgcaaactgctaagaatcctgggaaaactgatggtgaagacaatggtccatgcccaaaagtagatgaaaaggaaatttttgaagcatatgatattgacagagatgaacccgagcaccgatatgacatgttttcctcgtatgatgacgatggtatgtatgatgacgatggtatgaatgttgagacaaatattgattcttctgacaacgaaacggagagcgaaatggatactgaaaccgatgacgaagagtctgttactattgaaactacagaagaggatgttccagtattagcatttttgaaagatgctgagagctcatctgcgttgaaggcatcatttggagctttgtcgggaataccaaatgtgctggaaagtgtcgaggaattaagtgatgctaaatgtgaagaaaagaccagcacttcacttcgttgttttagtaaatgcacagaacataagcctgtttcacatggtagacttcgtgtcttgccactttatgcaaagttatcagcttcacaacagcttcaagtgtttgaagatgtcccagagggggaaagattagttgtggtggcaactaatgttgccgaaacctctctaacaattccaggcataaaatatgtagttgatactggaaaagaaaaggttaagaattatgatcatgctactgggatgtcaagttatgatgtccaatggataagcaaggcatcagcatcccagcgtgctggaagagcaggaagaacagggcctggccactgttaccgtctctactcagctgcagcatatggtaaagatgatttattccctgaattcgctgaacctcagattaagaaaattccagttgaaggtgttgtcctgatgctcaagttcatgtctattgataaggttgagaactttcctttcccaacaccaccaaacaaggaaagtttggttgaagctgagcgttgcttaaagacattggaagcacttcatagtgatggaaaacttacacctatgggcaaggcaatggcacagtaccccatgagcccaagacattctcgtcttcttcttacagtgattaagaatttgaagaataagcagcaaggctttgctagatctaacttcatattaggatatgctgctgctgctgcatcaggtttgaattttactaatccttttctcaagcaattggatgaatgtgacacttatggtgaatcagtagaaaacactaatctggaagctaatggtccatgggaaaggaagagacagaagaagctcaaggctgtggttagagaggcacgggaaaagttttctaaccctagcagtgatgctttaaccatcgctcgtgccctgcagttctttgagttgtcagaaaacccagtggaattctgcagagccaattcacttcatcttaaaaccatggaagagatgtcaaagttgagaaagcagcttctgcagttaatatttcgccatagcaaatggtgcgaggagtttgcttggaattcgggtgactctgctgaggttgaacgggcctggaggaacgagcccagtatattgcagttgaatgaagaggaacttcttgggcaaggaatttgcgctggatgggctgatagagttgcaaggaggattcacacctatttgaaaccatcagaagacgatcgaaaggttcgagccgttcgttatcagtcttgtgcacttgatgatacaatatatctgcaccgatcatcatctgtcgcccaagttgccccagagcttgtagtttactcggagctacttagtacaaagaggctatacatgcacggtgtaacgaccgtaaagccagggtggcttttgaagtatgctagttccctctgcaccttctctgcaccgttggaagatccgaagccgtactatgacccactgaacgaccaagtctactgctacgttagcccggtcttctctcgtcataactggcagcttccgttgcacagtttacctatcaaagacggtgcgagccggctgcaggtgtttgcatgcgcgttgcttaaaggggacgtcctgccatgtctacgggacgccaaggatttcctcgcgctgtcaccatccgctgtgttggggcctgccaggcaacggagagtgggagatcttcttagcaggatgaagatcggtccgaagttagtcgacagcagggcagcactgagaggcgtgtggaattttgatcctggttttctctatcctgagctcaagttgtggtaccaggatagattccatgaccagtttgacttggtgtgggagcagatgcaccaacaggttctccttgaggggcgcaagcttttcccaaagaggtccaagaaagttaaaggctaggccaaaatttttggtgcagttggttggctggcagaagcttttttgtgtgtgtggttttaaggaatagatacgagagatgcagtgagacatcatgcacaagcagttttgtctagacattttgccttgatctggatttgttccattgcatctccgtgttgaactgttgatgtacaccgttcctctgcaagcaaccttcaccctgccatctgtgtcagaaatgttttctgatccaaccatttgctcaaaaccttgaacctgaaaaatatcctgatatccaaccatcgccatggcccatggggattggagggaattggcttcgagtgagggccaggggtaggattcgccagaaacaaacaggggatggtcgtgcgcagattgattacatttctctcctttccgtctctcgctctatttgcttttagcatatgaagtgtccgattccaggggtaaaaacagcggtagagtcgatataaaaatgtagcactaaactatattaccctcagttcaagaaaac

SEQ ID NO: 51405 - DNA, 677 bp, Zea Mays
ccaacgcctactaccgccgccacccgcctcccgcctctcctctagccccagccgttcagcgccgcccgcctccctcctctcctcctctcctccctcctccagtgccgccacgacgctcgccactagcgccgttcgcctcctccaacgcccgagcaccgcctccctcctccctcctccagcgccgactgcccctaacaccgccctctagctcctctagcagccagcgtcgcttacagccatcaagttccagggcaggagtcaagacagtgaatcacccagctgctctattcggtaagtgatctggccatctgagattctgagtcaaggccgtcgtcatcctgcttagctgctcatgctcttaatattgatgagttggatgatggttactgatcctagatgcaagttctaatctgcatgttgcatagacttctatggttgaactcgatccatttccttttatgctacttgttttgtgaactcaagtaaattaagagtatgaacatattgtatcctgttgttttatgtcatgtctgaaaagacggttcaacattaacgtttaaatgttggaaaggtggctcctaacgttttatcgtttacctctttaataaccatggctataagctttgccttgaagtatggtagaaaaaaatactctttggtagagatgaagggaagat

SEQ ID NO: 51406 - DNA, 4644 bp, Zea Mays
ccaacgcctactaccgccgccacccgcctcccgcctctcctctagccccagccgttcagcgccgcccgcctccctcctctcctcctctcctccctcctccagtgccgccacgacgctcgccactagcgccgttcgcctcctccaacgcccgagcaccgcctccctcctccctcctccagcgccgactgcccctaacaccgccctctagctcctctagcagccagcgtcgcttacagccatcaagttccagggcaggagtcaagacagtgaatcacccagctgctctattcgctaaatcatggaagatagtaatgccctgattttgccctgcaaaaggaagaacaaggcgcaagtgaaagccaaggatggtaagaaagccaagaaggaagacccaaagatgagcaagacgaagctcaaaaagctgcaaaaattggaggaggaaaagaaaaagaagctgctacaagctaaaagcatcgaggaagcacaagatctcagaggatgcatattcactgcttcatgcttcagggactattggtcaagctgagactttgaaagaaaaacggaggcgtgctgtgcaattctcaaaggctggcctggatgttcctgaagaactctcactgttcaagaaaagcggtggtacgaaagttcctgaaaacagtgatgttggggagcaagtttccccattaaagtttgttgagccagcaccaattgtggattctggtagagaatgtaataacaaaatgaaggatctagtgaaagctattgaatgccaaccgattatgggttttggagctggcattccagagccagaaactgaagagcctagtgatgatgctcatatgttgacaaatcagaaaattcagttgtcaattccaagttgttctggagcagaattagatttgcagggtaaagaactaggacaagggcagcattctgtacaggagtgcataaatcctccaattgttgtacctgtgtcaagactgcatgaagttgagaaggcaaggagggatctcccaataataatgatggagcaagaaataatggaagctatctatgaaaattctgtagtaattctgtgcggagagactggctgcggtaaaactacccaggttccccagttcctatacgaagctggcttcggcactagtgaccgagctgatagaaaagggatgattggtatcacacaaccacggcgcgtagctgttcatgccacagctaagagggtttcctatgagttaggacttaagctgggaagagaagttggttttcaagttaggcatgatagaaaggtaggaagtgaatgctccatcaagttcatgacagatggtattttgctgcgagaaatccagggtgattttctgttgaagcgctattcagtgatcatattggatgaggcacacgaaaggagcttgaacacagatatacttattgggatgctttctagaattataaagattcgcaaggatttgtatgcaaagcagcaggaaaaattacggtctggatttaagatcaaaccagaggataagatcagtcagttaaaggtggtgctcatgagtgctactctgcagttaaaggactttatttcaaatagaaggttgtttggcgtgatcccaccagctgttaaggtacctgtgcggcagtttccagtatcagttcacttctcaaagaggacacatgatgattatttagggctagcttataaaaaggttatgtcaatccacaagaggcttccaccaggtggaatcctcgtatttgtcactggacaacgggaagtggagtacttgtgtaagaaactgcgaagagcatccaaggtgcaaactgctaagaatcctgggaaaactgatggtgaagacaatggtccatgcccaaaagtagatgaaaaggaaatttttgaagcatatgatattgacagagatgaacccgagcaccgatatgacatgttttcctcgtatgatgacgatggtatgtatgatgacgatggtatgaatgttgagacaaatattgattcttctgacaacgaaacggagagcgaaatggatactgaaaccgatgacgaagagtctgttactattgaaactacagaagaggatgttccagtattagcatttttgaaagatgctgagagctcatctgcgttgaaggcatcatttggagctttgtcgggaataccaaatgtgctggaaagtgtcgaggaattaagtgatgctaaatgtgaagaaaagaccagcacttcacttcgttgttttagtaaatgcacagaacataagcctgtttcacatggtagacttcgtgtcttgccactttatgcaaagttatcagcttcacaacagcttcaagtgtttgaagatgtcccagagggggaaagattagttgtggtggcaactaatgttgccgaaacctctctaacaattccaggcataaaatatgtagttgatactggaaaagaaaaggttaagaattatgatcatgctactgggatgtcaagttatgatgtccaatggataagcaaggcatcagcatcccagcgtgctggaagagcaggaagaacagggcctggccactgttaccgtctctactcagctgcagcatatggtaaagatgatttattccctgaattcgctgaacctcagattaagaaaattccagttgaaggtgttgtcctgatgctcaagttcatgtctattgataaggttgagaactttcctttcccaacaccaccaaacaaggaaagtttggttgaagctgagcgttgcttaaagacattggaagcacttcatagtgatggaaaacttacacctatgggcaaggcaatggcacagtaccccatgagcccaagacattctcgtcttcttcttacagtgattaagaatttgaagaataagcagcaaggctttgctagatctaacttcatattaggatatgctgctgctgctgcatcaggtttgaattttactaatccttttctcaagcaattggatgaatgtgacacttatggtgaatcagtagaaaacactaatctggaagctaatggtccatgggaaaggaagagacagaagaagctcaaggctgtggttagagaggcacgggaaaagttttctaaccctagcagtgatgctttaaccatcgctcgtgccctgcagttctttgagttgtcagaaaacccagtggaattctgcagagccaattcacttcatcttaaaaccatggaagagatgtcaaagttgagaaagcagcttctgcagttaatatttcgccatagcaaatggtgcgaggagtttgcttggaattcgggtgactctgctgaggttgaacgggcctggaggaacgagcccagtatattgcagttgaatgaagaggaacttcttgggcaaggaatttgcgctggatgggctgatagagttgcaaggaggattcacacctatttgaaaccatcagaagacgatcgaaaggttcgagccgttcgttatcagtcttgtgcacttgatgatacaatatatctgcaccgatcatcatctgtcgcccaagttgccccagagcttgtagtttactcggagctacttagtacaaagaggctatacatgcacggtgtaacgaccgtaaagccagggtggcttttgaagtatgctagttccctctgcaccttctctgcaccgttggaagatccgaagccgtactatgacccactgaacgaccaagtctactgctacgttagcccggtcttctctcgtcataactggcagcttccgttgcacagtttacctatcaaagacggtgcgagccggctgcaggtgtttgcatgcgcgttgcttaaaggggacgtcctgccatgtctacgggacgccaaggatttcctcgcgctgtcaccatccgctgtgttggggcctgccaggcaacggagagtgggagatcttcttagcaggatgaagatcggtccgaagttagtcgacagcagggcagcactgagaggcgtgtggaattttgatcctggttttctctatcctgagctcaagttgtggtaccaggatagattccatgaccagtttgacttggtgtgggagcagatgcaccaacaggttctccttgaggggcgcaagcttttcccaaagaggtccaagaaagttaaaggctaggccaaaatttttggtgcagttggttggctggcagaagcttttttgtgtgtgtggttttaaggaatagatacgagagatgcagtgagacatcatgcacaagcagttttgtctagacattttgccttgatctggatttgttccattgcatctccgtgttgaactgttgatgtacaccgttcctctgcaagcaaccttcaccctgccatctgtgtcagaaatgttttctgatccaaccatttgctcaaaaccttgaacctgaaaaatatcctgatatccaaccatcgccatggcccatggggattggagggaattggcttcgagtgagggccaggggtaggattcgccagaaacaaacaggggatggtcgtgcgcagattgattacatttctctcctttccgtctctcgctctatttgcttttagcatatgaagtgtccgattccaggggtaaaaacagcggtagagtcgatataaaaatgtagcactaaactatattaccctcagttcaagaaaac

SEQ ID NO: 51407 - DNA, 4878 bp, Zea Mays
ccaacgcctactaccgccgccacccgcctcccgcctctcctctagccccagccgttcagcgccgcccgcctccctcctctcctcctctcctccctcctccagtgccgccacgacgctcgccactagcgccgttcgcctcctccaacgcccgagcaccgcctccctcctccctcctccagcgccgactgcccctaacaccgccctctagctcctctagcagccagcgtcgcttacagccatcaagttccagggcaggagtcaagacagtgaatcacccagctgctctattcggttcaaatcctgtgtcggccactgcccatatggtttcaggccggctgtgctcgtttcgtcccttgtgcgggagctttgtttgagatttgagtcgttgcagctaaatcatggaagatagtaatgccctgattttgccctgcaaaaggaagaacaaggcgcaagtgaaagccaaggatggtaagaaagccaagaaggaagacccaaagatgagcaagacgaagctcaaaaagctgcaaaaattggaggaggaaaagaaaaagaagctgctacaagctaaaagcatcgaggttttgcagaagcacaagatctcagaggatgcatattcactgcttcatgcttcagggactattggtcaagtatggcagatcaaccctaccacactaagaatttagttattttctgaatatatactagtgcatcatgcttcagggactattggtcaagtatggcagatcaaccctaccgcactaagaatttagttattttctgaatatatactagtgcagtagtgcatttggccaaatagctctattctactgcaggctgagactttgaaagaaaaacggaggcgtgctgtgcaattctcaaaggctggcctggatgttcctgaagaactctcactgttcaagaaaagcggtggtacgaaagttcctgaaaacagtgatgttggggagcaagtttccccattaaagtttgttgagccagcaccaattgtggattctggtagagaatgtaataacaaaatgaaggatctagtgaaagctattgaatgccaaccgattatgggttttggagctggcattccagagccagaaactgaagagcctagtgatgatgctcatatgttgacaaatcagaaaattcagttgtcaattccaagttgttctggagcagaattagatttgcagggtaaagaactaggacaagggcagcattctgtacaggagtgcataaatcctccaattgttgtacctgtgtcaagactgcatgaagttgagaaggcaaggagggatctcccaataataatgatggagcaagaaataatggaagctatctatgaaaattctgtagtaattctgtgcggagagactggctgcggtaaaactacccaggttccccagttcctatacgaagctggcttcggcactagtgaccgagctgatagaaaagggatgattggtatcacacaaccacggcgcgtagctgttcatgccacagctaagagggtttcctatgagttaggacttaagctgggaagagaagttggttttcaagttaggcatgatagaaagggtgattttctgttgaagcgctattcagtgatcatattggatgaggcacacgaaaggagcttgaacacagatatacttattgggatgctttctagaattataaagattcgcaaggatttgtatgcaaagcagcaggaaaaattacggtctggatttaagatcaaaccagaggataagatcagtcagttaaaggtggtgctcatgagtgctactctgcagttaaaggactttatttcaaatagaaggttgtttggcgtgatcccaccagctgttaaggtacctgtgcggcagtttccagtatcagttcacttctcaaagaggacacatgatgattatttagggctagcttataaaaaggttatgtcaatccacaagaggcttccaccaggtggaatcctcgtatttgtcactggacaacgggaagtggagtacttgtgtaagaaactgcgaagagcatccaaggtgcaaactgctaagaatcctgggaaaactgatggtgaagacaatggtccatgcccaaaagtagatgaaaaggaaatttttgaagcatatgatattgacagagatgaacccgagcaccgatatgacatgttttcctcgtatgatgacgatggtatgtatgatgacgatggtatgaatgttgagacaaatattgattcttctgacaacgaaacggagagcgaaatggatactgaaaccgatgacgaagagtctgttactattgaaactacagaagaggatgttccagtattagcatttttgaaagatgctgagagctcatctgcgttgaaggcatcatttggagctttgtcgggaataccaaatgtgctggaaagtgtcgaggaattaagtgatgctaaatgtgaagaaaagaccagcacttcacttcgttgttttagtaaatgcacagaacataagcctgtttcacatggtagacttcgtgtcttgccactttatgcaaagttatcagcttcacaacagcttcaagtgtttgaagatgtcccagagggggaaagattagttgtggtggcaactaatgttgccgaaacctctctaacaattccaggcataaaatatgtagttgatactggaaaagaaaaggttaagaattatgatcatgctactgggatgtcaagttatgatgtccaatggataagcaaggcatcagcatcccagcgtgctggaagagcaggaagaacagggcctggccactgttaccgtctctactcagctgcagcatatggtaaagatgatttattccctgaattcgctgaacctcagattaagaaaattccagttgaaggtgttgtcctgatgctcaagttcatgtctattgataaggttgagaactttcctttcccaacaccaccaaacaaggaaagtttggttgaagctgagcgttgcttaaagacattggaagcacttcatagtgatggaaaacttacacctatgggcaaggcaatggcacagtaccccatgagcccaagacattctcgtcttcttcttacagtgattaagaatttgaagaataagcagcaaggctttgctagatctaacttcatattaggatatgctgctgctgctgcatcaggtttgaattttactaatccttttctcaagcaattggatgaatgtgacacttatggtgaatcagtagaaaacactaatctggaagctaatggtccatgggaaaggaagagacagaagaagctcaaggctgtggttagagaggcacgggaaaagttttctaaccctagcagtgatgctttaaccatcgctcgtgccctgcagttctttgagttgtcagaaaacccagtggaattctgcagagccaattcacttcatcttaaaaccatggaagagatgtcaaagttgagaaagcagcttctgcagttaatatttcgccatagcaaatggtgcgaggagtttgcttggaattcgggtgactctgctgaggttgaacgggcctggaggaacgagcccagtatattgcagttgaatgaagaggaacttcttgggcaaggaatttgcgctggatgggctgatagagttgcaaggaggattcacacctatttgaaaccatcagaagacgatcgaaaggttcgagccgttcgttatcagtcttgtgcacttgatgatacaatatatctgcaccgatcatcatctgtcgcccaagttgccccagagcttgtagtttactcggagctacttagtacaaagaggctatacatgcacggtgtaacgaccgtaaagccagggtggcttttgaagtatgctagttccctctgcaccttctctgcaccgttggaagatccgaagccgtactatgacccactgaacgaccaagtctactgctacgttagcccggtcttctctcgtcataactggcagcttccgttgcacagtttacctatcaaagacggtgcgagccggctgcaggtgtttgcatgcgcgttgcttaaaggggacgtcctgccatgtctacgggacgccaaggatttcctcgcgctgtcaccatccgctgtgttggggcctgccaggcaacggagagtgggagatcttcttagcaggatgaagatcggtccgaagttagtcgacagcagggcagcactgagaggcgtgtggaattttgatcctggttttctctatcctgagctcaagttgtggtaccaggatagattccatgaccagtttgacttggtgtgggagcagatgcaccaacaggttctccttgaggggcgcaagcttttcccaaagaggtccaagaaagttaaaggctaggccaaaatttttggtgcagttggttggctggcagaagcttttttgtgtgtgtggttttaaggaatagatacgagagatgcagtgagacatcatgcacaagcagttttgtctagacattttgccttgatctggatttgttccattgcatctccgtgttgaactgttgatgtacaccgttcctctgcaagcaaccttcaccctgccatctgtgtcagaaatgttttctgatccaaccatttgctcaaaaccttgaacctgaaaaatatcctgatatccaaccatcgccatggcccatggggattggagggaattggcttcgagtgagggccaggggtaggattcgccagaaacaaacaggggatggtcgtgcgcagattgattacatttctctcctttccgtctctcgctctatttgcttttagcatatgaagtgtccgattccaggggtaaaaacagcggtagagtcgatataaaaatgtagcactaaactatattaccctcagttcaagaaaac

SEQ ID NO: 51408 - DNA, 4599 bp, Zea Mays
ccaacgcctactaccgccgccacccgcctcccgcctctcctctagccccagccgttcagcgccgcccgcctccctcctctcctcctctcctccctcctccagtgccgccacgacgctcgccactagcgccgttcgcctcctccaacgcccgagcaccgcctccctcctccctcctccagcgccgactgcccctaacaccgccctctagctcctctagcagccagcgtcgcttacagccatcaagttccagggcaggagtcaagacagtgaatcacccagctgctctattcggaagaacaaggcgcaagtgaaagccaaggatggtaagaaagccaagaaggaagacccaaagatgagcaagacgaagctcaaaaagctgcaaaaattggaggaggaaaagaaaaagaagctgctacaagctaaaagcatcgaggaagcacaagatctcagaggatgcatattcactgcttcatgcttcagggactattggtcaagctgagactttgaaagaaaaacggaggcgtgctgtgcaattctcaaaggctggcctggatgttcctgaagaactctcactgttcaagaaaagcggtggtacgaaagttcctgaaaacagtgatgttggggagcaagtttccccattaaagtttgttgagccagcaccaattgtggattctggtagagaatgtaataacaaaatgaaggatctagtgaaagctattgaatgccaaccgattatgggttttggagctggcattccagagccagaaactgaagagcctagtgatgatgctcatatgttgacaaatcagaaaattcagttgtcaattccaagttgttctggagcagaattagatttgcagggtaaagaactaggacaagggcagcattctgtacaggagtgcataaatcctccaattgttgtacctgtgtcaagactgcatgaagttgagaaggcaaggagggatctcccaataataatgatggagcaagaaataatggaagctatctatgaaaattctgtagtaattctgtgcggagagactggctgcggtaaaactacccaggttccccagttcctatacgaagctggcttcggcactagtgaccgagctgatagaaaagggatgattggtatcacacaaccacggcgcgtagctgttcatgccacagctaagagggtttcctatgagttaggacttaagctgggaagagaagttggttttcaagttaggcatgatagaaaggtaggaagtgaatgctccatcaagttcatgacagatggtattttgctgcgagaaatccagggtgattttctgttgaagcgctattcagtgatcatattggatgaggcacacgaaaggagcttgaacacagatatacttattgggatgctttctagaattataaagattcgcaaggatttgtatgcaaagcagcaggaaaaattacggtctggatttaagatcaaaccagaggataagatcagtcagttaaaggtggtgctcatgagtgctactctgcagttaaaggactttatttcaaatagaaggttgtttggcgtgatcccaccagctgttaaggtacctgtgcggcagtttccagtatcagttcacttctcaaagaggacacatgatgattatttagggctagcttataaaaaggttatgtcaatccacaagaggcttccaccaggtggaatcctcgtatttgtcactggacaacgggaagtggagtacttgtgtaagaaactgcgaagagcatccaaggtgcaaactgctaagaatcctgggaaaactgatggtgaagacaatggtccatgcccaaaagtagatgaaaaggaaatttttgaagcatatgatattgacagagatgaacccgagcaccgatatgacatgttttcctcgtatgatgacgatggtatgtatgatgacgatggtatgaatgttgagacaaatattgattcttctgacaacgaaacggagagcgaaatggatactgaaaccgatgacgaagagtctgttactattgaaactacagaagaggatgttccagtattagcatttttgaaagatgctgagagctcatctgcgttgaaggcatcatttggagctttgtcgggaataccaaatgtgctggaaagtgtcgaggaattaagtgatgctaaatgtgaagaaaagaccagcacttcacttcgttgttttagtaaatgcacagaacataagcctgtttcacatggtagacttcgtgtcttgccactttatgcaaagttatcagcttcacaacagcttcaagtgtttgaagatgtcccagagggggaaagattagttgtggtggcaactaatgttgccgaaacctctctaacaattccaggcataaaatatgtagttgatactggaaaagaaaaggttaagaattatgatcatgctactgggatgtcaagttatgatgtccaatggataagcaaggcatcagcatcccagcgtgctggaagagcaggaagaacagggcctggccactgttaccgtctctactcagctgcagcatatggtaaagatgatttattccctgaattcgctgaacctcagattaagaaaattccagttgaaggtgttgtcctgatgctcaagttcatgtctattgataaggttgagaactttcctttcccaacaccaccaaacaaggaaagtttggttgaagctgagcgttgcttaaagacattggaagcacttcatagtgatggaaaacttacacctatgggcaaggcaatggcacagtaccccatgagcccaagacattctcgtcttcttcttacagtgattaagaatttgaagaataagcagcaaggctttgctagatctaacttcatattaggatatgctgctgctgctgcatcaggtttgaattttactaatccttttctcaagcaattggatgaatgtgacacttatggtgaatcagtagaaaacactaatctggaagctaatggtccatgggaaaggaagagacagaagaagctcaaggctgtggttagagaggcacgggaaaagttttctaaccctagcagtgatgctttaaccatcgctcgtgccctgcagttctttgagttgtcagaaaacccagtggaattctgcagagccaattcacttcatcttaaaaccatggaagagatgtcaaagttgagaaagcagcttctgcagttaatatttcgccatagcaaatggtgcgaggagtttgcttggaattcgggtgactctgctgaggttgaacgggcctggaggaacgagcccagtatattgcagttgaatgaagaggaacttcttgggcaaggaatttgcgctggatgggctgatagagttgcaaggaggattcacacctatttgaaaccatcagaagacgatcgaaaggttcgagccgttcgttatcagtcttgtgcacttgatgatacaatatatctgcaccgatcatcatctgtcgcccaagttgccccagagcttgtagtttactcggagctacttagtacaaagaggctatacatgcacggtgtaacgaccgtaaagccagggtggcttttgaagtatgctagttccctctgcaccttctctgcaccgttggaagatccgaagccgtactatgacccactgaacgaccaagtctactgctacgttagcccggtcttctctcgtcataactggcagcttccgttgcacagtttacctatcaaagacggtgcgagccggctgcaggtgtttgcatgcgcgttgcttaaaggggacgtcctgccatgtctacgggacgccaaggatttcctcgcgctgtcaccatccgctgtgttggggcctgccaggcaacggagagtgggagatcttcttagcaggatgaagatcggtccgaagttagtcgacagcagggcagcactgagaggcgtgtggaattttgatcctggttttctctatcctgagctcaagttgtggtaccaggatagattccatgaccagtttgacttggtgtgggagcagatgcaccaacaggttctccttgaggggcgcaagcttttcccaaagaggtccaagaaagttaaaggctaggccaaaatttttggtgcagttggttggctggcagaagcttttttgtgtgtgtggttttaaggaatagatacgagagatgcagtgagacatcatgcacaagcagttttgtctagacattttgccttgatctggatttgttccattgcatctccgtgttgaactgttgatgtacaccgttcctctgcaagcaaccttcaccctgccatctgtgtcagaaatgttttctgatccaaccatttgctcaaaaccttgaacctgaaaaatatcctgatatccaaccatcgccatggcccatggggattggagggaattggcttcgagtgagggccaggggtaggattcgccagaaacaaacaggggatggtcgtgcgcagattgattacatttctctcctttccgtctctcgctctatttgcttttagcatatgaagtgtccgattccaggggtaaaaacagcggtagagtcgatataaaaatgtagcactaaactatattaccctcagttcaagaaaac

SEQ ID NO: 51409 - DNA, 4779 bp, Zea Mays
ccaacgcctactaccgccgccacccgcctcccgcctctcctctagccccagccgttcagcgccgcccgcctccctcctctcctcctctcctccctcctccagtgccgccacgacgctcgccactagcgccgttcgcctcctccaacgcccgagcaccgcctccctcctccctcctccagcgccgactgcccctaacaccgccctctagctcctctagcagccagcgtcgcttacagccatcaagttccagggcaggagtcaagacagtgaatcacccagctgctctattcggattttttttgtcctcgactaccctaggttcaaatcctgtgtcggccactgcccatatggtttcaggccggctgtgctcgtttcgtcccttgtgcgggagctttgtttgagatttgagtcgttgcagctaaatcatggaagatagtaatgccctgattttgccctgcaaaaggaagaacaaggcgcaagtgaaagccaaggatggtaagaaagccaagaaggaagacccaaagatgagcaagacgaagctcaaaaagctgcaaaaattggaggaggaaaagaaaaagaagctgctacaagctaaaagcatcgaggttttgcagaagcacaagatctcagaggatgcatattcactgcttcatgcttcagggactattggtcaagctgagactttgaaagaaaaacggaggcgtgctgtgcaattctcaaaggctggcctggatgttcctgaagaactctcactgttcaagaaaagcggtggtacgaaagttcctgaaaacagtgatgttggggagcaagtttccccattaaagtttgttgagccagcaccaattgtggattctggtagagaatgtaataacaaaatgaaggatctagtgaaagctattgaatgccaaccgattatgggttttggagctggcattccagagccagaaactgaagagcctagtgatgatgctcatatgttgacaaatcagaaaattcagttgtcaattccaagttgttctggagcagaattagatttgcagggtaaagaactaggacaagggcagcattctgtacaggagtgcataaatcctccaattgttgtacctgtgtcaagactgcatgaagttgagaaggcaaggagggatctcccaataataatgatggagcaagaaataatggaagctatctatgaaaattctgtagtaattctgtgcggagagactggctgcggtaaaactacccaggttccccagttcctatacgaagctggcttcggcactagtgaccgagctgatagaaaagggatgattggtatcacacaaccacggcgcgtagctgttcatgccacagctaagagggtttcctatgagttaggacttaagctgggaagagaagttggttttcaagttaggcatgatagaaaggtaggaagtgaatgctccatcaagttcatgacagatggtattttgctgcgagaaatccagggtgattttctgttgaagcgctattcagtgatcatattggatgaggcacacgaaaggagcttgaacacagatatacttattgggatgctttctagaattataaagattcgcaaggatttgtatgcaaagcagcaggaaaaattacggtctggatttaagatcaaaccagaggataagatcagtcagttaaaggtggtgctcatgagtgctactctgcagttaaaggactttatttcaaatagaaggttgtttggcgtgatcccaccagctgttaaggtacctgtgcggcagtttccagtatcagttcacttctcaaagaggacacatgatgattatttagggctagcttataaaaaggttatgtcaatccacaagaggcttccaccaggtggaatcctcgtatttgtcactggacaacgggaagtggagtacttgtgtaagaaactgcgaagagcatccaaggtgcaaactgctaagaatcctgggaaaactgatggtgaagacaatggtccatgcccaaaagtagatgaaaaggaaatttttgaagcatatgatattgacagagatgaacccgagcaccgatatgacatgttttcctcgtatgatgacgatggtatgtatgatgacgatggtatgaatgttgagacaaatattgattcttctgacaacgaaacggagagcgaaatggatactgaaaccgatgacgaagagtctgttactattgaaactacagaagaggatgttccagtattagcatttttgaaagatgctgagagctcatctgcgttgaaggcatcatttggagctttgtcgggaataccaaatgtgctggaaagtgtcgaggaattaagtgatgctaaatgtgaagaaaagaccagcacttcacttcgttgttttagtaaatgcacagaacataagcctgtttcacatggtagacttcgtgtcttgccactttatgcaaagttatcagcttcacaacagcttcaagtgtttgaagatgtcccagagggggaaagattagttgtggtggcaactaatgttgccgaaacctctctaacaattccaggcataaaatatgtagttgatactggaaaagaaaaggttaagaattatgatcatgctactgggatgtcaagttatgatgtccaatggataagcaaggcatcagcatcccagcgtgctggaagagcaggaagaacagggcctggccactgttaccgtctctactcagctgcagcatatggtaaagatgatttattccctgaattcgctgaacctcagattaagaaaattccagttgaaggtgttgtcctgatgctcaagttcatgtctattgataaggttgagaactttcctttcccaacaccaccaaacaaggaaagtttggttgaagctgagcgttgcttaaagacattggaagcacttcatagtgatggaaaacttacacctatgggcaaggcaatggcacagtaccccatgagcccaagacattctcgtcttcttcttacagtgattaagaatttgaagaataagcagcaaggctttgctagatctaacttcatattaggatatgctgctgctgctgcatcaggtttgaattttactaatccttttctcaagcaattggatgaatgtgacacttatggtgaatcagtagaaaacactaatctggaagctaatggtccatgggaaaggaagagacagaagaagctcaaggctgtggttagagaggcacgggaaaagttttctaaccctagcagtgatgctttaaccatcgctcgtgccctgcagttctttgagttgtcagaaaacccagtggaattctgcagagccaattcacttcatcttaaaaccatggaagagatgtcaaagttgagaaagcagcttctgcagttaatatttcgccatagcaaatggtgcgaggagtttgcttggaattcgggtgactctgctgaggttgaacgggcctggaggaacgagcccagtatattgcagttgaatgaagaggaacttcttgggcaaggaatttgcgctggatgggctgatagagttgcaaggaggattcacacctatttgaaaccatcagaagacgatcgaaaggttcgagccgttcgttatcagtcttgtgcacttgatgatacaatatatctgcaccgatcatcatctgtcgcccaagttgccccagagcttgtagtttactcggagctacttagtacaaagaggctatacatgcacggtgtaacgaccgtaaagccagggtggcttttgaagtatgctagttccctctgcaccttctctgcaccgttggaagatccgaagccgtactatgacccactgaacgaccaagtctactgctacgttagcccggtcttctctcgtcataactggcagcttccgttgcacagtttacctatcaaagacggtgcgagccggctgcaggtgtttgcatgcgcgttgcttaaaggggacgtcctgccatgtctacgggacgccaaggatttcctcgcgctgtcaccatccgctgtgttggggcctgccaggcaacggagagtgggagatcttcttagcaggatgaagatcggtccgaagttagtcgacagcagggcagcactgagaggcgtgtggaattttgatcctggttttctctatcctgagctcaagttgtggtaccaggatagattccatgaccagtttgacttggtgtgggagcagatgcaccaacaggttctccttgaggggcgcaagcttttcccaaagaggtccaagaaagttaaaggctaggccaaaatttttggtgcagttggttggctggcagaagcttttttgtgtgtgtggttttaaggaatagatacgagagatgcagtgagacatcatgcacaagcagttttgtctagacattttgccttgatctggatttgttccattgcatctccgtgttgaactgttgatgtacaccgttcctctgcaagcaaccttcaccctgccatctgtgtcagaaatgttttctgatccaaccatttgctcaaaaccttgaacctgaaaaatatcctgatatccaaccatcgccatggcccatggggattggagggaattggcttcgagtgagggccaggggtaggattcgccagaaacaaacaggggatggtcgtgcgcagattgattacatttctctcctttccgtctctcgctctatttgcttttagcatatgaagtgtccgattccaggggtaaaaacagcggtagagtcgatataaaaatgtagcactaaactatattaccctcagttcaagaaaac

SEQ ID NO: 51410 - DNA, 4768 bp, Zea Mays
ccaacgcctactaccgccgccacccgcctcccgcctctcctctagccccagccgttcagcgccgcccgcctccctcctctcctcctctcctccctcctccagtgccgccacgacgctcgccactagcgccgttcgcctcctccaacgcccgagcaccgcctccctcctccctcctccagcgccgactgcccctaacaccgccctctagctcctctagcagccagcgtcgcttacagccatcaagttccagggcaggagtcaagacagtgaatcacccagctgctctattcggttcaaatcctgtgtcggccactgcccatatggtttcaggccggctgtgctcgtttcgtcccttgtgcgggagctttgtttgagatttgagtcgttgcagctaaatcatggaagatagtaatgccctgattttgccctgcaaaaggaagaacaaggcgcaagtgaaagccaaggatggtaagaaagccaagaaggaagacccaaagatgagcaagacgaagctcaaaaagctgcaaaaattggagctatgttggtttggttgcgtccaggaggaaaagaaaaagaagctgctacaagctaaaagcatcgaggaagcacaagatctcagaggatgcatattcactgcttcatgcttcagggactattggtcaagctgagactttgaaagaaaaacggaggcgtgctgtgcaattctcaaaggctggcctggatgttcctgaagaactctcactgttcaagaaaagcggtggtacgaaagttcctgaaaacagtgatgttggggagcaagtttccccattaaagtttgttgagccagcaccaattgtggattctggtagagaatgtaataacaaaatgaaggatctagtgaaagctattgaatgccaaccgattatgggttttggagctggcattccagagccagaaactgaagagcctagtgatgatgctcatatgttgacaaatcagaaaattcagttgtcaattccaagttgttctggagcagaattagatttgcagggtaaagaactaggacaagggcagcattctgtacaggagtgcataaatcctccaattgttgtacctgtgtcaagactgcatgaagttgagaaggcaaggagggatctcccaataataatgatggagcaagaaataatggaagctatctatgaaaattctgtagtaattctgtgcggagagactggctgcggtaaaactacccaggttccccagttcctatacgaagctggcttcggcactagtgaccgagctgatagaaaagggatgattggtatcacacaaccacggcgcgtagctgttcatgccacagctaagagggtttcctatgagttaggacttaagctgggaagagaagttggttttcaagttaggcatgatagaaaggtaggaagtgaatgctccatcaagttcatgacagatggtattttgctgcgagaaatccagggtgattttctgttgaagcgctattcagtgatcatattggatgaggcacacgaaaggagcttgaacacagatatacttattgggatgctttctagaattataaagattcgcaaggatttgtatgcaaagcagcaggaaaaattacggtctggatttaagatcaaaccagaggataagatcagtcagttaaaggtggtgctcatgagtgctactctgcagttaaaggactttatttcaaatagaaggttgtttggcgtgatcccaccagctgttaaggtacctgtgcggcagtttccagtatcagttcacttctcaaagaggacacatgatgattatttagggctagcttataaaaaggttatgtcaatccacaagaggcttccaccaggtggaatcctcgtatttgtcactggacaacgggaagtggagtacttgtgtaagaaactgcgaagagcatccaaggtgcaaactgctaagaatcctgggaaaactgatggtgaagacaatggtccatgcccaaaagtagatgaaaaggaaatttttgaagcatatgatattgacagagatgaacccgagcaccgatatgacatgttttcctcgtatgatgacgatggtatgtatgatgacgatggtatgaatgttgagacaaatattgattcttctgacaacgaaacggagagcgaaatggatactgaaaccgatgacgaagagtctgttactattgaaactacagaagaggatgttccagtattagcatttttgaaagatgctgagagctcatctgcgttgaaggcatcatttggagctttgtcgggaataccaaatgtgctggaaagtgtcgaggaattaagtgatgctaaatgtgaagaaaagaccagcacttcacttcgttgttttagtaaatgcacagaacataagcctgtttcacatggtagacttcgtgtcttgccactttatgcaaagttatcagcttcacaacagcttcaagtgtttgaagatgtcccagagggggaaagattagttgtggtggcaactaatgttgccgaaacctctctaacaattccaggcataaaatatgtagttgatactggaaaagaaaaggttaagaattatgatcatgctactgggatgtcaagttatgatgtccaatggataagcaaggcatcagcatcccagcgtgctggaagagcaggaagaacagggcctggccactgttaccgtctctactcagctgcagcatatggtaaagatgatttattccctgaattcgctgaacctcagattaagaaaattccagttgaaggtgttgtcctgatgctcaagttcatgtctattgataaggttgagaactttcctttcccaacaccaccaaacaaggaaagtttggttgaagctgagcgttgcttaaagacattggaagcacttcatagtgatggaaaacttacacctatgggcaaggcaatggcacagtaccccatgagcccaagacattctcgtcttcttcttacagtgattaagaatttgaagaataagcagcaaggctttgctagatctaacttcatattaggatatgctgctgctgctgcatcaggtttgaattttactaatccttttctcaagcaattggatgaatgtgacacttatggtgaatcagtagaaaacactaatctggaagctaatggtccatgggaaaggaagagacagaagaagctcaaggctgtggttagagaggcacgggaaaagttttctaaccctagcagtgatgctttaaccatcgctcgtgccctgcagttctttgagttgtcagaaaacccagtggaattctgcagagccaattcacttcatcttaaaaccatggaagagatgtcaaagttgagaaagcagcttctgcagttaatatttcgccatagcaaatggtgcgaggagtttgcttggaattcgggtgactctgctgaggttgaacgggcctggaggaacgagcccagtatattgcagttgaatgaagaggaacttcttgggcaaggaatttgcgctggatgggctgatagagttgcaaggaggattcacacctatttgaaaccatcagaagacgatcgaaaggttcgagccgttcgttatcagtcttgtgcacttgatgatacaatatatctgcaccgatcatcatctgtcgcccaagttgccccagagcttgtagtttactcggagctacttagtacaaagaggctatacatgcacggtgtaacgaccgtaaagccagggtggcttttgaagtatgctagttccctctgcaccttctctgcaccgttggaagatccgaagccgtactatgacccactgaacgaccaagtctactgctacgttagcccggtcttctctcgtcataactggcagcttccgttgcacagtttacctatcaaagacggtgcgagccggctgcaggtgtttgcatgcgcgttgcttaaaggggacgtcctgccatgtctacgggacgccaaggatttcctcgcgctgtcaccatccgctgtgttggggcctgccaggcaacggagagtgggagatcttcttagcaggatgaagatcggtccgaagttagtcgacagcagggcagcactgagaggcgtgtggaattttgatcctggttttctctatcctgagctcaagttgtggtaccaggatagattccatgaccagtttgacttggtgtgggagcagatgcaccaacaggttctccttgaggggcgcaagcttttcccaaagaggtccaagaaagttaaaggctaggccaaaatttttggtgcagttggttggctggcagaagcttttttgtgtgtgtggttttaaggaatagatacgagagatgcagtgagacatcatgcacaagcagttttgtctagacattttgccttgatctggatttgttccattgcatctccgtgttgaactgttgatgtacaccgttcctctgcaagcaaccttcaccctgccatctgtgtcagaaatgttttctgatccaaccatttgctcaaaaccttgaacctgaaaaatatcctgatatccaaccatcgccatggcccatggggattggagggaattggcttcgagtgagggccaggggtaggattcgccagaaacaaacaggggatggtcgtgcgcagattgattacatttctctcctttccgtctctcgctctatttgcttttagcatatgaagtgtccgattccaggggtaaaaacagcggtagagtcgatataaaaatgtagcactaaactatattaccctcagttcaagaaaac

SEQ ID NO: 51411 - DNA, 4339 bp, Zea Mays
ccgctcacggcgcgcacatggaacgccttcgctttcctcctccctccctccgtcccgtcccgtgcccccttctgccttctctcaccgccacggccactggcattggccgcgctcgccgcccaccgcccaccgcccccgcgccgctgtaggagcgcgcgcttgctttagcgtaggccatggcccactactagcgggtgattagccttgattagcgggcaccactccactgttacgggaggcgcgttgttttaatcgcgggcgcgcgacgcccgtcgcctgtctcgaatatctgctgccgccgccaaaagtgcggattcctcctcctccccgtcgggcggcctcgccccccctggtgcctactgggcgctggcggagtgggagtggatcgacgtgttgcggccgcggagtggaggcaataaagggaaagctgggcggagtgctcgggtaccgtagccggattagttattaatgcccgcgagcagctagtcgtaggcgtaactattttaaggcagctgtcgccgctggggacttgcgaaagcttcgcctcttttgagaagctctgcaccacgcctggctccgccccgctccccctccacctccaggcttccttcacagtctcgctgttgctagtgctgccttgctgctagtgataggggtcccggggccctcaagttctgggtgggcggcaaacatatggtgggcaccgggcgggggaataaggaggaagagaaagaggaggaggagcggcagtagatttgggccgcacaggcagggatggggggcaagtaccgcgcggcgaggacgaagaggtggtggagggggctggcagcggccgggtgggtgctaaccgcggtggtctgctccgcggtgatgcactggaccctgcgccgggacagcatggaccgcgccgaggagcgcctcgtcagcatgtgcgaggagagggccaggatgctgcaggagcagttcggggtcaccgtcaaccacgtccacgccatcgccattctcatctccaccttcaacttcgagaagtcccctccagccatcgaccaggacacctttgcaaaatacacggcaaggacatcatttgagcgaccactgctcaatggggtggcattcgcacagcgtgtattccatcatgagagggaaatgtttgaaagccagcagggatgggttatgaatacgatgcagcgggagcctgcacctccgcaggttgaatacgccccagtgattttctctcaggatacggtttcctaccttgcacgcattgacatgatgtctggggaggaggaccgagaaaacattttccgggccaggactactggcaaagctgtgttaacaaacccattccggttgcttggatcaaaccacttgggagtagttctcacgtttgctgtgtaccgccctgatctccctgctgatgcatcagttgagcaacgtgtggaagcaactattggatatcttggtggagcctttgatgtggagtcacttgtggagaatttgttgagcaaacttgctggcaatcaggatattgtggtaaatgtctatgatgtcacaaatgcttcagatgctatggttttgtatggaccttcaagtttggacgagcaagtgcctttcttgcatgttagcatgttggattttggagatccatttaggaagcatgaaatgagatgcagacaaaaacttcctatgccgtggtctgccatcaccaatcctttgggcacatttgtcatatggatgcttctagggtatagcattgctgctgcatattctcgatatgacaaagttactgaagattgcagaaagatggaagagctaaaaacacaggcagaagctgctgatgttgcaaaatctcagttcctggcaactgtgtcacatgagatcagaacacctatgaatggcgtccttggaatgctggatatgcttttaggaacagatctaactatgacacagaaggattatgctcaaactgctcaaatgtgtggcagagcattgattacactgataaatgatgtccttgatcgagcaaagatcgaggctggaaagttagagcttgaagcggtgccttttgacctgcgttctctcatggatgatgttgtttccttgttttcttcaaagtcacgggagaagtgcattgagcttgcagtatttgtatgtgacaatgttccaaaggttgttattggagatccttggaggtttcgacagatattgacaaatttggtcgggaatgcagtcaaattcacagaacgaggtcatgtatttgtgcgggtctgtttggctgaaaactcaaatgtggaagccaatcaggtcctacatggagccatgaatggcaaaggtggtagagttgagtcaacaactaatggtgccttcaatactttgagtgggtttgaagcagcagacagacgaaatagttggcaatattttaaactgctcctctccgataaggagtcacttttggatgatcttgagggcgaaaattctaatcaaagtgattcaaatcatgtcacactagcaataagtattgaggacacaggtgtcgggataccactgcaagcacaagatcgtgtttttacaccgtttatgcaggctgacagttcaacttcaaggaattatggcggtactggcatcggtttaagcatcagcaagtgtctagctgaacttatgggtgggcagataagtttcactagccatccttctgttggaagcacgttcactttctcagccacactgaagcactcatacaaagatatttcggtcgattcaagtaggagcttgacagaggcactaccaactgcttttaagggaatgaaggccatcttggtagatgggagacctgtacgtagtgctgttacaagatatcacctcaagaggttgggaatacttcttcaagttgtgaacaatatgaatgcagtagtaaaagctttcccaggacaaaatggagcaaccggttctagggaaaaagcatcaattctttttattgagagtgacttctggaggcctgagacagatgttcagttattgaaccatctacgcgagcagaagaacggtcagttgtcggatgggcacaaggtagttcttttggtcacctctgaagccgacaaggacaaatatggatccatatttgatattgtgatgtgtaagcctataagggcaagcacaatcgcttcatctattcaacaactgctcaaagtagagatagccgaaagaaaagataatcaaaaccggccgtcgtttcttcgaagcttgctggttgggaagaatatattggtcgtagacgataataaagtcaacctcagagttgctgcggctgcactcaagaaatatggtgctaatgttagctgtgttgaaagcggcaaggatgctatcagtctacttcaacccccgcatcgcttcgatgcatgttttatggatgttcagatgccagagatggacgggtttgaggcaaccggacaaataaggcaaatggagttgaaagcgaacgaggaaaggaagaacaagttggcttcgattgaaggctcgacaactgccgagtaccatctgcctgttctggcaatgacagccgatgttatccaggcaacttacgaagagtgcataaaatcgggaatggatggatacgtatctaaacccttcgacgaggagcagctataccaagcagtctccagattggtagtgggaacgacggattcggctgtttgatgttcaaaatacgatggacctgacttctcattcatcgaagtgaagcatcaccatcttgcctctgtccagctgactctatatcccttgacaatgggcctctgacatggcctctcacaagactagatgaaaaaagaagatgaaagtgccgtgagttaggtacgtgtcacacatgacatgaagttgctgcggcagcccagaggagtgtaggtagatcaccctgtaactctcttgttctttgatgtttataggctgttgtgtcttctgacaattcattggaaataccacatctcgttgcaatccccctagtttcagaactgccctgcctcgtctcatccacattatccaggaaactgtttccttcagggctagtttgggagtccaaaaaccggaggggattagagggactaaaattccctgcttattcaaaattgaataaggaggggattttagcccgtccaatccccttcggttttgtggctcccaaactagccctaagcgcgaaggaaaacacgggtaaattggctgtaggacttacttgagtattggtatttgctaatggatactaatcaatctcttctaggaatggacgtgagaagctaaaagtgactgctatgtcctgactattatatatacctttctataaccc

SEQ ID NO: 51412 - DNA, 1441 bp, Zea Mays
ctttccctcacgtggaggctgcctcaacttcaacccttatatgtggaatgggaggaaaaagcatcaattctttttattgagagtgacttctggaggcctgagacagatgttcagttattgaaccatctacgcgagcagaagaacggtcagttgtcggatgggcacaaggtagttcttttggtcacctctgaagccgacaaggacaaatatggatccatatttgatattgtgatgtgtaagcctataagggcaagcacaatcgcttcatctattcaacaactgctcaaagtagagatagccgaaagaaaagataatcaaaaccggccgtcgtttcttcgaagcttgctggttgggaagaatatattggtcgtagacgataataaagtcaacctcagagttgctgcggctgcactcaagaaatatggtgctaatgttagctgtgttgaaagcggcaaggatgctatcagtctacttcaacccccgcatcgcttcgatgcatgttttatggatgttcagatgccagagatggacgggtttgaggcaaccggacaaataaggcaaatggagttgaaagcgaacgaggaaaggaagaacaagttggcttcgattgaaggctcgacaactgccgagtaccatctgcctgttctggcaatgacagccgatgttatccaggcaacttacgaagagtgcataaaatcgggaatggatggatacgtatctaaacccttcgacgaggagcagctataccaagcagtctccagattggtagtgggaacgacggattcggctgtttgatgttcaaaatacgatggacctgacttctcattcatcgaagtgaagcatcaccatcttgcctctgtccagctgactctatatcccttgacaatgggcctctgacatggcctctcacaagactagatgaaaaaagaagatgaaagtgccgtgagttaggtacgtgtcacacatgacatgaagttgctgcggcagcccagaggagtgtaggtagatcaccctgtaactctcttgttctttgatgtttataggctgttgtgtcttctgacaattcattggaaataccacatctcgttgcaatccccctagtttcagaactgccctgcctcgtctcatccacattatccaggaaactgtttccttcagggctagtttgggagtccaaaaaccggaggggattagagggactaaaattccctgcttattcaaaattgaataaggaggggattttagcccgtccaatccccttcggttttgtggctcccaaactagccctaagcgcgaaggaaaacacgggtaaattggctgtaggacttacttgagtattggtatttgctaatggatactaatcaatctcttctaggaatggacgtgagaagctaaaagtgactgctatgtcctgactattatatatacctttctataaccc

SEQ ID NO: 51413 - DNA, 1441 bp, Zea Mays
aaacattccaacccgccgcaactatagtatatatatttctctctggcgaataacaacaaccaggtgggcgacggcgacacggaccactactgctggcagcggccggaggacatgacgacgtcgcggcaggcgtacaaggtcgaccgggaccacccgggctccgacgtcgccggcgagaccgcggcggccatggcggccgcgtccatcgtcttccgcgactccaacccgcactacgcgcacctgctcctgcaccacgcccagcagctgttcgagttcgccgacaagtacaggggcaaatacgacagcagcatcgctgaggtgaagagctactacgcgtccgtgagcgggtacaaggacgagctcctgtgggccgccctgtggctccaccgcgccaccggcagggctgactacctcgactacgtcgtcgacaatgccgacagcttcggcggcaccggctgggccatcaacgagttcagctgggacgtcaagtacgccggcgtccagatcctagcagcaaggttgctgctgagaggggagcacgcgacgcgccaccggagcacgctggagcggtacagggccaaggcggagcgctacgtgtgcgcgtgcctgggccggaacacggaaggcggcgcggacgccaacgtggagcgcagccccggcgggatgctctacgtccggcagtggaacaacatgcagtacgtgaccagcgccgcgttcctgctctccgcctactccgactacctggccgaggccggcgtccggaccgtgtcgtgcgcgggcggcgagaccgtggcggcccgggaggtggccgcgctcgccagggcgcaggtggactacgtgctcggcaccaaccccaggggcgtcagctacctcgtcggctacggccccaagtaccccagccgggtgcaccaccgcgccgcgtccatcgtgccgtacaagcacagcaaggagttcatcggctgcacgcagggcttcgaccactggttcggccgccggagctccaaccccaacgtgctcgtcggcgccatcgtcggcgggccggaccggcgggacaggttcagggacaaccgggagaactacatgcagacggaggcctgcacgtacaacacggccccgatggtcggcatgttcgccaagctgcaccggttggcgcggcaggagcgggaacaggggccgacgccggcgccggcgccggcgcccgtcacgtctgcagcggccgatgtgtaaatagataggaatgtagagggggggctgtacaattttccccattctttggttcattttttgttgggctctgaatttcattttacacagatccaggttattgtatacaaaagaaaaggtagaggcatcgacatgtgcaaatgtaaatccactaccagtacatacgagggaaagaaatggcattcttaacttattggtcgttcttgtctgtaccttt

SEQ ID NO: 51414 - DNA, 4060 bp, Zea Mays
ctttaaaacaaagaaatccgaaactttatctcgtttcctccccgcctctccccctccccggctctaagggctcttctacaccgaagcaccgcacctcccgccatgcactgcatcgccccccgcctgctcctcctcccgctcccgaccgtctcccgccacgcgctatcgccaacccagacgccacctcttcctcccctcctcccctcccgcgcctgtaagttccacctcgcctcggcgcgctcgccgtcccgcgccgccgcttcggtttccggcgacgacgaggatgaggaggttgacgtggatgacgacgaggacgacgagacaaccatccgcaacgtagacgatgaatacgacgacgatttcgaggacggggatgagggagatgagggcgatgaggaggcggtggacgaggagagcggtggtgagtacgaggaagaggcgggggaggacgaggacaagcgggaggataccgcagcgcggaggcgggactcggaggagtataagtcgcggcgggtggcgaagctggtcgccgaggtgcgggagttcggggaggacgtcatcgactacaacgagctcgccgggatctacgacttccccatcgacaagtttcagtttctgcacctacaagtagtgggaaaacattaatagcagaagctgcagcagttgcaacagtagcaagaggaaggcgtctcttctacacaacaccattaaaggcattgtcaaaccagaagttccgtgatttccggaataccttcggtgatcataatgttggccttcttacaggagattctgctatcaacaaagatgctcagatcctaatcatgacaacagagattttacgtaacatgctgtaccaaagtgttggcatgacagcctctgaaggtagattatttcaagttgatgtcattgttttggatgaagtccattatttgagtgatatctcacgtggcactgtttgggaagaaactgtcatatattgtccaaaggaagtccaacttatatgtctgtcagccactgttgcaaatcctgatgaattagctggctggataagtcagattcatggtaaaacagagcttgtaacatcgaacaaacgtccagttccgcttacttggcacttctcgaagaaatattcattacaaccgcttcttgatggaaaggggaaaaaaatgaataggaaactgcggatgtctaactcccaaaacttagcatctccaaagagtgagttctattatgtgaaagggaagaggaggtttagaacaaataaaattgagcaaggtaatagcaggcctttggacatatcgaaacaggttcagttatcaaagcatgaactcagcaatatgcgtcgttcccaagttccactaatacgtgacactttatcacaactatgggaaaatggcatgcttccagctatctggtttatttttagtagaagagggtgtgatgcagctgttgagtaccttgaggattgcagactgttgcatgactgtgaggctagtgaagttgagctggaacttaggaggttcaagatgcaatatcctgatgctattcgagaaagtgctgtgaaaggactcatgcgaggagttgcggcccatcatgctggttgcttgccactgtggaaatcatttattgaagaattatttcaacgtggccttgttaaagtagtttttgcgacagaaacccttgcagctgggattaatatgcctgccaggacggctgtaatttcttctctcagtaaaagaatagatgctgggcgccagctcttaaccccgaatgaactattccagatggcaggtcgtgctggaaggagagggattgatacagttgggcatgctgttcttgttcagactccatatgaagggcctgaagagtgttgtgacatcatctttgccggacttgagccacttgtctcacaattcactgcatcatatgggatggttttgaatcttcttgccggttcaaaagttacacataaacagaaagaatcggatgatgttaaggacaagcattctggaagaaccttagaagaagctcgaaagctagtggagcaaagctttgggaattatgttggtagcaatgtaatggttgctgccaaagaagagactgaaagaataaggcaagaaatacaatacctctcttcagaaattactgatgaatctattgatcgaaaatgcagggaagaattatcagaagaagactatgctgagatttccctcctacagaagagactaaaggaagagaagcagatcagaaatgagctgaaaaaaaagatggaactggagagaatggctgcatggaaaaatcggttagaggaatttgaaagtggccatcttcctttcatgtgcctgcaatacaaagataaggattcaattcagcacacgatccctgctgtatttattggaaacctcaactcatttgctgatcaaaagatcatgaacatggtggaagatgattcacttgtttctggcaagccgaaacgtgatagtggggaacaactttatcgcccatcttactatgtagctttaagttcagataattcatggtatctgttcacagaaaaatggattaaaactgtttacaagacaggtctacctgctgtcccttctgttgaagggggcacactccctagagaaaccctgaaacagctcctcctgcgtgaagagttggtgtgggataaagttgaaaaatcagaatacggctctttgttaagcatggaaggttctttagacacatggtcgtggagtctcaatgttcctgtgcttaatagcctttcggaagacaatgaggtagaacgattctcccaggaacatcaagatgctgtagaatgctacaagcaacagaggaggaaggtttcacatttaaagaaaacaataaaggctactaggggtttcaaagaattccaaaagatcatcgacatgagaaattttacaaaagagaagattgagcgcttagaagctagatcccgtcgcttgactcgacgaataagacaaattgaaccgaccggttggaaagaatttctccagattagcaaagtcatacaagaggctagagcattggatatcaatactcagttcttaggaacaaggtcctcttggatctaaagccatctcaactggcagcagtttgtggaagtttagtttccgaagggatcaaacttcgtccttggaaaaatagcagctatgtatatgaaccttcttctgttgttactggtgttataagttatttagaagagcagagaaattcgctaatcgatctccaagagagacatagtgttaagataccttgcgaaatagatgcccagtttgctgggatggttgaagcctgggcttcaggactgacttggagggagataatgatggactctgcaatggacgatggagatttagcccgtctactcaggcgctctatagatttactagctcagattcccaaactgccagacattgatccggttctccaaaagaatgcacaaattgcttgcagcgtcatggaccgagtaccgattagtgagcttgccggttgaaaactcaacctttaacagttgtcacagtgaaattcaagagcagctcatatcccactgactaaacatgtttttcaagaagatcagcaactacagtgattggttcaaggaatcaacattcagaatgatgaacaagacaaatgatcacatcaaaggttcataggattattcatccaaaaaattctatcactaccaattccagaattttcaaccacgtgaccaatcaaatggatatggagatcaaagcgcagcaacaatctctaggttttctcacggcttctagatgcctgaacaccagaaatactcagaatcagaactgcagtgtcaatggatatgactattaagggcatgttcgtttcacccccaatccatatggattgaaggggattgagtgagtttcaatccctgataaggccttgttgggttattcacatctcacatgggttggaagggattggaaaattttaagaagaattttgacttgctatggatttaaacacacccaatctcacccaatccacatggactgacactaaaacgaac

SEQ ID NO: 51415 - DNA, 3995 bp, Zea Mays
taaaacaaagaaatccgaaactttatctcgtttcctccccgcctctccccctccccggctctaagggctcttctacaccgaagcaccgcacctcccgccatgcactgcatcgccccccgcctgctcctcctcccgctcccgaccgtctcccgccacgcgctatcgccaacccagacgccacctcttcctcccctcctcccctcccgcgcctgtaagttccacctcgcctcggcgcgctcgccgtcccgcgccgccgcttcggtttccggcgacgacgaggatgaggaggttgacgtggatgacgacgaggacgacgagacaaccatccgcaacgtagacgatgaatacgacgacgatttcgaggacggggatgagggagatgagggcgatgaggaggcggtggacgaggagagcggtggtgagtacgaggaagaggcgggggaggacgaggacaagcgggaggataccgcagcgcggaggcgggactcggaggagtataagtcgcggcgggtggcgaagctggtcgccgaggtgcgggagttcggggaggacgtcatcgactacaacgagctcgccgggatctacgacttccccatcgacaagtttcagcgcttggctatacaagcatttttaagaggttcatctgttgtagtttctgcacctacaagtagtgggaaaacattaatagcagaagctgcagcagttgcaacagtagcaagaggaaggcgtctcttctacacaacaccattaaaggcattgtcaaaccagaagttccgtgatttccggaataccttcggtgatcataatgttggccttcttacaggagattctgctatcaacaaagatgctcagatcctaatcatgacaacagagattttacgtaacatgctgtaccaaagtgttggcatgacagcctctgaaggtagattatttcaagttgatgtcattgttttggatgaagtccattatttgagtgatatctcacgtggcactgtttgggaagaaactgtcatatattgtccaaaggaagtccaacttatatgtctgtcagccactgttgcaaatcctgatgaattagctggctggataagtcagattcatggtaaaacagagcttgtaacatcgaacaaacgtccagttccgcttacttggcacttctcgaagaaatattcattacaaccgcttcttgatggaaaggggaaaaaaatgaataggaaactgcggatgtctaactcccaaaacttagcatctccaaagagtgagttctattatgtgaaagggaagaggaggtttagaacaaataaaattgagcaaggtaatagcaggcctttggacatatcgaaacaggttcagttatcaaagcatgaactcagcaatatgcgtcgttcccaagttccactaatacgtgacactttatcacaactatgggaaaatggcatgcttccagctatctggtttatttttagtagaagagggtgtgatgcagctgttgagtaccttgaggattgcagactgttgcatgactgtgaggctagtgaagttgagctggaacttaggaggttcaagatgcaatatcctgatgctattcgagaaagtgctgtgaaaggactcatgcgaggagttgcggcccatcatgctggttgcttgccactgtggaaatcatttattgaagaattatttcaacgtggccttgttaaagtagtttttgcgacagaaacccttgcagctgggattaatatgcctgccaggacggctgtaatttcttctctcagtaaaagaatagatgctgggcgccagctcttaaccccgaatgaactattccagatggcaggtcgtgctggaaggagagggattgatacagttgggcatgctgttcttgttcagactccatatgaagggcctgaagagtgttgtgacatcatctttgccggacttgagccacttgtctcacaattcactgcatcatatgggatggttttgaatcttcttgccggttcaaaagttacacataaacagaaagaatcggatgatgttaaggacaagcattctggaagaaccttagaagaagctcgaaagctagtggagcaaagctttgggaattatgttggtagcaatggaagaattatcagaagaagactatgctgagatttccctcctacagaagagactaaaggaagagaagcagatcagaaatgagctgaaaaaaaagatggaactggagagaatggctgcatggaaaaatcggttagaggaatttgaaagtggccatcttcctttcatgtgcctgcaatacaaagataaggattcaattcagcacacgatccctgctgtatttattggaaacctcaactcatttgctgatcaaaagatcatgaacatggtggaagatgattcacttgtttctggcaagccgaaacgtgatagtggggaacaactttatcgcccatcttactatgtagctttaagttcagataattcatggtatctgttcacagaaaaatggattaaaactgtttacaagacaggtctacctgctgtcccttctgttgaagggggcacactccctagagaaaccctgaaacagctcctcctgcgtgaagagttggtgtgggataaagttgaaaaatcagaatacggctctttgttaagcatggaaggttctttagacacatggtcgtggagtctcaatgttcctgtgcttaatagcctttcggaagacaatgaggtagaacgattctcccaggaacatcaagatgctgtagaatgctacaagcaacagaggaggaaggtttcacatttaaagaaaacaataaaggctactaggggtttcaaagaattccaaaagatcatcgacatgagaaattttacaaaagagaagattgagcgcttagaagctagatcccgtcgcttgactcgacgaataagacaaattgaaccgaccggttggaaagaatttctccagattagcaaagtcatacaagaggctagagcattggatatcaatactcaggaacaaggtcctcttggatctaaagccatctcaactggcagcagtttgtggaagtttagtttccgaagggatcaaacttcgtccttggaaaaatagcagctatgtatatgaaccttcttctgttgttactggtgttataagttatttagaagagcagagaaattcgctaatcgatctccaagagagacatagtgttaagataccttgcgaaatagatgcccagtttgctgggatggttgaagcctgggcttcaggactgacttggagggagataatgatggactctgcaatggacgatggagatttagcccgtctactcaggcgctctatagatttactagctcagattcccaaactgccagacattgatccggttctccaaaagaatgcacaaattgcttgcagcgtcatggaccgagtaccgattagtgagcttgccggttgaaaactcaacctttaacagttgtcacagtgaaattcaagagcagctcatatcccactgactaaacatgtttttcaagaagatcagcaactacagtgattggttcaaggaatcaacattcagaatgatgaacaagacaaatgatcacatcaaaggttcataggattattcatccaaaaaattctatcactaccaattccagaattttcaaccacgtgaccaatcaaatggatatggagatcaaagcgcagcaacaatctctaggttttctcacggcttctagatgcctgaacaccagaaatactcagaatcagaactgcagtgtcaatggatatgactattaagggcatgttcgtttcacccccaatccatatggattgaaggggattgagtgagtttcaatccctgataaggccttgttgggttattcacatctcacatgggttggaagggattggaaaattttaagaagaattttgacttgctatggatttaaacacacccaatctcacccaatccacatggactgacactaaaacgaac

SEQ ID NO: 51416 - DNA, 3684 bp, Zea Mays
taaaacaaagaaatccgaaactttatctcgtttcctccccgcctctccccctccccggctctaagggctcttctacaccgaagcaccgcacctcccgccatgcactgcatcgccccccgcctgctcctcctcccgctcccgaccgtctcccgccacgcgctatcgccaacccagacgccacctcttcctcccctcctcccctcccgcgcctgtaagttccacctcgcctcggcgcgctcgccgtcccgcgccgccgcttcggtttccggcgacgacgaggatgaggaggttgacgtggatgacgacgaggacgacgagacaaccatccgcaacgtagacgatgaatacgacgacgatttcgaggacggggatgagggagatgagggcgatgaggaggcggtggacgaggagagcggtggtgagtacgaggaagaggcgggggaggacgaggacaagcgggaggataccgcagcgcggaggcgggactcggaggagtataagtcgcggcgggtggcgaagctggtcgccgaggtgcgggagttcggggaggacgtcatcgactacaacgagctcgccgggatctacgacttccccatcgacaagtttcagcgcttggctatacaagcatttttaagaggttcatctgttgtagtttctgcacctacaagtagtgggaaaacattaatagcagaagctgcagcagttgcaacagtagcaagaggaaggcgtctcttctacacaacaccattaaaggcattgtcaaaccagaagttccgtgatttccggaataccttcggtgatcataatgttggccttcttacaggagattctgctatcaacaaagatgctcagatcctaatcatgacaacagagattttacgtaacatgctgtaccaaagtgttggcatgacagcctctgaaggtagattatttcaagttgatgtcattgttttggatgaagtccattatttgagtgatatctcacgtggcactgtttgggaagaaactgtcatatattgtccaaaggaagtccaacttatatgtctgtcagccactgttgcaaatcctgatgaattagctggctggataagtcagattcatggtaaaacagagcttgtaacatcgaacaaacgtccagttccgcttacttggcacttctcgaagaaatattcattacaaccgcttcttgatggaaaggggaaaaaaatgaataggaaactgcggatgtctaactcccaaaacttagcatctccaaagagtgagttctattatgtgaaagggaagaggaggtttagaacaaataaaattgagcaaggtaatagcaggcctttggacatatcgaaacaggttcagttatcaaagcatgaactcagcaatatgcgtcgttcccaagttccactaatacgtgacactttatcacaactatgggaaaatggcatgcttccagctatctggtttatttttagtagaagagggtgtgatgcagctgttgagtaccttgaggattgcagactgttgcatgactgtgaggctagtgaagttgagctggaacttaggaggttcaagatgcaatatcctgatgctattcgagaaagtgctgtgaaaggactcatgcgaggagttgcggcccatcatgctggttgcttgccactgtggaaatcatttattgaagaattatttcaacgtggccttgttaaagtagtttttgcgacagaaacccttgcagctgggattaatatgcctgccaggacggctgtaatttcttctctcagtaaaagaatagatgctgggcgccagctcttaaccccgaatgaactattccagatggcaggtcgtgctggaaggagagggattgatacagttgggcatgctgttcttgttcagactccatatgaagggcctgaagagtgttgtgacatcatctttgccggacttgagccacttgtctcacaattcactgcatcatatgggatggttttgaatcttcttgccgtatgtatttatattttctttttattcctatctattcacatgttcctgctttctccaggtcctaatctgatggattggaatatgttctccagggttcaaaagttacacataaacagaaagaatcggatgatgttaaggacaagcattctggaagaaccttagaagaagctcgaaagctagtggagcaaagctttgggaattatgttggtagcaatgtaatggttgctgccaaagaagagactgaaagaataaggcaagaaatacaatacctctcttcagaaattactgatgaatctattgatcgaaaatgcagggaagaattatcagaagaagactatgctgagatttccctcctacagaagagactaaaggaagagaagcagatcagaaatgagctgaaaaaaaagatggaactggagagaatggctgcatggaaaaatcggttagaggaatttgaaagtggccatcttcctttcatgtgcctgcaatacaaagataaggattcaattcagcacacgatccctgctgtatttattggaaacctcaactcatttgctgatcaaaagatcatgaacatggtggaagatgattcacttgtttctggcaagccgaaacgtgatagtggggaacaactttatcgcccatcttactatgtagctttaagttcagataattcatggtatctgttcacagaaaaatggattaaaactgtttacaagacaggtctacctgctgtcccttctgttgaagggggcacactccctagagaaaccctgaaacagctcctcctgcgtgaagagttggtgtgggataaagttgaaaaatcagaatacggctctttgttaagcatggaaggttctttagacacatggtcgtggagtctcaatgttcctgtgcttaatagcctttcggaagacaatgaggtagaacgattctcccaggaacatcaagatgctgtagaatgctacaagcaacagaggaggaaggtttcacatttaaagaaaacaataaaggctactaggggtttcaaagaattccaaaagatcatcgacatgagaaattttacaaaagagaagattgagcgcttagaagctagatcccgtcgcttgactcgacgaataagacaaattgaaccgaccggttggaaagaatttctccagattagcaaagtcatacaagaggctagagcattggatatcaatactcaggaacaaggtcctcttggatctaaagccatctcaactggcagcagtttgtggaagtttagtttccgaagggatcaaacttcgtccttggaaaaatagcagctatgtatatgaaccttcttctgttgttactggtgttataagttatttagaagagcagagaaattcgctaatcgatctccaagagagacatagtgttaagataccttgcgaaatagatgcccagtttgctgggatggttgaagcctgggcttcaggactgacttggagggagataatgatggactctgcaatggacgatggagatttagcccgtctactcaggcgctctatagatttactagctcagattcccaaactgccagacattgatccggttctccaaaagaatgcacaaattgcttgcagcgtcatggaccgagtaccgattagtgagcttgccggttgaaaactcaacctatatagctgctgacagtaggggttcccc

SEQ ID NO: 51417 - DNA, 3891 bp, Zea Mays
taaaacaaagaaatccgaaactttatctcgtttcctccccgcctctccccctccccggctctaagggctcttctacaccgaagcaccgcacctcccgccatgcactgcatcgccccccgcctgctcctcctcccgctcccgaccgtctcccgccacgcgctatcgccaacccagacgccacctcttcctcccctcctcccctcccgcgcctgtaagttccacctcgcctcggcgcgctcgccgtcccgcgccgccgcttcggtttccggcgacgacgaggatgaggaggttgacgtggatgacgacgaggacgacgagacaaccatccgcaacgtagacgatgaatacgacgacgatttcgaggacggggatgagggagatgagggcgatgaggaggcggtggacgaggagagcggtggtgagtacgaggaagaggcgggggaggacgaggacaagcgggaggataccgcagcgcggaggcgggactcggaggagtataagtcgcggcgggtggcgaagctggtcgccgaggtgcgggagttcggggaggacgtcatcgactacaacgagctcgccgggatctacgacttccccatcgacaagtttcagcgcttggctatacaagcatttttaagaggttcatctgttgtagtttctgcacctacaagtagtgggaaaacattaatagcagaagctgcagcagttgcaacagtagcaagaggaaggcgtctcttctacacaacaccattaaaggcattgtcaaaccagaagttccgtgatttccggaataccttcggtgatcataatgttggccttcttacaggagattctgctatcaacaaagatgctcagatcctaatcatgacaacagagattttacgtaacatgctgtaccaaagtgttggcatgacagcctctgaaggtagattatttcaagttgatgtcattgttttggatgaagtccattatttgagtgatatctcacgtggcactgtttgggaagaaactgtcatatattgtccaaaggaagtccaacttatatgtctgtcagccactgttgcaaatcctgatgaattagctggctggataagtcagattcatggtaaaacagagcttgtaacatcgaacaaacgtccagttccgcttacttggcacttctcgaagaaatattcattacaaccgcttcttgatggaaaggggaaaaaaatgaataggaaactgcggatgtctaactcccaaaacttagcatctccaaagagtgagttctattatgtgaaagggaagaggaggtttagaacaaataaaattgagcaaggtaatagcaggcctttggacatatcgaaacaggttcagttatcaaagcatgaactcagcaatatgcgtcgttcccaagttccactaatacgtgacactttatcacaactatgggaaaatggcatgcttccagctatctggtttatttttagtagaagagggtgtgatgcagctgttgagtaccttgaggattgcagactgttgcatgactgtgaggctagtgaagttgagctggaacttaggaggttcaagatgcaatatcctgatgctattcgagaaagtgctgtgaaaggactcatgcgaggagttgcggcccatcatgctggttgcttgccactgtggaaatcatttattgaagaattatttcaacgtggccttgttaaagtagtttttgcgacagaaacccttgcagctgggattaatatgcctgccaggacggctgtaatttcttctctcagtaaaagaatagatgctgggcgccagctcttaaccccgaatgaactattccagatggcaggtcgtgctggaaggagagggattgatacagttgggcatgctgttcttgttcagactccatatgaagggcctgaagagtgttgtgacatcatctttgccggacttgagccacttgtctcacaattcactgcatcatatgggatggttttgaatcttcttgccgtatgtatttatattttctttttattcctatctattcacatgttcctgctttctccaggtcctaatctgatggattggaatatgttctccagggttcaaaagttacacataaacagaaagaatcggatgatgttaaggacaagcattctggaagaaccttagaagaagctcgaaagctagtggagcaaagctttgggaattatgttggtagcaatgtaatggttgctgccaaagaagagactgaaagaataaggcaagaaatacaatacctctcttcagaaattactgatgaatctattgatcgaaaatgcagggaagaattatcagaagaagactatgctgagatttccctcctacagaagagactaaaggaagagaagcagatcagaaatgagctgaaaaaaaagatggaactggagagaatggctgcatggaaaaatcggttagaggaatttgaaagtggccatcttcctttcatgtgcctgcaatacaaagataaggattcaattcagcacacgatccctgctgtatttattggaaacctcaactcatttgctgatcaaaagatcatgaacatggtggaagatgattcacttgtttctggcaagccgaaacgtgatagtggggaacaactttatcgcccatcttactatgtagctttaagttcagataattcatggtatctgttcacagaaaaatggattaaaactgtttacaagacaggtctacctgctgtcccttctgttgaagggggcacactccctagagaaaccctgaaacagctcctcctgcgtgaagagttggtgtgggataaagttgaaaaatcagaatacggctctttgttaagcatggaaggttctttagacacatggtcgtggagtctcaatgttcctgtgcttaatagcctttcggaagacaatgaggtagaacgattctcccaggaacatcaagatgctgtagaatgctacaagcaacagaggaggaaggtttcacatttaaagaaaacaataaaggctactaggggtttcaaagaattccaaaagatcatcgacatgagaaattttacaaaagagaagattgagcgcttagaagctagatcccgtcgcttgactcgacgaataagacaaattgaaccgaccggttggaaagaatttctccagattagcaaagtcatacaagaggctagagcattggatatcaatactcaggaacaaggtcctcttggatctaaagccatctcaactggcagcagtttgtggaagtttagtttccgaagggatcaaacttcgtccttggaaaaatagcagctatgtatatgaaccttcttctgttgttactggtgttataagttatttagaagagcagagaaattcgctaatcgatctccaagagagacatagtgttaagataccttgcgaaatagatgcccagtttgctgggatggttgaagcctgggcttcaggactgacttggagggagataatgatggactctgcaatggacgatggagatttagcccgtctactcaggcgctctatagatttactagctcagattcccaaactgccagacattgatccggttctccaaaagaatgcacaaattgcttgcagcgtcatggaccgagtaccgattagtgagcttgccggttgaaaactcaacctaattatttcggtgcttcgatatggatcttgattgaagaaatggacaaaagaaccaatgcaaaaattgctctatgtacagtctgaagctatcctatacctctacaacaaagaattcaaaacaacgcaaacaatcatctacagccacccgttcaatctattcctcgtcactacttgaatcagaatctgcactatccttcatgaagtgcgctggcaggtttggaaatcttggcatgac

SEQ ID NO: 51418 - DNA, 4011 bp, Zea Mays
cccgcctctccccctccccggctctaagggctcttctacaccgaagcaccgcacctcccgccatgcactgcatcgccccccgcctgctcctcctcccgctcccgaccgtctcccgccacgcgctatcgccaacccagacgccacctcttcctcccctcctcccctcccgcgcctgtaagttccacctcgcctcggcgcgctcgccgtcccgcgccgccgcttcggtttccggcgacgacgaggatgaggaggttgacgtggatgacgacgaggacgacgagacaaccatccgcaacgtagacgatgaatacgacgacgatttcgaggacggggatgagggagatgagggcgatgaggaggcggtggacgaggagagcggtggtgagtacgaggaagaggcgggggaggacgaggacaagcgggaggataccgcagcgcggaggcgggactcggaggagtataagtcgcggcgggtggcgaagctggtcgccgaggtgcgggagttcggggaggacgtcatcgactacaacgagctcgccgggatctacgacttccccatcgacaagtttcagcgcttggctatacaagcatttttaagaggttcatctgttgtagtttctgcacctacaagtagtgggaaaacattaatagcagaagctgcagcagttgcaacagtagcaagaggaaggcgtctcttctacacaacaccattaaaggcattgtcaaaccagaagttccgtgatttccggaataccttcggtgatcataatgttggccttcttacaggagattctgctatcaacaaagatgctcagatcctaatcatgacaacagagattttacgtaacatgctgtaccaaagtgttggcatgacagcctctgaaggtagattatttcaagttgatgtcattgttttggatgaagtccattatttgagtgatatctcacgtggcactgtttgggaagaaactgtcatatattgtccaaaggaagtccaacttatatgtctgtcagccactgttgcaaatcctgatgaattagctggctggataagtcaggaaactgcggatgtctaactcccaaaacttagcatctccaaagagtgagttctattatgtgaaagggaagaggaggtttagaacaaataaaattgagcaaggtaatagcaggcctttggacatatcgaaacaggttcagttatcaaagcatgaactcagcaatatgcgtcgttcccaagttccactaatacgtgacactttatcacaactatgggaaaatggcatgcttccagctatctggtttatttttagtagaagagggtgtgatgcagctgttgagtaccttgaggattgcagactgttgcatgactgtgaggctagtgaagttgagctggaacttaggaggttcaagatgcaatatcctgatgctattcgagaaagtgctgtgaaaggactcatgcgaggagttgcggcccatcatgctggttgcttgccactgtggaaatcatttattgaagaattatttcaacgtggccttgttaaagtagtttttgcgacagaaacccttgcagctgggattaatatgcctgccaggacggctgtaatttcttctctcagtaaaagaatagatgctgggcgccagctcttaaccccgaatgaactattccagatggcaggtcgtgctggaaggagagggattgatacagttgggcatgctgttcttgttcagactccatatgaagggcctgaagagtgttgtgacatcatctttgccggacttgagccacttgtctcacaattcactgcatcatatgggatggttttgaatcttcttgccggttcaaaagttacacataaacagaaagaatcggatgatgttaaggacaagcattctggaagaaccttagaagaagctcgaaagctagtggagcaaagctttgggaattatgttggtagcaatgtaatggttgctgccaaagaagagactgaaagaataaggcaagaaatacaatacctctcttcagaaattactgatgaatctattgatcgaaaatgcagggaagaattatcagaagaagactatgctgagatttccctcctacagaagagactaaaggaagagaagcagatcagaaatgagctgaaaaaaaagatggaactggagagaatggctgcatggaaaaatcggttagaggaatttgaaagtggccatcttcctttcatgtgcctgcaatacaaagataaggattcaattcagcacacgatccctgctgtatttattggaaacctcaactcatttgctgatcaaaagatcatgaacatggtggaagatgattcacttgtttctggcaagccgaaacgtgatagtggggaacaactttatcgcccatcttactatgtagctttaagttcagataattcatggtatctgttcacagaaaaatggattaaaactgtttacaagacaggtctacctgctgtcccttctgttgaagggggcacactccctagagaaaccctgaaacagctcctcctgcgtgaagagttggtgtgggataaagttgaaaaatcagaatacggctctttgttaagcatggaaggttctttagacacatggtcgtggagtctcaatgttcctgtgcttaatagcctttcggaagacaatgaggtagaacgattctcccaggaacatcaagatgctgtagaatgctacaagcaacagaggaggaaggtttcacatttaaagaaaacaataaaggctactaggggtttcaaagaattccaaaagatcatcgacatgagaaattttacaaaagagaagattgagcgcttagaagctagatcccgtcgcttgactcgacgaataagacaaattgaaccgaccggttggaaagaatttctccagattagcaaagtcatacaagaggctagagcattggatatcaatactcaggtaatctatcctttgggtgagacggcagcggctatacgaggggaaaatgagctatggcttgctatggttcttaggaacaaggtcctcttggatctaaagccatctcaactggcagcagtttgtggaagtttagtttccgaagggatcaaacttcgtccttggaaaaatagcagctatgtatatgaaccttcttctgttgttactggtgttataagttatttagaagagcagagaaattcgctaatcgatctccaagagagacatagtgttaagataccttgcgaaatagatgcccagtttgctgggatggttgaagcctgggcttcaggactgacttggagggagataatgatggactctgcaatggacgatggagatttagcccgtctactcaggcgctctatagatttactagctcagattcccaaactgccagacattgatccggttctccaaaagaatgcacaaattgcttgcagcgtcatggaccgagtaccgattagtgagcttgccggttgaaaactcaacctttaacagttgtcacagtgaaattcaagagcagctcatatcccactgactaaacatgtttttcaagaagatcagcaactacagtgattggttcaaggaatcaacattcagaatgatgaacaagacaaatgatcacatcaaaggttcataggattattcatccaaaaaattctatcactaccaattccagaattttcaaccacgtgaccaatcaaatggatatggagatcaaagcgcagcaacaatctctaggttttctcacggcttctagatgcctgaacaccagaaatactcagaatcagaactgcagtgtcaatggatatgactattaagggcatgttcgtttcacccccaatccatatggattgaaggggattgagtgagtttcaatccctgataaggccttgttgggttattcacatctcacatgggttggaagggattggaaaattttaagaagaattttgacttgctatggatttaaacacacccaatctcacccaatccacatggactgacactaaaacgaac

SEQ ID NO: 51419 - DNA, 4044 bp, Zea Mays
ccgcctctccccctccccggctctaagggctcttctacaccgaagcaccgcacctcccgccatgcactgcatcgccccccgcctgctcctcctcccgctcccgaccgtctcccgccacgcgctatcgccaacccagacgccacctcttcctcccctcctcccctcccgcgcctgtaagttccacctcgcctcggcgcgctcgccgtcccgcgccgccgcttcggtttccggcgacgacgaggatgaggaggttgacgtggatgacgacgaggacgacgagacaaccatccgcaacgtagacgatgaatacgacgacgatttcgaggacggggatgagggagatgagggcgatgaggaggcggtggacgaggagagcggtggtgagtacgaggaagaggcgggggaggacgaggacaagcgggaggataccgcagcgcggaggcgggactcggaggagtataagtcgcggcgggtggcgaagctggtcgccgaggtgcgggagttcggggaggacgtcatcgactacaacgagctcgccgggatctacgacttccccatcgacaagtttcagtttctgcacctacaagtagtgggaaaacattaatagcagaagctgcagcagttgcaacagtagcaagaggaaggcgtctcttctacacaacaccattaaaggcattgtcaaaccagaagttccgtgatttccggaataccttcggtgatcataatgttggccttcttacaggagattctgctatcaacaaagatgctcagatcctaatcatgacaacagagattttacgtaacatgctgtaccaaagtgttggcatgacagcctctgaaggtagattatttcaagttgatgtcattgttttggatgaagtccattatttgagtgatatctcacgtggcactgtttgggaagaaactgtcatatattgtccaaaggaagtccaacttatatgtctgtcagccactgttgcaaatcctgatgaattagctggctggataagtcaggaaactgcggatgtctaactcccaaaacttagcatctccaaagagtgagttctattatgtgaaagggaagaggaggtttagaacaaataaaattgagcaaggtaatagcaggcctttggacatatcgaaacaggttcagttatcaaagcatgaactcagcaatatgcgtcgttcccaagttccactaatacgtgacactttatcacaactatgggaaaatggcatgcttccagctatctggtttatttttagtagaagagggtgtgatgcagctgttgagtaccttgaggattgcagactgttgcatgactgtgaggctagtgaagttgagctggaacttaggaggttcaagatgcaatatcctgatgctattcgagaaagtgctgtgaaaggactcatgcgaggagttgcggcccatcatgctggttgcttgccactgtggaaatcatttattgaagaattatttcaacgtggccttgttaaagtagtttttgcgacagaaacccttgcagctgggattaatatgcctgccaggacggctgtaatttcttctctcagtaaaagaatagatgctgggcgccagctcttaaccccgaatgaactattccagatggcaggtcgtgctggaaggagagggattgatacagttgggcatgctgttcttgttcagactccatatgaagggcctgaagagtgttgtgacatcatctttgccggacttgagccacttgtctcacaattcactgcatcatatgggatggttttgaatcttcttgccggttcaaaagttacacataaacagaaagaatcggatgatgttaaggacaagcattctggaagaaccttagaagaagctcgaaagctagtggagcaaagctttgggaattatgttggtagcaatgtaatggttgctgccaaagaagagactgaaagaataaggcaagaaatacaatacctctcttcagaaattactgatgaatctattgatcgaaaatgcagggaagaattatcagaagaagactatgctgagatttccctcctacagaagagactaaaggaagagaagcagatcagaaatgagctgaaaaaaaagatggaactggagagaatggctgcatggaaaaatcggttagaggaatttgaaagtggccatcttcctttcatgtgcctgcaatacaaagataaggattcaattcagcacacgatccctgctgtatttattggaaacctcaactcatttgctgatcaaaagatcatgaacatggtgagatacttttttaaaagagtaagcatcgcagaaggaaaacttaagcatgcttactctttatttacttactgcaggtggaagatgattcacttgtttctggcaagccgaaacgtgatagtggggaacaactttatcgcccatcttactatgtagctttaagttcagataattcatggtatctgttcacagaaaaatggattaaaactgtttacaagacaggtctacctgctgtcccttctgttgaagggggcacactccctagagaaaccctgaaacagctcctcctgcgtgaagagttggtgtgggataaagttgaaaaatcagaatacggctctttgttaagcatggaaggttctttagacacatggtcgtggagtctcaatgttcctgtgcttaatagcctttcggaagacaatgaggtagaacgattctcccaggaacatcaagatgctgtagaatgctacaagcaacagaggaggaaggtttcacatttaaagaaaacaataaaggctactaggggtttcaaagaattccaaaagatcatcgacatgagaaattttacaaaagagaagattgagcgcttagaagctagatcccgtcgcttgactcgacgaataagacaaattgaaccgaccggttggaaagaatttctccagattagcaaagtcatacaagaggctagagcattggatatcaatactcaggtaatctatcctttgggtgagacggcagcggctatacgaggggaaaatgagctatggcttgctatggttcttaggaacaaggtcctcttggatctaaagccatctcaactggcagcagtttgtggaagtttagtttccgaagggatcaaacttcgtccttggaaaaatagcagctatgtatatgaaccttcttctgttgttactggtgttataagttatttagaagagcagagaaattcgctaatcgatctccaagagagacatagtgttaagataccttgcgaaatagatgcccagtttgctgggatggttgaagcctgggcttcaggactgacttggagggagataatgatggactctgcaatggacgatggagatttagcccgtctactcaggcgctctatagatttactagctcagattcccaaactgccagacattgatccggttctccaaaagaatgcacaaattgcttgcagcgtcatggaccgagtaccgattagtgagcttgccggttgaaaactcaacctttaacagttgtcacagtgaaattcaagagcagctcatatcccactgactaaacatgtttttcaagaagatcagcaactacagtgattggttcaaggaatcaacattcagaatgatgaacaagacaaatgatcacatcaaaggttcataggattattcatccaaaaaattctatcactaccaattccagaattttcaaccacgtgaccaatcaaatggatatggagatcaaagcgcagcaacaatctctaggttttctcacggcttctagatgcctgaacaccagaaatactcagaatcagaactgcagtgtcaatggatatgactattaagggcatgttcgtttcacccccaatccatatggattgaaggggattgagtgagtttcaatccctgataaggccttgttgggttattcacatctcacatgggttggaagggattggaaaattttaagaagaattttgacttgctatggatttaaacacacccaatctcacccaatccacatggactgacactaaaacgaac

SEQ ID NO: 51420 - DNA, 2039 bp, Zea Mays
ctctcggtcgcgtctccctccctcgtgtcacccacccattttcgtcggcctcctcttccccccgcctcgccagcccgaattaggagctacgacgaatctaccgggccgagctcgccagctggcctccccgagggcgaggccctatcggctgccgttcccccattgacagggagctcagccccgccaccgccgcggctgcggcgtgtggacgtaaccggagctcctcgcagccgctgataagatccgaagggttcctaggctttttgtggcgggaggcgactggttccgtcgggtggtccggtgagcatggcggggcccaagtttgggtcgttcaaggcagaaaagggggactcagcggcggctgcaggcgcggcggcgcagaggagggacccatacgaggtgctcggggtggggcgtaatgctactgagcaggagatcaagagtgccttccgccgcatggcactcaagtaccatccagataagaattcagacgaccctgttgcctcagagaagtttcaagaggccacattctcctataatatcctgtcagatccagacaagaggcgccagtatgacgcatcagggtttgaggccattgaagcagatagtcaggaactggagctggacctatcaagtctcaatactgtaaatacagtgtttgctgctctgtttagcaaactaggtgttccaatcaagaccactgtctcggcaacagttttagaggaggcattgaacgggtcagtagagatttctcagcttcagctgggcaaatctctatgtaggaaggtagaaaagcagtcagctcacttttattctgtggacataacagataaagaagccaaaatgggcttagtttgtagagttcattcaacttctaaaagtaaatttaagttgctgtattttgagcttgaggacaatggtggattaagccttgctttacaggaagatagtgcaaaaactggaaaagttacttctgcgggcatgttctttctaggctttcctgtgtatcggtttgaacaaaataattcagctgctgctgcgaaggatcctgacagtgctttctttaaaagattggatggctttcaaccttgtgaagtaaatgaactgaaagcaggaagccattattttgctgtatatggtgacaatttctttaaaagtgcaagctatactattgaggttgtatctgctgaacccttctctgctcaaaaagagaagctacgaagtgtggaggcaaagataattgcaaaacgatctgagctgtctaaatttgagtctgagtatcgcgagattgatgaccttctaaaggaaaggaatgcaattcatgcatcctataccaacaacccaactctgcagcggagttccagtagcagcaaagggaaatcaccctctaaagggtccagaagtgaggatgaccaaactgtaaagaaggaaaagaaatccaagagccagccaatggagggatccaaaagcgatgatgagggtcccgaaaacaaaaaggaagaaacgcctaaagatcggattcgaaggaagaagtggttcaacattcatttgaaagtggacaagagaaggccctgctgataactgcgatatatcatgtactcctcaagatctctgctccaagtacaaggaaaaaattcccatttgacgtccaggaagatgcatcttgtcgatcattcccatgatcaagcccattctatttcctgaaaagtcaggaacctcgccagcttcaaaaatggtgtatgtaccacttagttttggacccctagtcggatactgttgtatttatatcaagttggacggttatgtacaatagataccttaatagtgtgatgtccagaatggcagaatccaattcagatttgttcaatttgtttgatgttgtccgtgtcaaactttactacccaacttgactcagccatccgatctgaactactgatcctgtattccatgaggcaatctagcaatgtgcgatgctggttaaaacttgtgcgtcgtacttcatgaaggaacaaggtttcgatgattcttgctgtttcaaa

SEQ ID NO: 51421 - DNA, 2380 bp, Zea Mays
ctcctagcaaattccgctacgcagcaactatccacgctgtcgatcagacccgtctgatatctgaacttctgagaggaaaggaacccgatctccaccacggctccacgaccacgagcccaaccgggtagcttcttcttcgtccgctgttacccacaccgcgggaagcctccatgcgatcccctgggcggcgcctaccagcgccggcgcggctcgtcgcggctgccctcctcctcgcagctctcaccgggggagccgtcggcgccgatgggtacgggcgggcgaggagggtgtacatgaagaacaaggtcctggagatgttttaccatgcctatgacaactacatgacttatgcattccctcatgatgaattgaagcctcttactaaaagtttcacggactcgcttacttgaacacttgccacaggattatagtggatccgcgttgacactggttgagtcattatcaagtcttgttgtcttaggtaacctcacagagtttgagagaggagttctctggctttcagaaaatctgacatttgatgttgatgctcggattaatctttttgagtgtaacataagacttcttggggggcttatttctgctcatattcttgcaaaagactacagcagccagtttaagcatgggctgtatcaagatcaattactacgtcttgctgaaagtttaggcaatcgttttctaccggcatttgagacacctactggattgccgtattcatggattaatcttaagtatggggtgatggaaaatgaaacaactgaaacaagcacatcagggtgtggctcccttatacttgaaatgggtgtgttgtcacgtttgactggtgattctagatatgaagctgcagctcttcgtgctctccgcaagttatggagcatgagaagttcactgaatctagtaggcaccacacttgatgtttttactggcaagtggattcagtattcatccggaattggtgctggtgttgattcattttatgagtatctgattaaagcatatattcttttcggaagtgatgagtactgggatatgtttcattcagcttatcttgcggtgcagaagtacttccgacatggtccatggtatcatgaggctgatatgaggactggagaagcaacgcactggcagctaactagccttcaggctttctggccaggtcttcagacacttcttggagacgtaactgctgcaaatctatcacaccgtgagttttacaatatatggcaaagatttggtgtgctacctgaaagatatcttttggactatggaatgttgcatcctacagagaagtactatcccttgcgtcctgagtttgctgagtcaacattttatctttatcaagctactaaagatccttggtacctagaagtgggtgaaaccattgtgaggtcacttaattactatactaaagtggatggaggttttgctagcatcagagatgtttcaacaatgaaacttgaagatcaccagcacagcttctttctttcagaaacgtgcaaatatctttttcttctgtatgatgattcattcttgaggaatcaaaattacatatttacaacagagggtcatccccttccaataagaagcacgtggcatgagaaatttcctgcagcatatgttcccagcaattggacatctgttaaggatgagatccaaccaattcgcgcgagcgcattatcgtctcaagtttgtcccgagacgattttcggaagaagtgttggtaccccatgggagagtgcgtgccatgttccagatgcgcacgctagccacagatgcaggactgacgatgactgtggaatagaagcaataacatgcaagaagaggacctgcagtatggctggctactgcggcttatttttttataatggaaacaagagttccggctttagcatgataatgcgtacagccaatacaagtcgattattacaattaagaactgctgcatgaatagtgatactaactcaaaggaactaaattacaatactatgactaacactagtcatactcaattcttgaatttgagcgccatccatggtttgcgaagacttccatcgccaccacttccaaaacttgcgaagcaatgaggatttgttgttgcgattcctccttttgtagcagtctccagaatcttaaccagtgagtacatctgaaaataacctgcacaattgatggaattggtttatgattaaaagccacctcatttcgactgagccaaatagcccaaaataaagcagctattccagagagtaaaacttttttataccccggacccctatttgttccccaagacccgataatatgattaatgctaacgggcatttctaattttaaggcaaagtaaattactctccatatgcttttg

SEQ ID NO: 51422 - DNA, 2400 bp, Zea Mays
ctcctagcaaattccgctacgcagcaactatccacgctgtcgatcagacccgtctgatatctgaacttctgagaggaaaggaacccgatctccaccacggctccacgaccacgagcccaaccgggtagcttcttcttcgtccgctgttacccacaccgcgggaagcctccatgcgatcccctgggcggcgcctaccagcgccggcgcggctcgtcgcggctgccctcctcctcgcagctctcaccgggggagccgtcggcgccgatgggtacgggcgggcgaggagggtgtacatgaagaacaaggtcctggagatgttttaccatgcctatgacaactacatgacttatgcattccctcatgatgaattgaagcctcttactaaaagtttcacggactcgcttagtgagcttggcaatttaaatcttgaacacttgccacaggattatagtggatccgcgttgacactggttgagtcattatcaagtcttgttgtcttaggtaacctcacagagtttgagagaggagttctctggctttcagaaaatctgacatttgatgttgatgctcggattaatctttttgagtgtaacataagacttcttggggggcttatttctgctcatattcttgcaaaagactacagcagccagtttaagcatgggctgtatcaagatcaattactacgtcttgctgaaagtttaggcaatcgttttctaccggcatttgagacacctactggattgccgtattcatggattaatcttaagtatggggtgatggaaaatgaaacaactgaaacaagcacatcagggtgtggctcccttatacttgaaatgggtgtgttgtcacgtttgactggtgattctagatatgaagctgcagctcttcgtgctctccgcaagttatggagcatgagaagttcactgaatctagtaggcaccacacttgatgtttttactggcaagtggattcagtattcatccggaattggtgctggtgttgattcattttatgagtatctgattaaagcatatattcttttcggaagtgatgagtactgggatatgtttcattcagcttatcttgcggtgcagaagtacttccgacatggtccatggtatcatgaggctgatatgaggactggagaagcaacgcactggcagctaactagccttcaggctttctggccaggtcttcagacacttcttggagacgtaactgctgcaaatctatcacaccgtgagttttacaatatatggcaaagatttggtgtgctacctgaaagatatcttttggactatggaatgttgcatcctacagagaagtactatcccttgcgtcctgagtttgctgagtcaacattttatctttatcaagctactaaagatccttggtacctagaagtgggtgaaaccattgtgaggtcacttaattactatactaaagtggatggaggttttgctagcatcagagatgtttcaacaatgaaacttgaagatcaccagcacagcttctttctttcagaaacgtgcaaatatctttttcttctgtatgatgattcattcttgaggaatcaaaattacatatttacaacagagggtcatccccttccaataagaagcacgtggcatgagaaatttcctgcagcatatgttcccagcaattggacatctgttaaggatgagatccaaccaattcgcgcgagcgcattatcgtctcaagtttgtcccgagacgattttcggaagaagtgttggtaccccatgggagagtgcgtgccatgttccagatgcgcacgctagccacagatgcaggactgacgatgactgtggaatagaagcaataacatgcaagaagaggacctgcagtatggctggctactgcggcttatttttttataatggaaacaagagttccggctttagcatgataatgcgtacagccaatacaagtcgattattacaattaagaactgctgcatgaatagtgatactaactcaaaggaactaaattacaatactatgactaacactagtcatactcaattcttgaatttgagcgccatccatggtttgcgaagacttccatcgccaccacttccaaaacttgcgaagcaatgaggatttgttgttgcgattcctccttttgtagcagtctccagaatcttaaccagtgagtacatctgaaaataacctgcacaattgatggaattggtttatgattaaaagccacctcatttcgactgagccaaatagcccaaaataaagcagctattccagagagtaaaacttttttataccccggacccctatttgttccccaagacccgataatatgattaatgctaacgggcatttctaattttaaggcaaagtaaattactctccatatgcttttg

SEQ ID NO: 51423 - DNA, 3051 bp, Zea Mays
ctgaacttctgagaggaaaggaacccgatctccaccacggctccacgaccacgagcccaaccgggtagcttcttcttcgtccgctgttacccacaccgcgggaagcctccatgcgatcccctgggcggcgcctaccagcgccggcgcggctcgtcgcggctgccctcctcctcgcagctctcaccgggggagccgtcggcgccgatgggtacgggcgggcgaggagggtgtacatgaagaacaaggtcctggagatgttttaccatgcctatgacaactacatgacttatgcattccctcatgatgaattgaagcctcttactaaaagtttcacggactcgcttagtgagcttggcaatttaaatcttgaacacttgccacaggattatagtggatccgcgttgacactggttgagtcattatcaagtcttgttgtcttaggtaacctcacagagtttgagagaggagttctctggctttcagaaaatctgacatttgatgttgatgctcggattaatctttttgagtgtaacataagacttcttggggggcttatttctgctcatattcttgcaaaagactacagcagccagtttaagcatgggctgtatcaagatcaattactacgtcttgctgaaagtttaggcaatcgttttctaccggcatttgagacacctactggattgccgtattcatggattaatcttaagaggtcaaactgagaaagggtcttctgcaaagagttaccacatttgtctgaaagcagactacaacaaacattgagtttcttctccaataatttttgaaaaaggacgtgtatagttattaagacaagcatgctcattagtacaattttaacatctatcaacgtttaccttaggaaaactgggatattacttgctatcagctaaaatgataagaatggcaaattataagcatgctatggtagaatgaagaaccacagaatgattactttgtttgaaaaactcaaagttcacatatattagaactctggtactcattacttttgcaattggcatgatacaacaacctttttcagtatggggtgatggaaaatgaaacaactgaaacaagcacatcagggtgtggctcccttatacttgaaatgggtgtgttgtcacgtttgactggtgattctagatatgaagctgcagctcttcgtgctctccgcaagttatggagcatgagaagttcactgaatctagtaggcaccacacttgatgtttttactggcaagtggattcagtattcatccggaattggtgctggtgttgattcattttatgagtatctgattaaagcatatattcttttcggaagtgatgagtactgggatatgtttcattcagcttatcttgcggtgcagaagtacttccgacatggtccatggtatcatgaggctgatatgaggactggagaagcaacgcactggcagctaactagccttcaggctttctggccaggtcttcagacacttcttggagacgtaactgctgcaaatctatcacaccgtgagttttacaatatatggcaaagatttggtgtgctacctgaaaggtatactgttttcaaccaagtttttgttaatggagaacaaaagtacacacgtctagtaaggcaaaactagttcagttatcgatgaagcagaatctagatacatgcatttatgtatgtattatattttatagatatcttttggactatggaatgttgcatcctacagagaagtactatcccttgcgtcctgagtttgctgagtcaacattttatctttatcaagctactaaaggtgcacccaatacacaccagaaggatatattcgttttatcttcatccagctctcatgttttcatctagggttgatgtcctattgagctcatcatatatgacttacttgttctttgtagtcatgccagttttcttattatagaaacacttaagtcacccactcacaagttttactaacttctctttttttcccctctccatcccttgatttctgaaacacttctcttatagatccttggtacctagaagtgggtgaaaccattgtgaggtcacttaattactatactaaagtggatggaggttttgctagcatcagagatgtttcaacaatgaaacttgaagatcaccagcacagcttctttctttcagaaacgtgcaaatatctttttcttctgtatgatgattcattcttgaggaatcaaaattacatatttacaacagagggtcatccccttccaataagaagcacgtggcatgagaaatttcctgcagcatatgttcccagcaattggacatctgttaaggatgagatccaaccaattcgcgcgagcgcattatcgtctcaagtttgtcccgagacgattttcggaagaagtgttggtaccccatgggagagtgcgtgccatgttccagatgcgcacgctagccacagatgcaggactgacgatgactgtggaatagaagcaataacatgcaagaagaggacctgcagtatggctggctactgcggcttatttttttataatggaaacaagagttccggctttagcatgataatgcgtacagccaatacaagtcgattattacaattaagaactgctgcatgaatagtgatactaactcaaaggaactaaattacaatactatgactaacactagtcatactcaattcttgaatttgagcgccatccatggtttgcgaagacttccatcgccaccacttccaaaacttgcgaagcaatgaggatttgttgttgcgattcctccttttgtagcagtctccagaatcttaaccagtgagtacatctgaaaataacctgcacaattgatggaattggtttatgattaaaagccacctcatttcgactgagccaaatagcccaaaataaagcagctattccagagagtaaaacttttttataccccggacccctatttgttccccaagacccgataatatgattaatgctaacgggcatttctaattttaaggcaaagtaaattactctccatatgcttttg

SEQ ID NO: 51424 - DNA, 2816 bp, Zea Mays
ccgatctccaccacggctccacgaccacgagcccaaccgggtagcttcttcttcgtccgctgttacccacaccgcgggaagcctccatgcgatcccctgggcggcgcctaccagcgccggcgcggctcgtcgcggctgccctcctcctcgcagctctcaccgggggagccgtcggcgccgatgggtacgggcgggcgaggagggtgtacatgaagaacaaggtcctggagatgttttaccatgcctatgacaactacatgacttatgcattccctcatgatgaattgaagcctcttactaaaagtttcacggactcgcttagtgagcttggcaatttaaatcttgaacacttgccacaggattatagtggatccgcgttgacactggttgagtcattatcaagtcttgttgtcttaggtaacctcacagagtttgagagaggagttctctggctttcagaaaatctgacatttgatgttgatgctcggattaatctttttgagtgtaacataagacttcttggggggcttatttctgctcatattcttgcaaaagactacagcagccagtttaagcatgggctgtatcaagatcaattactacgtcttgctgaaagtttaggcaatcgttttctaccggcatttgagacacctactggattgccgtattcatggattaatcttaaggttcatataccgaactttggcttttttcagactttaaaatcttaattttttgcatgcatgaatcaatcgtaagattcctttacaacctgaaatcgtatggccacttgaatgccatcatttattgtgtgtacatatctgtgtacattcaacaggtcaaactgagaaagggtcttctgcaaagagttaccacatttgtctgaaagcagactacaacaaacattgagtttcttctccaataatttttgaaaaaggacgtgtatagttattaagacaagcatgctcattagtacaattttaacatctatcaacgtttaccttaggaaaactgggatattacttgctatcagctaaaatgataagaatggcaaattataagcatgctatggtagaatgaagaaccacagaatgattactttgtttgaaaaactcaaagttcacatatattagaactctggtactcattacttttgcaattggcatgatacaacaacctttttcagtatggggtgatggaaaatgaaacaactgaaacaagcacatcagggtgtggctcccttatacttgaaatgggtgtgttgtcacgtttgactggtgattctagatatgaagctgcagctcttcgtgctctccgcaagttatggagcatgagaagttcactgaatctagtaggcaccacacttgatgtttttactggcaagtggattcagtattcatccggaattggtgctggtgttgattcattttatgagtatctgattaaagcatatattcttttcggaagtgatgagtactgggatatgtttcattcagcttatcttgcggtgcagaagtacttccgacatggtccatggtatcatgaggctgatatgaggactggagaagcaacgcactggcagctaactagccttcaggctttctggccaggtcttcagacacttcttggagacgtaactgctgcaaatctatcacaccgtgagttttacaatatatggcaaagatttggtgtgctacctgaaagatatcttttggactatggaatgttgcatcctacagagaagtactatcccttgcgtcctgagtttgctgagtcaacattttatctttatcaagctactaaagatccttggtacctagaagtgggtgaaaccattgtgaggtcacttaattactatactaaagtggatggaggttttgctagcatcagagatgtttcaacaatgaaacttgaagatcaccagcacagcttctttctttcagaaacgtgcaaatatctttttcttctgtatgatgattcattcttgaggaatcaaaattacatatttacaacagagggtcatccccttccaataagaagcacgtggcatgagaaatttcctgcagcatatgttcccagcaattggacatctgttaaggatgagatccaaccaattcgcgcgagcgcattatcgtctcaagtttgtcccgagacgattttcggaagaagtgttggtaccccatgggagagtgcgtgccatgttccagatgcgcacgctagccacagatgcaggactgacgatgactgtggaatagaagcaataacatgcaagaagaggacctgcagtatggctggctactgcggcttatttttttataatggaaacaagagttccggctttagcatgataatgcgtacagccaatacaagtcgattattacaattaagaactgctgcatgaatagtgatactaactcaaaggaactaaattacaatactatgactaacactagtcatactcaattcttgaatttgagcgccatccatggtttgcgaagacttccatcgccaccacttccaaaacttgcgaagcaatgaggatttgttgttgcgattcctccttttgtagcagtctccagaatcttaaccagtgagtacatctgaaaataacctgcacaattgatggaattggtttatgattaaaagccacctcatttcgactgagccaaatagcccaaaataaagcagctattccagagagtaaaacttttttataccccggacccctatttgttccccaagacccgataatatgattaatgctaacgggcatttctaattttaaggcaaagtaaattactctccatatgcttttg

SEQ ID NO: 51425 - DNA, 2989 bp, Zea Mays
ccgatctccaccacggctccacgaccacgagcccaaccgggtagcttcttcttcgtccgctgttacccacaccgcgggaagcctccatgcgatcccctgggcggcgcctaccagcgccggcgcggctcgtcgcggctgccctcctcctcgcagctctcaccgggggagccgtcggcgccgatgggtacgggcgggcgaggagggtgtacatgaagaacaaggtcctggagatgttttaccatgcctatgacaactacatgacttatgcattccctcatgatgaattgaagcctcttactaaaagtttcacggactcgcttagtgagcttggcaatttaaatgtattaaagtattgacaactataaggattttggtctgtattatataaatttaaggtaccacaacttaatgttacccatgattccctttttctagcttgaacacttgccacaggattatagtggatccgcgttgacactggttgagtcattatcaagtcttgttgtcttaggtaacctcacagagtttgagagaggagttctctggctttcagaaaatctgacatttgatgttgatgctcggattaatctttttgagtgtaacataagacttcttggggggcttatttctgctcatattcttgcaaaagactacagcagccagtttaagcatgggctgtatcaagatcaattactacgtcttgctgaaagtttaggcaatcgttttctaccggcatttgagacacctactggattgccgtattcatggattaatcttaagggtcaaactgagaaagggtcttctgcaaagagttaccacatttgtctgaaagcagactacaacaaacattgagtttcttctccaataatttttgaaaaaggacgtgtatagttattaagacaagcatgctcattagtacaattttaacatctatcaacgtttaccttaggaaaactgggatattacttgctatcagctaaaatgataagaatggcaaattataagcatgctatggtagaatgaagaaccacagaatgattactttgtttgaaaaactcaaagttcacatatattagaactctggtactcattacttttgcaattggcatgatacaacaacctttttcagtatggggtgatggaaaatgaaacaactgaaacaagcacatcagggtgtggctcccttatacttgaaatgggtgtgttgtcacgtttgactggtgattctagatatgaagctgcagctcttcgtgctctccgcaagttatggagcatgagaagttcactgaatctagtaggcaccacacttgatgtttttactggcaagtggattcagtattcatccggaattggtgctggtgttgattcattttatgagtatctgattaaagcatatattcttttcggaagtgatgagtactgggatatgtttcattcagcttatcttgcggtgcagaagtacttccgacatggtccatggtatcatgaggctgatatgaggactggagaagcaacgcactggcagctaactagccttcaggctttctggccaggtcttcagacacttcttggagacgtaactgctgcaaatctatcacaccgtgagttttacaatatatggcaaagatttggtgtgctacctgaaagatatcttttggactatggaatgttgcatcctacagagaagtactatcccttgcgtcctgagtttgctgagtcaacattttatctttatcaagctactaaaggtgcacccaatacacaccagaaggatatattcgttttatcttcatccagctctcatgttttcatctagggttgatgtcctattgagctcatcatatatgacttacttgttctttgtagtcatgccagttttcttattatagaaacacttaagtcacccactcacaagttttactaacttctctttttttcccctctccatcccttgatttctgaaacacttctcttatagatccttggtacctagaagtgggtgaaaccattgtgaggtcacttaattactatactaaagtggatggaggttttgctagcatcagagatgtttcaacaatgaaacttgaagatcaccagcacagcttctttctttcagaaacgtgcaaatatctttttcttctgtatgatgattcattcttgaggaatcaaaattacatatttacaacagagggtcatccccttccaataagaagcacgtggcatgagaaatttcctgcagcatatgttcccagcaattggacatctgttaaggatgagatccaaccaattcgcgcgagcgcattatcgtctcaagtttgtcccgagacgattttcggaagaagtgttggtaccccatgggagagtgcgtgccatgttccagatgcgcacgctagccacagatgcaggactgacgatgactgtggaatagaagcaataacatgcaagaagaggacctgcagtatggctggctactgcggcttatttttttataatggaaacaagagttccggctttagcatgataatgcgtacagccaatacaagtcgattattacaattaagaactgctgcatgaatagtgatactaactcaaaggaactaaattacaatactatgactaacactagtcatactcaattcttgaatttgagcgccatccatggtttgcgaagacttccatcgccaccacttccaaaacttgcgaagcaatgaggatttgttgttgcgattcctccttttgtagcagtctccagaatcttaaccagtgagtacatctgaaaataacctgcacaattgatggaattggtttatgattaaaagccacctcatttcgactgagccaaatagcccaaaataaagcagctattccagagagtaaaacttttttataccccggacccctatttgttccccaagacccgataatatgattaatgctaacgggcatttctaattttaaggcaaagtaaattactctccatatgcttttg

SEQ ID NO: 51426 - DNA, 2888 bp, Zea Mays
ccgatctccaccacggctccacgaccacgagcccaaccgggtagcttcttcttcgtccgctgttacccacaccgcgggaagcctccatgcgatcccctgggcggcgcctaccagcgccggcgcggctcgtcgcggctgccctcctcctcgcagctctcaccgggggagccgtcggcgccgatgggtacgggcgggcgaggagggtgtacatgaagaacaaggtcctggagatgttttaccatgcctatgacaactacatgacttatgcattccctcatgatgaattgaagcctcttactaaaagtttcacggactcgcttagtgagcttggcaatttaaatgtattaaacttgaacacttgccacaggattatagtggatccgcgttgacactggttgagtcattatcaaggtaacctcacagagtttgagagaggagttctctggctttcagaaaatctgacatttgatgttgatgctcggattaatctttttgagtgtaacataagacttcttggggggcttatttctgctcatattcttgcaaaagactacagcagccagtttaagcatgggctgtatcaagatcaattactacgtcttgctgaaagtttaggcaatcgttttctaccggcatttgagacacctactggattgccgtattcatggattaatcttaaggtcaaactgagaaagggtcttctgcaaagagttaccacatttgtctgaaagcagactacaacaaacattgagtttcttctccaataatttttgaaaaaggacgtgtatagttattaagacaagcatgctcattagtacaattttaacatctatcaacgtttaccttaggaaaactgggatattacttgctatcagctaaaatgataagaatggcaaattataagcatgctatggtagaatgaagaaccacagaatgattactttgtttgaaaaactcaaagttcacatatattagaactctggtactcattacttttgcaattggcatgatacaacaacctttttcagtatggggtgatggaaaatgaaacaactgaaacaagcacatcagggtgtggctcccttatacttgaaatgggtgtgttgtcacgtttgactggtgattctagatatgaagctgcagctcttcgtgctctccgcaagttatggagcatgagaagttcactgaatctagtaggcaccacacttgatgtttttactggcaagtggattcagtattcatccggaattggtgctggtgttgattcattttatgagtatctgattaaagcatatattcttttcggaagtgatgagtactgggatatgtttcattcagcttatcttgcggtgcagaagtacttccgacatggtccatggtatcatgaggctgatatgaggactggagaagcaacgcactggcagctaactagccttcaggctttctggccaggtcttcagacacttcttggagacgtaactgctgcaaatctatcacaccgtgagttttacaatatatggcaaagatttggtgtgctacctgaaagatatcttttggactatggaatgttgcatcctacagagaagtactatcccttgcgtcctgagtttgctgagtcaacattttatctttatcaagctactaaaggtgcacccaatacacaccagaaggatatattcgttttatcttcatccagctctcatgttttcatctagggttgatgtcctattgagctcatcatatatgacttacttgttctttgtagtcatgccagttttcttattatagaaacacttaagtcacccactcacaagttttactaacttctctttttttcccctctccatcccttgatttctgaaacacttctcttatagatccttggtacctagaagtgggtgaaaccattgtgaggtcacttaattactatactaaagtggatggaggttttgctagcatcagagatgtttcaacaatgaaacttgaagatcaccagcacagcttctttctttcagaaacgtgcaaatatctttttcttctgtatgatgattcattcttgaggaatcaaaattacatatttacaacagagggtcatccccttccaataagaagcacgtggcatgagaaatttcctgcagcatatgttcccagcaattggacatctgttaaggatgagatccaaccaattcgcgcgagcgcattatcgtctcaagtttgtcccgagacgattttcggaagaagtgttggtaccccatgggagagtgcgtgccatgttccagatgcgcacgctagccacagatgcaggactgacgatgactgtggaatagaagcaataacatgcaagaagaggacctgcagtatggctggctactgcggcttatttttttataatggaaacaagagttccggctttagcatgataatgcgtacagccaatacaagtcgattattacaattaagaactgctgcatgaatagtgatactaactcaaaggaactaaattacaatactatgactaacactagtcatactcaattcttgaatttgagcgccatccatggtttgcgaagacttccatcgccaccacttccaaaacttgcgaagcaatgaggatttgttgttgcgattcctccttttgtagcagtctccagaatcttaaccagtgagtacatctgaaaataacctgcacaattgatggaattggtttatgattaaaagccacctcatttcgactgagccaaatagcccaaaataaagcagctattccagagagtaaaacttttttataccccggacccctatttgttccccaagacccgataatatgattaatgctaacgggcatttctaattttaaggcaaagtaaattactctccatatgcttttg

SEQ ID NO: 51427 - DNA, 2208 bp, Zea Mays
cgatctccaccacggctccacgaccacgagcccaaccgggtagcttcttcttcgtccgctgttacccacaccgcgggaagcctccatgcgatcccctgggcggcgcctaccagcgccggcgcggctcgtcgcggctgccctcctcctcgcagctctcaccgggggagccgtcggcgccgatgggtacgggcgggcgaggagggtgtacatgaagaacaaggtcctggagatgttttaccatgcctatgacaactacatgacttatgcattccctcatgatgaattgaagcctcttactaaaagtttcacggactcgcttagtgagcttggcaatttaaatgtattaaacttgaacacttgccacaggattatagtggatccgcgttgacactggttgagtcattatcaaggtaacctcacagagtttgagagaggagttctctggctttcagaaaatctgacatttgatgttgatgctcggattaatctttttgagtgtaacataagacttcttggggggcttatttctgctcatattcttgcaaaagactacagcagccagtttaagcatgggctgtatcaagatcaattactacgtcttgctgaaagtttaggcaatcgttttctaccggcatttgagacacctactggattgccgtattcatggattaatcttaagatatgaagctgcagctcttcgtgctctccgcaagttatggagcatgagaagttcactgaatctagtaggcaccacacttgatgtttttactggcaagtggattcagtattcatccggaattggtgctggtgttgattcattttatgagtatctgattaaagcatatattcttttcggaagtgatgagtactgggatatgtttcattcagcttatcttgcggtgcagaagtacttccgacatggtccatggtatcatgaggctgatatgaggactggagaagcaacgcactggcagctaactagccttcaggctttctggccaggtcttcagacacttcttggagacgtaactgctgcaaatctatcacaccgtgagttttacaatatatggcaaagatttggtgtgctacctgaaagatatcttttggactatggaatgttgcatcctacagagaagtactatcccttgcgtcctgagtttgctgagtcaacattttatctttatcaagctactaaagatccttggtacctagaagtgggtgaaaccattgtgaggtcacttaattactatactaaagtggatggaggttttgctagcatcagagatgtttcaacaatgaaacttgaagatcaccagcacagcttctttctttcagaaacgtgcaaatatctttttcttctgtatgatgattcattcttgaggaatcaaaattacatatttacaacagagggtcatccccttccaataagaagcacgtggcatgagaaatttcctgcagcatatgttcccagcaattggacatctgttaaggatgagatccaaccaattcgcgcgagcgcattatcgtctcaagtttgtcccgagacgattttcggaagaagtgttggtaccccatgggagagtgcgtgccatgttccagatgcgcacgctagccacagatgcaggactgacgatgactgtggaatagaagcaataacatgcaagaagaggacctgcagtatggctggctactgcggcttatttttttataatggaaacaagagttccggctttagcatgataatgcgtacagccaatacaagtcgattattacaattaagaactgctgcatgaatagtgatactaactcaaaggaactaaattacaatactatgactaacactagtcatactcaattcttgaatttgagcgccatccatggtttgcgaagacttccatcgccaccacttccaaaacttgcgaagcaatgaggatttgttgttgcgattcctccttttgtagcagtctccagaatcttaaccagtgagtacatctgaaaataacctgcacaattgatggaattggtttatgattaaaagccacctcatttcgactgagccaaatagcccaaaataaagcagctattccagagagtaaaacttttttataccccggacccctatttgttccccaagacccgataatatgattaatgctaacgggcatttctaattttaaggcaaagtaaattactctccatatgcttttg

SEQ ID NO: 51428 - DNA, 2531 bp, Zea Mays
cgatctccaccacggctccacgaccacgagcccaaccgggtagcttcttcttcgtccgctgttacccacaccgcgggaagcctccatgcgatcccctgggcggcgcctaccagcgccggcgcggctcgtcgcggctgccctcctcctcgcagctctcaccgggggagccgtcggcgccgatgggtacgggcgggcgaggagggtgtacatgaagaacaaggtcctggagatgttttaccatgcctatgacaactacatgacttatgcattccctcatgatgaattgaagcctcttactaaaagtttcacggactcgcttagtgagcttggcaatttaaatcttgaacacttgccacaggattatagtggatccgcgttgacactggttgagtcattatcaaggtaacctcacagagtttgagagaggagttctctggctttcagaaaatctgacatttgatgttgatgctcggattaatctttttgagtgtaacataagacttcttggggggcttatttctgctcatattcttgcaaaagactacagcagccagtttaagcatgggctgtatcaagatcaattactacgtcttgctgaaagtttaggcaatcgttttctaccggcatttgagacacctactggattgccgtattcatggattaatcttaagtatggggtgatggaaaatgaaacaactgaaacaagcacatcagggtgtggctcccttatacttgaaatgggtgtgttgtcacgtttgactggtgattctagatatgaagctgcagctcttcgtgctctccgcaagttatggagcatgagaagttcactgaatctagtaggcaccacacttgatgtttttactggcaagtggattcagtattcatccggaattggtgctggtgttgattcattttatgagtatctgattaaagcatatattcttttcggaagtgatgagtactgggatatgtttcattcagcttatcttgcggtgcagaagtacttccgacatggtccatggtatcatgaggctgatatgaggactggagaagcaacgcactggcagctaactagccttcaggctttctggccaggtcttcagacacttcttggagacgtaactgctgcaaatctatcacaccgtgagttttacaatatatggcaaagatttggtgtgctacctgaaagatatcttttggactatggaatgttgcatcctacagagaagtactatcccttgcgtcctgagtttgctgagtcaacattttatctttatcaagctactaaaggtgcacccaatacacaccagaaggatatattcgttttatcttcatccagctctcatgttttcatctagggttgatgtcctattgagctcatcatatatgacttacttgttctttgtagtcatgccagttttcttattatagaaacacttaagtcacccactcacaagttttactaacttctctttttttcccctctccatcccttgatttctgaaacacttctcttatagatccttggtacctagaagtgggtgaaaccattgtgaggtcacttaattactatactaaagtggatggaggttttgctagcatcagagatgtttcaacaatgaaacttgaagatcaccagcacagcttctttctttcagaaacgtgcaaatatctttttcttctgtatgatgattcattcttgaggaatcaaaattacatatttacaacagagggtcatccccttccaataagaagcacgtggcatgagaaatttcctgcagcatatgttcccagcaattggacatctgttaaggatgagatccaaccaattcgcgcgagcgcattatcgtctcaagtttgtcccgagacgattttcggaagaagtgttggtaccccatgggagagtgcgtgccatgttccagatgcgcacgctagccacagatgcaggactgacgatgactgtggaatagaagcaataacatgcaagaagaggacctgcagtatggctggctactgcggcttatttttttataatggaaacaagagttccggctttagcatgataatgcgtacagccaatacaagtcgattattacaattaagaactgctgcatgaatagtgatactaactcaaaggaactaaattacaatactatgactaacactagtcatactcaattcttgaatttgagcgccatccatggtttgcgaagacttccatcgccaccacttccaaaacttgcgaagcaatgaggatttgttgttgcgattcctccttttgtagcagtctccagaatcttaaccagtgagtacatctgaaaataacctgcacaattgatggaattggtttatgattaaaagccacctcatttcgactgagccaaatagcccaaaataaagcagctattccagagagtaaaacttttttataccccggacccctatttgttccccaagacccgataatatgattaatgctaacgggcatttctaattttaaggcaaagtaaattactctccatatgcttttg

SEQ ID NO: 51429 - DNA, 2791 bp, Zea Mays
cgatctccaccacggctccacgaccacgagcccaaccgggtagcttcttcttcgtccgctgttacccacaccgcgggaagcctccatgcgatcccctgggcggcgcctaccagcgccggcgcggctcgtcgcggctgccctcctcctcgcagctctcaccgggggagccgtcggcgccgatgggtacgggcgggcgaggagggtgtacatgaagaacaaggtcctggagatgttttaccatgcctatgacaactacatgacttatgcattccctcatgatgaattgaagcctcttactaaaagtttcacggactcgcttagtgagcttggcaatttaaatcttgaacacttgccacaggattatagtggatccgcgttgacactggttgagtcattatcaaggtaacctcacagagtttgagagaggagttctctggctttcagaaaatctgacatttgatgttgatgctcggattaatctttttgagtgtaacataagacttcttggggggcttatttctgctcatattcttgcaaaagactacagcagccagtttaagcatgggctgtatcaagatcaattactacgtcttgctgaaagtttaggcaatcgttttctaccggcatttgagacacctactggattgccgtattcatggattaatcttaaggttcatataccgaactttggcttttttcagactttaaaatcttaattttttgcatgcatgaatcaatcgtaagattcctttacaacctgaaatcgtatggccacttgaatgccatcatttattgtgtgtacatatctgtgtacattcaacaggtcaaactgagaaagggtcttctgcaaagagttaccacatttgtctgaaagcagactacaacaaacattgagtttcttctccaataatttttgaaaaaggacgtgtatagttattaagacaagcatgctcattagtacaattttaacatctatcaacgtttaccttaggaaaactgggatattacttgctatcagctaaaatgataagaatggcaaattataagcatgctatggtagaatgaagaaccacagaatgattactttgtttgaaaaactcaaagttcacatatattagaactctggtactcattacttttgcaattggcatgatacaacaacctttttcagtatggggtgatggaaaatgaaacaactgaaacaagcacatcagggtgtggctcccttatacttgaaatgggtgtgttgtcacgtttgactggtgattctagatatgaagctgcagctcttcgtgctctccgcaagttatggagcatgagaagttcactgaatctagtaggcaccacacttgatgtttttactggcaagtggattcagtattcatccggaattggtgctggtgttgattcattttatgagtatctgattaaagcatatattcttttcggaagtgatgagtactgggatatgtttcattcagcttatcttgcggtgcagaagtacttccgacatggtccatggttaacaattcttcctacacttcatttcacccaccctgtcagtctctggattatgcttgtattggaatagtaatgattgtaaactccacaggtatcatgaggctgatatgaggactggagaagcaacgcactggcagctaactagccttcaggctttctggccaggtcttcagacacttcttggagacgtaactgctgcaaatctatcacaccgtgagttttacaatatatggcaaagatttggtgtgctacctgaaagatccttggtacctagaagtgggtgaaaccattgtgaggtcacttaattactatactaaagtggatggaggttttgctagcatcagagatgtttcaacaatgaaacttgaagatcaccagcacagcttctttctttcagaaacgtgcaaatatctttttcttctgtatgatgattcattcttgaggaatcaaaattacatatttacaacagagggtcatccccttccaataagaagcacgtggcatgagaaatttcctgcagcatatgttcccagcaattggacatctgttaaggatgagatccaaccaattcgcgcgagcgcattatcgtctcaagtttgtcccgagacgattttcggaagaagtgttggtaccccatgggagagtgcgtgccatgttccagatgcgcacgctagccacagatgcaggactgacgatgactgtggaatagaagcaataacatgcaagaagaggacctgcagtatggctggctactgcggcttatttttttataatggaaacaagagttccggctttagcatgataatgcgtacagccaatacaagtcgattattacaattaagaactgctgcatgaatagtgatactaactcaaaggaactaaattacaatactatgactaacactagtcatactcaattcttgaatttgagcgccatccatggtttgcgaagacttccatcgccaccacttccaaaacttgcgaagcaatgaggatttgttgttgcgattcctccttttgtagcagtctccagaatcttaaccagtgagtacatctgaaaataacctgcacaattgatggaattggtttatgattaaaagccacctcatttcgactgagccaaatagcccaaaataaagcagctattccagagagtaaaacttttttataccccggacccctatttgttccccaagacccgataatatgattaatgctaacgggcatttctaattttaaggcaaagtaaattactctccatatgcttttg

SEQ ID NO: 51430 - DNA, 2540 bp, Zea Mays
cgatctccaccacggctccacgaccacgagcccaaccgggtagcttcttcttcgtccgctgttacccacaccgcgggaagcctccatgcgatcccctgggcggcgcctaccagcgccggcgcggctcgtcgcggctgccctcctcctcgcagctctcaccgggggagccgtcggcgccgatgggtacgggcgggcgaggagggtgtacatgaagaacaaggtcctggagatgttttaccatgcctatgacaactacatgacttatgcattccctcatgatgaattgaagcctcttactaaaagtttcacggactcgcttagtgagcttggcaatttaaatgtattaaagtattgacaactataaggattttggtctgtattatataaatttaaggtaacctcacagagtttgagagaggagttctctggctttcagaaaatctgacatttgatgttgatgctcggattaatctttttgagtgtaacataagacttcttggggggcttatttctgctcatattcttgcaaaagactacagcagccagtttaagcatgggctgtatcaagatcaattactacgtcttgctgaaagtttaggcaatcgttttctaccggcatttgagacacctactggattgccgtattcatggattaatcttaaggtcaaactgagaaagggtcttctgcaaagagttaccacatttgtctgaaagcagactacaacaaacattgagtttcttctccaataatttttgaaaaaggacgtgtatagttattaagacaagcatgctcattagtacaattttaacatctatcaacgtttaccttaggaaaactgggatattacttgctatcagctaaaatgataagaatggcaaattataagcatgctatggtagaatgaagaaccacagaatgattactttgtttgaaaaactcaaagttcacatatattagaactctggtactcattacttttgcaattggcatgatacaacaacctttttcagtatggggtgatggaaaatgaaacaactgaaacaagcacatcagggtgtggctcccttatacttgaaatgggtgtgttgtcacgtttgactggtgattctagatatgaagctgcagctcttcgtgctctccgcaagttatggagcatgagaagttcactgaatctagtaggcaccacacttgatgtttttactggcaagtggattcagtattcatccggaattggtgctggtgttgattcattttatgagtatctgattaaagcatatattcttttcggaagtgatgagtactgggatatgtttcattcagcttatcttgcggtgcagaagtacttccgacatggtccatggtatcatgaggctgatatgaggactggagaagcaacgcactggcagctaactagccttcaggctttctggccaggtcttcagacacttcttggagacgtaactgctgcaaatctatcacaccgtgagttttacaatatatggcaaagatttggtgtgctacctgaaagatccttggtacctagaagtgggtgaaaccattgtgaggtcacttaattactatactaaagtggatggaggttttgctagcatcagagatgtttcaacaatgaaacttgaagatcaccagcacagcttctttctttcagaaacgtgcaaatatctttttcttctgtatgatgattcattcttgaggaatcaaaattacatatttacaacagagggtcatccccttccaataagaagcacgtggcatgagaaatttcctgcagcatatgttcccagcaattggacatctgttaaggatgagatccaaccaattcgcgcgagcgcattatcgtctcaagtttgtcccgagacgattttcggaagaagtgttggtaccccatgggagagtgcgtgccatgttccagatgcgcacgctagccacagatgcaggactgacgatgactgtggaatagaagcaataacatgcaagaagaggacctgcagtatggctggctactgcggcttatttttttataatggaaacaagagttccggctttagcatgataatgcgtacagccaatacaagtcgattattacaattaagaactgctgcatgaatagtgatactaactcaaaggaactaaattacaatactatgactaacactagtcatactcaattcttgaatttgagcgccatccatggtttgcgaagacttccatcgccaccacttccaaaacttgcgaagcaatgaggatttgttgttgcgattcctccttttgtagcagtctccagaatcttaaccagtgagtacatctgaaaataacctgcacaattgatggaattggtttatgattaaaagccacctcatttcgactgagccaaatagcccaaaataaagcagctattccagagagtaaaacttttttataccccggacccctatttgttccccaagacccgataatatgattaatgctaacgggcatttctaattttaaggcaaagtaaattactctccatatgcttttg

SEQ ID NO: 51431 - DNA, 2522 bp, Zea Mays
cgatctccaccacggctccacgaccacgagcccaaccgggtagcttcttcttcgtccgctgttacccacaccgcgggaagcctccatgcgatcccctgggcggcgcctaccagcgccggcgcggctcgtcgcggctgccctcctcctcgcagctctcaccgggggagccgtcggcgccgatgggtacgggcgggcgaggagggtgtacatgaagaacaaggtcctggagatgttttaccatgcctatgacaactacatgacttatgcattccctcatgatgaattgaagcctcttactaaaagtttcacggactcgcttagtgagcttggcaatttaaatcttgaacacttgccacaggattatagtggatccgcgttgacactggttgagtcattatcaagtcttgttgtcttaggtaacctcacagagtttgagagaggagttctctggctttcagaaaatctgacatttgatgttgatgctcggattaatctttttgagtgtaacataagacttcttggggggcttatttctgctcatattcttgcaaaagactacagcagccagtttaagcatgggctgtatcaagatcaattactacgtcttgctgaaagtttaggcaatcgttttctaccggcatttgagacacctactggattgccgtattcatggattaatcttaagtatggggtgatggaaaatgaaacaactgaaacaagcacatcagggtgtggctcccttatacttgaaatgggtgtgttgtcacgtttgactggtgattctagatatgaagctgcagctcttcgtgctctccgcaagttatggagcatgagaagttcactgaatctagtaggcaccacacttgatgtttttactggcaagtggattcagtattcatccggaattggtgctggtaaaactttcaatacttacccttgtgatttattgatcatgtgcttatttgatgtgtttgtagcattattagagcatatgctgttatgttgccttcactgttacattttagcatctttatttctaaaaacagataattagccgctttgtgaaatttctaattagaaaatattaggcacaatagtgatttctagtaacatggttgcaggtgttgattcattttatgagtatctgattaaagcatatattcttttcggaagtgatgagtactgggatatgtttcattcagcttatcttgcggtgcagaagtacttccgacatggtccatggtatcatgaggctgatatgaggactggagaagcaacgcactggcagctaactagccttcaggctttctggccaggtcttcagacacttcttggagacgtaactgctgcaaatctatcacaccgtgagttttacaatatatggcaaagatttggtgtgctacctgaaagatatcttttggactatggaatgttgcatcctacagagaagtactatcccttgcgtcctgagtttgctgagtcaacattttatctttatcaagctactaaagatccttggtacctagaagtgggtgaaaccattgtgaggtcacttaattactatactaaagtggatggaggttttgctagcatcagagatgtttcaacaatgaaacttgaagatcaccagcacagcttctttctttcagaaacgtgcaaatatctttttcttctgtatgatgattcattcttgaggaatcaaaattacatatttacaacagagggtcatccccttccaataagaagcacgtggcatgagaaatttcctgcagcatatgttcccagcaattggacatctgttaaggatgagatccaaccaattcgcgcgagcgcattatcgtctcaagtttgtcccgagacgattttcggaagaagtgttggtaccccatgggagagtgcgtgccatgttccagatgcgcacgctagccacagatgcaggactgacgatgactgtggaatagaagcaataacatgcaagaagaggacctgcagtatggctggctactgcggcttatttttttataatggaaacaagagttccggctttagcatgataatgcgtacagccaatacaagtcgattattacaattaagaactgctgcatgaatagtgatactaactcaaaggaactaaattacaatactatgactaacactagtcatactcaattcttgaatttgagcgccatccatggtttgcgaagacttccatcgccaccacttccaaaacttgcgaagcaatgaggatttgttgttgcgattcctccttttgtagcagtctccagaatcttaaccagtgagtacatctgaaaataacctgcacaattgatggaattggtttatgattaaaagccacctcatttcgactgagccaaatagcccaaaataaagcagctattccagagagtaaaacttttttataccccggacccctatttgttccccaagacccgataatatgattaatgctaacgggcatttctaattttaaggcaaagtaaattactctccatatgcttttg

SEQ ID NO: 51432 - DNA, 2932 bp, Zea Mays
cgatctccaccacggctccacgaccacgagcccaaccgggtagcttcttcttcgtccgctgttacccacaccgcgggaagcctccatgcgatcccctgggcggcgcctaccagcgccggcgcggctcgtcgcggctgccctcctcctcgcagctctcaccgggggagccgtcggcgccgatgggtacgggcgggcgaggagggtgtacatgaagaacaaggtcctggagatgttttaccatgcctatgacaactacatgacttatgcattccctcatgatgaattgaagcctcttactaaaagtttcacggactcgcttagtgagcttggcaatttaaatcttgaacacttgccacaggattatagtggatccgcgttgacactggttgagtcattatcaaggtaacctcacagagtttgagagaggagttctctggctttcagaaaatctgacatttgatgttgatgctcggattaatctttttgagtgtaacataagacttcttggggggcttatttctgctcatattcttgcaaaagactacagcagccagtttaagcatgggctgtatcaagatcaattactacgtcttgctgaaagtttaggcaatcgttttctaccggcatttgagacacctactggattgccgtattcatggattaatcttaaggttcatataccgaactttggcttttttcagactttaaaatcttaattttttgcatgcatgaatcaatcgtaagattcctttacaacctgaaatcgtatggccacttgaatgccatcatttattgtgtgtacatatctgtgtacattcaacaggtcaaactgagaaagggtcttctgcaaagagttaccacatttgtctgaaagcagactacaacaaacattgagtttcttctccaataatttttgaaaaaggacgtgtatagttattaagacaagcatgctcattagtacaattttaacatctatcaacgtttaccttaggaaaactgggatattacttgctatcagctaaaatgataagaatggcaaattataagcatgctatggtagaatgaagaaccacagaatgattactttgtttgaaaaactcaaagttcacatatattagaactctggtactcattacttttgcaattggcatgatacaacaacctttttcagtatggggtgatggaaaatgaaacaactgaaacaagcacatcagggtgtggctcccttatacttgaaatgggtgtgttgtcacgtttgactggtgattctagatatgaagctgcagctcttcgtgctctccgcaagttatggagcatgagaagttcactgaatctagtaggcaccacacttgatgtttttactggcaagtggattcagtattcatccggaattggtgctggtgttgattcattttatgagtatctgattaaagcatatattcttttcggaagtgatgagtactgggatatgtttcattcagcttatcttgcggtgcagaagtacttccgacatggtccatggtatcatgaggctgatatgaggactggagaagcaacgcactggcagctaactagccttcaggctttctggccaggtcttcagacacttcttggagacgtaactgctgcaaatctatcacaccgtgagttttacaatatatggcaaagatttggtgtgctacctgaaaggtatactgttttcaaccaagtttttgttaatggagaacaaaagtacacacgtctagtaaggcaaaactagttcagttatcgatgaagcagaatctagatacatgcatttatgtatgtattatattttatagatatcttttggactatggaatgttgcatcctacagagaagtactatcccttgcgtcctgagtttgctgagtcaacattttatctttatcaagctactaaagatccttggtacctagaagtgggtgaaaccattgtgaggtcacttaattactatactaaagtggatggaggttttgctagcatcagagatgtttcaacaatgaaacttgaagatcaccagcacagcttctttctttcagaaacgtgcaaatatctttttcttctgtatgatgattcattcttgaggaatcaaaattacatatttacaacagagggtcatccccttccaataagaagcacgtggcatgagaaatttcctgcagcatatgttcccagcaattggacatctgttaaggatgagatccaaccaattcgcgcgagcgcattatcgtctcaagtttgtcccgagacgattttcggaagaagtgttggtaccccatgggagagtgcgtgccatgttccagatgcgcacgctagccacagatgcaggactgacgatgactgtggaatagaagcaataacatgcaagaagaggacctgcagtatggctggctactgcggcttatttttttataatggaaacaagagttccggctttagcatgataatgcgtacagccaatacaagtcgattattacaattaagaactgctgcatgaatagtgatactaactcaaaggaactaaattacaatactatgactaacactagtcatactcaattcttgaatttgagcgccatccatggtttgcgaagacttccatcgccaccacttccaaaacttgcgaagcaatgaggatttgttgttgcgattcctccttttgtagcagtctccagaatcttaaccagtgagtacatctgaaaataacctgcacaattgatggaattggtttatgattaaaagccacctcatttcgactgagccaaatagcccaaaataaagcagctattccagagagtaaaacttttttataccccggacccctatttgttccccaagacccgataatatgattaatgctaacgggcatttctaattttaaggcaaagtaaattactctccatatgcttttg

SEQ ID NO: 51433 - DNA, 3059 bp, Zea Mays
cgatctccaccacggctccacgaccacgagcccaaccgggtagcttcttcttcgtccgctgttacccacaccgcgggaagcctccatgcgatcccctgggcggcgcctaccagcgccggcgcggctcgtcgcggctgccctcctcctcgcagctctcaccgggggagccgtcggcgccgatgggtacgggcgggcgaggagggtgtacatgaagaacaaggtcctggagatgttttaccatgcctatgacaactacatgacttatgcattccctcatgatgaattgaagcctcttactaaaagtttcacggactcgcttagtgagcttggcaatttaaatgtattaaagtattgacaactataaggattttggtctgtattatataaatttaaggtaccacaacttaatgttacccatgattccctttttctagcttgaacacttgccacaggattatagtggatccgcgttgacactggttgagtcattatcaaggtaacctcacagagtttgagagaggagttctctggctttcagaaaatctgacatttgatgttgatgctcggattaatctttttgaggtaacataagacttcttggggggcttatttctgctcatattcttgcaaaagactacagcagccagtttaagcatgggctgtatcaagatcaattactacgtcttgctgaaagtttaggcaatcgttttctaccggcatttgagacacctactggattgccgtattcatggattaatcttaaggtcaaactgagaaagggtcttctgcaaagagttaccacatttgtctgaaagcagactacaacaaacattgagtttcttctccaataatttttgaaaaaggacgtgtatagttattaagacaagcatgctcattagtacaattttaacatctatcaacgtttaccttaggaaaactgggatattacttgctatcagctaaaatgataagaatggcaaattataagcatgctatggtagaatgaagaaccacagaatgattactttgtttgaaaaactcaaagttcacatatattagaactctggtactcattacttttgcaattggcatgatacaacaacctttttcagtatggggtgatggaaaatgaaacaactgaaacaagcacatcagggtgtggtaggtgaaagatttttttgtttattatttattggtataaatgcatgttcctttgtggttgttgcttagtaatctacatgcttacaggctcccttatacttgaaatgggtgtgttgtcacgtttgactggtgattctagatatgaagctgcagctcttcgtgctctccgcaagttatggagcatgagaagttcactgaatctagtaggcaccacacttgatgtttttactggcaagtggattcagtattcatccggaattggtgctggtgttgattcattttatgagtatctgattaaagcatatattcttttcggaagtgatgagtactgggatatgtttcattcagcttatcttgcggtgcagaagtacttccgacatggtccatggtatcatgaggctgatatgaggactggagaagcaacgcactggcagctaactagccttcaggctttctggccaggtcttcagacacttcttggagacgtaactgctgcaaatctatcacaccgtgagttttacaatatatggcaaagatttggtgtgctacctgaaagatatcttttggactatggaatgttgcatcctacagagaagtactatcccttgcgtcctgagtttgctgagtcaacattttatctttatcaagctactaaaggtgcacccaatacacaccagaaggatatattcgttttatcttcatccagctctcatgttttcatctagggttgatgtcctattgagctcatcatatatgacttacttgttctttgtagtcatgccagttttcttattatagaaacacttaagtcacccactcacaagttttactaacttctctttttttcccctctccatcccttgatttctgaaacacttctcttatagatccttggtacctagaagtgggtgaaaccattgtgaggtcacttaattactatactaaagtggatggaggttttgctagcatcagagatgtttcaacaatgaaacttgaagatcaccagcacagcttctttctttcagaaacgtgcaaatatctttttcttctgtatgatgattcattcttgaggaatcaaaattacatatttacaacagagggtcatccccttccaataagaagcacgtggcatgagaaatttcctgcagcatatgttcccagcaattggacatctgttaaggatgagatccaaccaattcgcgcgagcgcattatcgtctcaagtttgtcccgagacgattttcggaagaagtgttggtaccccatgggagagtgcgtgccatgttccagatgcgcacgctagccacagatgcaggactgacgatgactgtggaatagaagcaataacatgcaagaagaggacctgcagtatggctggctactgcggcttatttttttataatggaaacaagagttccggctttagcatgataatgcgtacagccaatacaagtcgattattacaattaagaactgctgcatgaatagtgatactaactcaaaggaactaaattacaatactatgactaacactagtcatactcaattcttgaatttgagcgccatccatggtttgcgaagacttccatcgccaccacttccaaaacttgcgaagcaatgaggatttgttgttgcgattcctccttttgtagcagtctccagaatcttaaccagtgagtacatctgaaaataacctgcacaattgatggaattggtttatgattaaaagccacctcatttcgactgagccaaatagcccaaaataaagcagctattccagagagtaaaacttttttataccccggacccctatttgttccccaagacccgataatatgattaatgctaacgggcatttctaattttaaggcaaagtaaattactctccatatgcttttg

SEQ ID NO: 51434 - DNA, 2668 bp, Zea Mays
cgatctccaccacggctccacgaccacgagcccaaccgggtagcttcttcttcgtccgctgttacccacaccgcgggaagcctccatgcgatcccctgggcggcgcctaccagcgccggcgcggctcgtcgcggctgccctcctcctcgcagctctcaccgggggagccgtcggcgccgatgggtacgggcgggcgaggagggtgtacatgaagaacaaggtcctggagatgttttaccatgcctatgacaactacatgacttatgcattccctcatgatgaattgaagcctcttactaaaagtttcacggactcgcttagtgagcttggcaatttaaatcttgaacacttgccacaggattatagtggatccgcgttgacactggttgagtcattatcaagagtttgagagaggagttctctggctttcagaaaatctgacatttgatgttgatgctcggattaatctttttgagtgtaacataagacttcttggggggcttatttctgctcatattcttgcaaaagactacagcagccagtttaagcatgggctgtatcaagatcaattactacgtcttgctgaaagtttaggcaatcgttttctaccggcatttgagacacctactggattgccgtattcatggattaatcttaagtatggggtgatggaaaatgaaacaactgaaacaagcacatcagggtgtggctcccttatacttgaaatgggtgtgttgtcacgtttgactggtgattctagatatgaagctgcagctcttcgtgctctccgcaagttatggagcatgagaagttcactgaatctagtaggcaccacacttgatgtttttactggcaagtggattcagtattcatccggaattggtgctggtgttgattcattttatgagtatctgattaaagcatatattcttttcggaagtgatgagtactgggatatgtttcattcagcttatcttgcggtgcagaagtacttccgacatggtccatggtatcatgaggctgatatgaggactggagaagcaacgcactggcagctaactagccttcaggctttctggccaggtcttcagttctactgtactgaacagacacttcttggagacgtaactgctgcaaatctatcacaccgtgagttttacaatatatggcaaagatttggtgtgctacctgaaaggtatactgttttcaaccaagtttttgttaatggagaacaaaagtacacacgtctagtaaggcaaaactagttcagttatcgatgaagcagaatctagatacatgcatttatgtatgtattatattttatagatatcttttggactatggaatgttgcatcctacagagaagtactatcccttgcgtcctgagtttgctgagtcaacattttatctttatcaagctactaaaggtgcacccaatacacaccagaaggatatattcgttttatcttcatccagctctcatgttttcatctagggttgatgtcctattgagctcatcatatatgacttacttgttctttgtagtcatgccagttttcttattatagaaacacttaagtcacccactcacaagttttactaacttctctttttttcccctctccatcccttgatttctgaaacacttctcttatagatccttggtacctagaagtgggtgaaaccattgtgaggtcacttaattactatactaaagtggatggaggttttgctagcatcagagatgtttcaacaatgaaacttgaagatcaccagcacagcttctttctttcagaaacgtgcaaatatctttttcttctgtatgatgattcattcttgaggaatcaaaattacatatttacaacagagggtcatccccttccaataagaagcacgtggcatgagaaatttcctgcagcatatgttcccagcaattggacatctgttaaggatgagatccaaccaattcgcgcgagcgcattatcgtctcaagtttgtcccgagacgattttcggaagaagtgttggtaccccatgggagagtgcgtgccatgttccagatgcgcacgctagccacagatgcaggactgacgatgactgtggaatagaagcaataacatgcaagaagaggacctgcagtatggctggctactgcggcttatttttttataatggaaacaagagttccggctttagcatgataatgcgtacagccaatacaagtcgattattacaattaagaactgctgcatgaatagtgatactaactcaaaggaactaaattacaatactatgactaacactagtcatactcaattcttgaatttgagcgccatccatggtttgcgaagacttccatcgccaccacttccaaaacttgcgaagcaatgaggatttgttgttgcgattcctccttttgtagcagtctccagaatcttaaccagtgagtacatctgaaaataacctgcacaattgatggaattggtttatgattaaaagccacctcatttcgactgagccaaatagcccaaaataaagcagctattccagagagtaaaacttttttataccccggacccctatttgttccccaagacccgataatatgattaatgctaacgggcatttctaattttaaggcaaagtaaattactctccatatgcttttg

SEQ ID NO: 51435 - DNA, 2301 bp, Zea Mays
cgatctccaccacggctccacgaccacgagcccaaccgggtagcttcttcttcgtccgctgttacccacaccgcgggaagcctccatgcgatcccctgggcggcgcctaccagcgccggcgcggctcgtcgcggctgccctcctcctcgcagctctcaccgggggagccgtcggcgccgatgggtacgggcgggcgaggagggtgtacatgaagaacaaggtcctggagatgttttaccatgcctatgacaactacatgacttatgcattccctcatgatgaattgaagcctcttactaaaagtttcacggactcgcttagtgagcttggcaatttaaatcttgaacacttgccacaggattatagtggatccgcgttgacactggttgagtcattatcaaggtaacctcacagagtttgagagaggagttctctggctttcagaaaatctgacatttgatgttgatgctcggattaatctttttgagtgtaacataagacttcttggggggcttatttctgctcatattcttgcaaaagactacagcagccagtttaagcatgggctgtatcaagatcaattactacgtcttgctgaaagtttaggcaatcgttttctaccggcatttgagacacctactggattgccgtattcatggattaatcttaagtatggggtgatggaaaatgaaacaactgaaacaagcacatcagggtgtggctcccttatacttgaaatgggtgtgttgtcacgtttgactggtgattctagatatgaagctgcagctcttcgtgctctccgcaagttatggagcatgagaagttcactgaatctagtaggcaccacacttgatgtttttactggcaagtggattcagtattcatccggaattggtgctggtgttgattcattttatgagtatctgattaaagcatatattcttttcggaagtgatgagtactgggatatgtttcattcagcttatcttgcggtgcagaagtacttccgacatggtccatggtatcatgaggctgatatgaggactggagaagcaacgcactggcagctaactagccttcaggctttctggccaggtcttcagacacttcttggagacgtaactgctgcaaatctatcacaccgtgagttttacaatatatggcaaagatttggtgtgctacctgaaagatatcttttggactatggaatgttgcatcctacagagaagtactatcccttgcgtcctgagtttgctgagtcaacattttatctttatcaagctactaaagatccttggtacctagaagtgggtgaaaccattgtgaggtcacttaattactatactaaagtggatggaggttttgctagcatcagagatgtttcaacaatgaaacttgaagatcaccagcacagcttctttctttcagaaacgtgcaaatatctttttcttctgtatgatgattcattcttgaggaatcaaaattacatatttacaacagagggtcatccccttccaataagaagcacgtggcatgagaaatttcctgcagcatatgttcccagcaattggacatctgttaaggatgagatccaaccaattcgcgcgagcgcattatcgtctcaagtttgtcccgagacgattttcggaagaagtgttggtaccccatgggagagtgcgtgccatgttccagatgcgcacgctagccacagatgcaggactgacgatgactgtggaatagaagcaataacatgcaagaagaggacctgcagtatggctggctactgcggcttatttttttataatggaaacaagagttccggctttagcatgataatgcgtacagccaatacaagtcgattattacaattaagaactgctgcatgaatagtgatactaactcaaaggaactaaattacaatactatgactaacactagtcatactcaattcttgaatttgagcgccatccatggtttgcgaagacttccatcgccaccacttccaaaacttgcgaagcaatgaggatttgttgttgcgattcctccttttgtagcagtctccagaatcttaaccagtgagtacatctgaaaataacctgcacaattgatggaattggtttatgattaaaagccacctcatttcgactgagccaaatagcccaaaataaagcagctattccagagagtaaaacttttttataccccggacccctatttgttccccaagacccgataatatgattaatgctaacgggcatttctaattttaaggcaaagtaaattactctccatatgcttttg

SEQ ID NO: 51436 - DNA, 3006 bp, Zea Mays
cggctccacgaccacgagcccaaccgggtagcttcttcttcgtccgctgttacccacaccgcgggaagcctccatgcgatcccctgggcggcgcctaccagcgccggcgcggctcgtcgcggctgccctcctcctcgcagctctcaccgggggagccgtcggcgccgatgggtacgggcgggcgaggagggtgtacatgaagaacaaggtcctggagatcatgatgaattgaagcctcttactaaaagtttcacggactcgcttagtgagcttggcaatttaaatgtattaaagtattgacaactataaggattttggtctgtattatataaatttaaggtaccacaacttaatgttacccatgattccctttttctagcttgaacacttgccacaggattatagtggatccgcgttgacactggttgagtcattatcaaggtacagtttatgaagctgtaatgtttccagttttttagtgctctgagatttatattgttttttgttgttcaaaatgtaaaccgttgtatttttctttaggacacttctattcataagattggtttgtgatgcccttctgttttgctcatgcagtcttgttgtcttaggtaacctcacagagtttgagagaggagttctctggctttcagaaaatctgacatttgatgttgatgctcggattaatctttttgaggtaacataagacttcttggggggcttatttctgctcatattcttgcaaaagactacagcagccagtttaagcatgggctgtatcaagatcaattactacgtcttgctgaaagtttaggcaatcgttttctaccggcatttgagacacctactggattgccgtattcatggattaatcttaaggttcatataccgaactttggcttttttcagactttaaaatcttaattttttgcatgcatgaatcaatcgtaagattcctttacaacctgaaatcgtatggccacttgaatgccatcatttattgtgtgtacatatctgtgtacattcaacaggtcaaactgagaaagggtcttctgcaaagagttaccacatttgtctgaaagcagactacaacaaacattgagtttcttctccaataatttttgaaaaaggacgtgtatagttattaagacaagcatgctcattagtacaattttaacatctatcaacgtttaccttaggaaaactgggatattacttgctatcagctaaaatgataagaatggcaaattataagcatgctatggtagaatgaagaaccacagaatgattactttgtttgaaaaactcaaagttcacatatattagaactctggtactcattacttttgcaattggcatgatacaacaacctttttcagtatggggtgatggaaaatgaaacaactgaaacaagcacatcagggtgtggctcccttatacttgaaatgggtgtgttgtcacgtttgactggtgattctagatatgaagctgcagctcttcgtgctctccgcaagttatggagcatgagaagttcactgaatctagtaggcaccacacttgatgtttttactggcaagtggattcagtattcatccggaattggtgctggtgttgattcattttatgagtatctgattaaagcatatattcttttcggaagtgatgagtactgggatatgtttcattcagcttatcttgcggtgcagaagtacttccgacatggtccatggtatcatgaggctgatatgaggactggagaagcaacgcactggcagctaactagccttcaggctttctggccaggtcttcagacacttcttggagacgtaactgctgcaaatctatcacaccgtgagttttacaatatatggcaaagatttggtgtgctacctgaaagatatcttttggactatggaatgttgcatcctacagagaagtactatcccttgcgtcctgagtttgctgagtcaacattttatctttatcaagctactaaagatccttggtacctagaagtgggtgaaaccattgtgaggtcacttaattactatactaaagtggatggaggttttgctagcatcagagatgtttcaacaatgaaacttgaagatcaccagcacagcttctttctttcagaaacgtgcaaatatctttttcttctgtatgatgattcattcttgaggaatcaaaattacatatttacaacagagggtcatccccttccaataagaagcacgtggcatgagaaatttcctgcagcatatgttcccagcaattggacatctgttaaggatgagatccaaccaattcgcgcgagcgcattatcgtctcaagtttgtcccgagacgattttcggaagaagtgttggtaccccatgggagagtgcgtgccatgttccagatgcgcacgctagccacagatgcaggactgacgatgactgtggaatagaagcaataacatgcaagaagaggacctgcagtatggctggctactgcggcttatttttttataatggaaacaagagttccggctttagcatgataatgcgtacagccaatacaagtcgattattacaattaagaactgctgcatgaatagtgatactaactcaaaggaactaaattacaatactatgactaacactagtcatactcaattcttgaatttgagcgccatccatggtttgcgaagacttccatcgccaccacttccaaaacttgcgaagcaatgaggatttgttgttgcgattcctccttttgtagcagtctccagaatcttaaccagtgagtacatctgaaaataacctgcacaattgatggaattggtttatgattaaaagccacctcatttcgactgagccaaatagcccaaaataaagcagctattccagagagtaaaacttttttataccccggacccctatttgttccccaagacccgataatatgattaatgctaacgggcatttctaattttaaggcaaagtaaattactctccatatgcttttg

SEQ ID NO: 51437 - DNA, 2158 bp, Zea Mays
ggctccacgaccacgagcccaaccgggtagcttcttcttcgtccgctgttacccacaccgcgggaagcctccatgcgatcccctgggcggcgcctaccagcgccggcgcggctcgtcgcggctgccctcctcctcgcagctctcaccgggggagccgtcggcgccgatgggtacgggcgggcgaggagggtgtacatgaagaacaaggtcctggagatcatgatgaattgaagcctcttactaaaagtttcacggactcgcttagtgagcttggcaatttaaatcttgaacacttgccacaggattatagtggatccgcgttgacactggttgagtcattatcaagtcttgttgtcttaggtaacctcacagagtttgagagaggagttctctggctttcagaaaatctgacatttgatgttgatgctcggattaatctttttgagtgtaacataagacttcttggggggcttatttctgctcatattcttgcaaaagactacagcagccagtttaagcatgggctgtatcaagatcaattactacgtcttgctgaaagtttaggcaatcgttttctaccggcatttgagacacctactggattgccgtattcatggattaatcttaagtatggggtgatggaaaatgaaacaactgaaacaagcacatcagggtgtggctcccttatacttgaaatgggtgtgttgtcacgtttgactggtgattctagatatgaagctgcagctcttcgtgctctccgcaagttatggagcatgagaagttcactgaatctagtaggcaccacacttgatgtttttactggcaagtggattcagtattcatccggaattggtgctggtgttgattcattttatgagtatctgattaaagcatatattcttttcggaagtgatgagtactgggatatgtttcattcagcttatcttgcggtgcagaagtacttccgacatggtccatggtatcatgaggctgatatgaggactggagaagcaacgcactggcagctaactagccttcaggctttctggccaggtcttcagacacttcttggagacgtaactgctgcaaatctatcacaccgtgagttttacaatatatggcaaagatttggtgtgctacctgaaagatccttggtacctagaagtgggtgaaaccattgtgaggtcacttaattactatactaaagtggatggaggttttgctagcatcagagatgtttcaacaatgaaacttgaagatcaccagcacagcttctttctttcagaaacgtgcaaatatctttttcttctgtatgatgattcattcttgaggaatcaaaattacatatttacaacagagggtcatccccttccaataagaagcacgtggcatgagaaatttcctgcagcatatgttcccagcaattggacatctgttaaggatgagatccaaccaattcgcgcgagcgcattatcgtctcaagtttgtcccgagacgattttcggaagaagtgttggtaccccatgggagagtgcgtgccatgttccagatgcgcacgctagccacagatgcaggactgacgatgactgtggaatagaagcaataacatgcaagaagaggacctgcagtatggctggctactgcggcttatttttttataatggaaacaagagttccggctttagcatgataatgcgtacagccaatacaagtcgattattacaattaagaactgctgcatgaatagtgatactaactcaaaggaactaaattacaatactatgactaacactagtcatactcaattcttgaatttgagcgccatccatggtttgcgaagacttccatcgccaccacttccaaaacttgcgaagcaatgaggatttgttgttgcgattcctccttttgtagcagtctccagaatcttaaccagtgagtacatctgaaaataacctgcacaattgatggaattggtttatgattaaaagccacctcatttcgactgagccaaatagcccaaaataaagcagctattccagagagtaaaacttttttataccccggacccctatttgttccccaagacccgataatatgattaatgctaacgggcatttctaattttaaggcaaagtaaattactctccatatgcttttg

SEQ ID NO: 51438 - DNA, 2390 bp, Zea Mays
ggctccacgaccacgagcccaaccgggtagcttcttcttcgtccgctgttacccacaccgcgggaagcctccatgcgatcccctgggcggcgcctaccagcgccggcgcggctcgtcgcggctgccctcctcctcgcagctctcaccgggggagccgtcggcgccgatgggtacgggcgggcgaggagggtgtacatgaagaacaaggtcctggagatcatgatgaattgaagcctcttactaaaagtttcacggactcgcttagtgagcttggcaatttaaatcttgaacacttgccacaggattatagtggatccgcgttgacactggttgagtcattatcaagtcttgttgtcttaggtaacctcacagagtttgagagaggagttctctggctttcagaaaatctgacatttgatgttgatgctcggattaatctttttgagtgtaacataagacttcttggggggcttatttctgctcatattcttgcaaaagactacagcagccagtttaagcatgggctgtatcaagatcaattactacgtcttgctgaaagtttaggcaatcgttttctaccggcatttgagacacctactggattgccgtattcatggattaatcttaagtatggggtgatggaaaatgaaacaactgaaacaagcacatcagggtgtggctcccttatacttgaaatgggtgtgttgtcacgtttgactggtgattctagatatgaagctgcagctcttcgtgctctccgcaagttatggagcatgagaagttcactgaatctagtaggcaccacacttgatgtttttactggcaagtggattcagtattcatccggaattggtgctggtgttgattcattttatgagtatctgattaaagcatatattcttttcggaagtgatgagtactgggatatgtttcattcagcttatcttgcggtgcagaagtacttccgacatggtccatggtatcatgaggctgatatgaggactggagaagcaacgcactggcagctaactagccttcaggctttctggccaggtcttcagacacttcttggagacgtaactgctgcaaatctatcacaccgtgagttttacaatatatggcaaagatttggtgtgctacctgaaaggtatactgttttcaaccaagtttttgttaatggagaacaaaagtacacacgtctagtaaggcaaaactagttcagttatcgatgaagcagaatctagatacatgcatttatgtatgtattatattttatagatatcttttggactatggaatgttgcatcctacagagaagtactatcccttgcgtcctgagtttgctgagtcaacattttatctttatcaagctactaaagatccttggtacctagaagtgggtgaaaccattgtgaggtcacttaattactatactaaagtggatggaggttttgctagcatcagagatgtttcaacaatgaaacttgaagatcaccagcacagcttctttctttcagaaacgtgcaaatatctttttcttctgtatgatgattcattcttgaggaatcaaaattacatatttacaacagagggtcatccccttccaataagaagcacgtggcatgagaaatttcctgcagcatatgttcccagcaattggacatctgttaaggatgagatccaaccaattcgcgcgagcgcattatcgtctcaagtttgtcccgagacgattttcggaagaagtgttggtaccccatgggagagtgcgtgccatgttccagatgcgcacgctagccacagatgcaggactgacgatgactgtggaatagaagcaataacatgcaagaagaggacctgcagtatggctggctactgcggcttatttttttataatggaaacaagagttccggctttagcatgataatgcgtacagccaatacaagtcgattattacaattaagaactgctgcatgaatagtgatactaactcaaaggaactaaattacaatactatgactaacactagtcatactcaattcttgaatttgagcgccatccatggtttgcgaagacttccatcgccaccacttccaaaacttgcgaagcaatgaggatttgttgttgcgattcctccttttgtagcagtctccagaatcttaaccagtgagtacatctgaaaataacctgcacaattgatggaattggtttatgattaaaagccacctcatttcgactgagccaaatagcccaaaataaagcagctattccagagagtaaaacttttttataccccggacccctatttgttccccaagacccgataatatgattaatgctaacgggcatttctaattttaaggcaaagtaaattactctccatatgcttttg

SEQ ID NO: 51439 - DNA, 3193 bp, Zea Mays
ggctccacgaccacgagcccaaccgggtagcttcttcttcgtccgctgttacccacaccgcgggaagcctccatgcgatcccctgggcggcgcctaccagcgccggcgcggctcgtcgcggctgccctcctcctcgcagctctcaccgggggagccgtcggcgccgatgggtacgggcgggcgaggagggtgtacatgaagaacaaggtcctggagatcatgatgaattgaagcctcttactaaaagtttcacggactcgcttagtgagcttggcaatttaaatgtattaaagtattgacaactataaggattttggtctgtattatataaatttaaggtaccacaacttaatgttacccatgattccctttttctagcttgaacacttgccacaggattatagtggatccgcgttgacactggttgagtcattatcaagtcttgttgtcttaggtaacctcacagagtttgagagaggagttctctggctttcagaaaatctgacatttgatgttgatgctcggattaatctttttgaggtaattctatttgattatttccactcttacacacaggatttcaagaatgaaagcagctctgtgttttctcattgttttttttggctattcagtgtaacataagacttcttggggggcttatttctgctcatattcttgcaaaagactacagcagccagtttaagcatgggctgtatcaagatcaattactacgtcttgctgaaagtttaggcaatcgttttctaccggcatttgagacacctactggattgccgtattcatggattaatcttaaggttcatataccgaactttggcttttttcagactttaaaatcttaattttttgcatgcatgaatcaatcgtaagattcctttacaacctgaaatcgtatggccacttgaatgccatcatttattgtgtgtacatatctgtgtacattcaacaggtcaaactgagaaagggtcttctgcaaagagttaccacatttgtctgaaagcagactacaacaaacattgagtttcttctccaataatttttgaaaaaggacgtgtatagttattaagacaagcatgctcattagtacaattttaacatctatcaacgtttaccttaggaaaactgggatattacttgctatcagctaaaatgataagaatggcaaattataagcatgctatggtagaatgaagaaccacagaatgattactttgtttgaaaaactcaaagttcacatatattagaactctggtactcattacttttgcaattggcatgatacaacaacctttttcagtatggggtgatggaaaatgaaacaactgaaacaagcacatcagggtgtggctcccttatacttgaaatgggtgtgttgtcacgtttgactggtgattctagatatgaagctgcagctcttcgtgctctccgcaagttatggagcatgagaagttcactgaatctagtaggcaccacacttgatgtttttactggcaagtggattcagtattcatccggaattggtgctggtgttgattcattttatgagtatctgattaaagcatatattcttttcggaagtgatgagtactgggatatgtttcattcagcttatcttgcggtgcagaagtacttccgacatggtccatggtatcatgaggctgatatgaggactggagaagcaacgcactggcagctaactagccttcaggctttctggccaggtcttcagttctactgtactgaacagacacttcttggagacgtaactgctgcaaatctatcacaccgtgagttttacaatatatggcaaagatttggtgtgctacctgaaagatatcttttggactatggaatgttgcatcctacagagaagtactatcccttgcgtcctgagtttgctgagtcaacattttatctttatcaagctactaaaggtgcacccaatacacaccagaaggatatattcgttttatcttcatccagctctcatgttttcatctagggttgatgtcctattgagctcatcatatatgacttacttgttctttgtagtcatgccagttttcttattatagaaacacttaagtcacccactcacaagttttactaacttctctttttttcccctctccatcccttgatttctgaaacacttctcttatagatccttggtacctagaagtgggtgaaaccattgtgaggtcacttaattactatactaaagtggatggaggttttgctagcatcagagatgtttcaacaatgaaacttgaagatcaccagcacagcttctttctttcagaaacgtgcaaatatctttttcttctgtatgatgattcattcttgaggaatcaaaattacatatttacaacagagggtcatccccttccaataagaagcacgtggcatgagaaatttcctgcagcatatgttcccagcaattggacatctgttaaggatgagatccaaccaattcgcgcgagcgcattatcgtctcaagtttgtcccgagacgattttcggaagaagtgttggtaccccatgggagagtgcgtgccatgttccagatgcgcacgctagccacagatgcaggactgacgatgactgtggaatagaagcaataacatgcaagaagaggacctgcagtatggctggctactgcggcttatttttttataatggaaacaagagttccggctttagcatgataatgcgtacagccaatacaagtcgattattacaattaagaactgctgcatgaatagtgatactaactcaaaggaactaaattacaatactatgactaacactagtcatactcaattcttgaatttgagcgccatccatggtttgcgaagacttccatcgccaccacttccaaaacttgcgaagcaatgaggatttgttgttgcgattcctccttttgtagcagtctccagaatcttaaccagtgagtacatctgaaaataacctgcacaattgatggaattggtttatgattaaaagccacctcatttcgactgagccaaatagcccaaaataaagcagctattccagagagtaaaacttttttataccccggacccctatttgttccccaagacccgataatatgattaatgctaacgggcatttctaattttaaggcaaagtaaattactctccatatgcttttg

SEQ ID NO: 51440 - DNA, 3904 bp, Zea Mays
gtgagtactcagctgccacgtgcttcatccctcccgtcttcggctcttcgccgttcataatctttcttctgtcggatcttgttgtgtgcgcctgggtggtgtatccaaccgacgttgtctagagatgttgtaaacacgaagcctagctcttctaatttgacgagttctgaactgaagttgtaaaacgaatccttacaatgctaatcttttttatttgttgggtcaaatgccaacatttcgagctcacttgtctctggcctaggattggaccattggagtgatacagatacacctcgcaagtcgcaacaaaatttccatgccaacgtggttggcaaaatctgatagcactttgagcttagcttctagtaccactgttatttgacgttcttttgttctttcttggatggttagcttcttatgaactgagttgactttaaagctcttccatatttatgttattaaagatgaatagactgtagaggttggtaaaattgacatcttcagttttatgcttccagggcagagcactgttgcatagcctctcaggaaatctatcttcatggatcatcgatgctatttacagtgatatgtgataggctggcatatttagtgttgtcaatcaagattcaagggttcagcataacctagccacattaaagctgctaacttttgtattgttgccgctctcaagattcagtgctgtaagcaataacccacaagggcgtgtgacagggtgcccatgcgttacgacccattctctttgtttcaaattataaatcatttcggcttttctagttacatagcttttgcgatgtatacgtacactctatctagatgcataacttccgctttgtatctagaaaagccgaaacgacttaaatttgaaacggatggagtatctaggaagcctaggctcttataggtcttagcttcactgcgtttttttttttggtattgatatacttccattcctttcaggttttaccatgcctatgacaactacatgacttatgcattccctcatgatgaattgaagcctcttactaaaagtttcacggactcgcttagtgagcttggcaatttaaatgtattaaagtattgacaactataaggattttggtctgtattatataaatttaaggtaccacaacttaatgttacccatgattccctttttctagcttgaacacttgccacaggattatagtggatccgcgttgacactggttgagtcattatcaagtcttgttgtcttaggtaacctcacagagtttgagagaggagttctctggctttcagaaaatctgacatttgatgttgatgctcggattaatctttttgagtgtaacataagacttcttggggggcttatttctgctcatattcttgcaaaagactacagcagccagtttaagcatgggctgtatcaagatcaattactacgtcttgctgaaagtttaggcaatcgttttctaccggcatttgagacacctactggattgccgtattcatggattaatcttaaggttcatataccgaactttggcttttttcagactttaaaatcttaattttttgcatgcatgaatcaatcgtaagattcctttacaacctgaaatcgtatggccacttgaatgccatcatttattgtgtgtacatatctgtgtacattcaacaggtcaaactgagaaagggtcttctgcaaagagttaccacatttgtctgaaagcagactacaacaaacattgagtttcttctccaataatttttgaaaaaggacgtgtatagttattaagacaagcatgctcattagtacaattttaacatctatcaacgtttaccttaggaaaactgggatattacttgctatcagctaaaatgataagaatggcaaattataagcatgctatggtagaatgaagaaccacagaatgattactttgtttgaaaaactcaaagttcacatatattagaactctggtactcattacttttgcaattggcatgatacaacaacctttttcagtatggggtgatggaaaatgaaacaactgaaacaagcacatcagggtgtggctcccttatacttgaaatgggtgtgttgtcacgtttgactggtgattctagatatgaagctgcagctcttcgtgctctccgcaagttatggagcatgagaagttcactgaatctagtaggcaccacacttgatgtttttactggcaagtggattcagtattcatccggaattggtgctggtgttgattcattttatgagtatctgattaaagcatatattcttttcggaagtgatgagtactgggatatgtttcattcagcttatcttgcggtgcagaagtacttccgacatggtccatggtatcatgaggctgatatgaggactggagaagcaacgcactggcagctaactagccttcaggctttctggccaggtcttcagttctactgtactgaacagacacttcttggagacgtaactgctgcaaatctatcacaccgtgagttttacaatatatggcaaagatttggtgtgctacctgaaagatatcttttggactatggaatgttgcatcctacagagaagtactatcccttgcgtcctgagtttgctgagtcaacattttatctttatcaagctactaaaggtgcacccaatacacaccagaaggatatattcgttttatcttcatccagctctcatgttttcatctagggttgatgtcctattgagctcatcatatatgacttacttgttctttgtagtcatgccagttttcttattatagaaacacttaagtcacccactcacaagttttactaacttctctttttttcccctctccatcccttgatttctgaaacacttctcttatagatccttggtacctagaagtgggtgaaaccattgtgaggtcacttaattactatactaaagtggatggaggttttgctagcatcagagatgtttcaacaatgaaacttgaagatcaccagcacagcttctttctttcagaaacgtgcaaatatctttttcttctgtatgatgattcattcttgaggaatcaaaattacatatttacaacagagggtcatccccttccaataagaagcacgtggcatgagaaatttcctgcagcatatgttcccagcaattggacatctgttaaggatgagatccaaccaattcgcgcgagcgcattatcgtctcaagtttgtcccgagacgattttcggaagaagtgttggtaccccatgggagagtgcgtgccatgttccagatgcgcacgctagccacagatgcaggactgacgatgactgtggaatagaagcaataacatgcaagaagaggacctgcagtatggctggctactgcggcttatttttttataatggaaacaagagttccggctttagcatgataatgcgtacagccaatacaagtcgattattacaattaagaactgctgcatgaatagtgatactaactcaaaggaactaaattacaatactatgactaacactagtcatactcaattcttgaatttgagcgccatccatggtttgcgaagacttccatcgccaccacttccaaaacttgcgaagcaatgaggatttgttgttgcgattcctccttttgtagcagtctccagaatcttaaccagtgagtacatctgaaaataacctgcacaattgatggaattggtttatgattaaaagccacctcatttcgactgagccaaatagcccaaaataaagcagctattccagagagtaaaacttttttataccccggacccctatttgttccccaagacccgataatatgattaatgctaacgggcatttctaattttaaggcaaagtaaattactctccatatgcttttg

SEQ ID NO: 51441 - DNA, 2490 bp, Zea Mays
cactgttgcatagcctctcaggaaatctatcttcatggatcatcgatgctatttacagtgatatgtgataggctggcatatttagtgttgtcaatcaagattcaagggttcagcataacctagccacattaaagctgctaacttttgtattgttgccgctctcaagattcagtgctgttttaccatgcctatgacaactacatgacttatgcattccctcatgatgaattgaagcctcttactaaaagtttcacggactcgcttagtgagcttggcaatttaaatcttgaacacttgccacaggattatagtggatccgcgttgacactggttgagtcattatcaagtcttgttgtcttaggtaacctcacagagtttgagagaggagttctctggctttcagaaaatctgacatttgatgttgatgctcggattaatctttttgagtgtaacataagacttcttggggggcttatttctgctcatattcttgcaaaagactacagcagccagtttaagcatgggctgtatcaagatcaattactacgtcttgctgaaagtttaggcaatcgttttctaccggcatttgagacacctactggattgccgtattcatggattaatcttaagtatggggtgatggaaaatgaaacaactgaaacaagcacatcagggtgtggctcccttatacttgaaatgggtgtgttgtcacgtttgactggtgattctagatatgaagctgcagctcttcgtgctctccgcaagttatggagcatgagaagttcactgaatctagtaggcaccacacttgatgtttttactggcaagtggattcagtattcatccggaattggtgctggtgttgattcattttatgagtatctgattaaagcatatattcttttcggaagtgatgagtactgggatatgtttcattcagcttatcttgcggtgcagaagtacttccgacatggtccatggtatcatgaggctgatatgaggactggagaagcaacgcactggcagctaactagccttcaggctttctggccaggtcttcagacacttcttggagacgtaactgctgcaaatctatcacaccgtgagttttacaatatatggcaaagatttggtgtgctacctgaaagatatcttttggactatggaatgttgcatcctacagagaagtactatcccttgcgtcctgagtttgctgagtcaacattttatctttatcaagctactaaaggtgcacccaatacacaccagaaggatatattcgttttatcttcatccagctctcatgttttcatctagggttgatgtcctattgagctcatcatatatgacttacttgttctttgtagtcatgccagttttcttattatagaaacacttaagtcacccactcacaagttttactaacttctctttttttcccctctccatcccttgatttctgaaacacttctcttatagatccttggtacctagaagtgggtgaaaccattgtgaggtcacttaattactatactaaagtggatggaggttttgctagcatcagagatgtttcaacaatgaaacttgaagatcaccagcacagcttctttctttcagaaacgtgcaaatatctttttcttctgtatgatgattcattcttgaggaatcaaaattacatatttacaacagagggtcatccccttccaataagaagcacgtggcatgagaaatttcctgcagcatatgttcccagcaattggacatctgttaaggatgagatccaaccaattcgcgcgagcgcattatcgtctcaagtttgtcccgagacgattttcggaagaagtgttggtaccccatgggagagtgcgtgccatgttccagatgcgcacgctagccacagatgcaggactgacgatgactgtggaatagaagcaataacatgcaagaagaggacctgcagtatggctggctactgcggcttatttttttataatggaaacaagagttccggctttagcatgataatgcgtacagccaatacaagtcgattattacaattaagaactgctgcatgaatagtgatactaactcaaaggaactaaattacaatactatgactaacactagtcatactcaattcttgaatttgagcgccatccatggtttgcgaagacttccatcgccaccacttccaaaacttgcgaagcaatgaggatttgttgttgcgattcctccttttgtagcagtctccagaatcttaaccagtgagtacatctgaaaataacctgcacaattgatggaattggtttatgattaaaagccacctcatttcgactgagccaaatagcccaaaataaagcagctattccagagagtaaaacttttttataccccggacccctatttgttccccaagacccgataatatgattaatgctaacgggcatttctaattttaaggcaaagtaaattactctccatatgcttttg

SEQ ID NO: 51442 - DNA, 2199 bp, Zea Mays
cttttgtattgttgccgctctcaagattcagtgctgttttaccatgcctatgacaactacatgacttatgcattccctcatgatgaattgaagcctcttactaaaagtttcacggactcgcttagtgagcttggcaatttaaatgtattaaagtattgacaactataaggattttggtctgtattatataaatttaaggtaccacaacttaatgttacccatgattccctttttctagcttgaacacttgccacaggattatagtggatccgcgttgacactggttgagtcattatcaaggtaacctcacagagtttgagagaggagttctctggctttcagaaaatctgacatttgatgttgatgctcggattaatctttttgagtgtaacataagacttcttggggggcttatttctgctcatattcttgcaaaagactacagcagccagtttaagcatgggctgtatcaagatcaattactacgtcttgctgaaagtttaggcaatcgttttctaccggcatttgagacacctactggattgccgtattcatggattaatcttaagtatggggtgatggaaaatgaaacaactgaaacaagcacatcagggtgtggctcccttatacttgaaatgggtgtgttgtcacgtttgactggtgattctagatatgaagctgcagctcttcgtgctctccgcaagttatggagcatgagaagttcactgaatctagtaggcaccacacttgatgtttttactggcaagtggattcagtattcatccggaattggtgctggtgttgattcattttatgagtatctgattaaagcatatattcttttcggaagtgatgagtactgggatatgtttcattcagcttatcttgcggtgcagaagtacttccgacatggtccatggtatcatgaggctgatatgaggactggagaagcaacgcactggcagctaactagccttcaggctttctggccaggtcttcagacacttcttggagacgtaactgctgcaaatctatcacaccgtgagttttacaatatatggcaaagatttggtgtgctacctgaaagatatcttttggactatggaatgttgcatcctacagagaagtactatcccttgcgtcctgagtttgctgagtcaacattttatctttatcaagctactaaagatccttggtacctagaagtgggtgaaaccattgtgaggtcacttaattactatactaaagtggatggaggttttgctagcatcagagatgtttcaacaatgaaacttgaagatcaccagcacagcttctttctttcagaaacgtgcaaatatctttttcttctgtatgatgattcattcttgaggaatcaaaattacatatttacaacagagggtcatccccttccaataagaagcacgtggcatgagaaatttcctgcagcatatgttcccagcaattggacatctgttaaggatgagatccaaccaattcgcgcgagcgcattatcgtctcaagtttgtcccgagacgattttcggaagaagtgttggtaccccatgggagagtgcgtgccatgttccagatgcgcacgctagccacagatgcaggactgacgatgactgtggaatagaagcaataacatgcaagaagaggacctgcagtatggctggctactgcggcttatttttttataatggaaacaagagttccggctttagcatgataatgcgtacagccaatacaagtcgattattacaattaagaactgctgcatgaatagtgatactaactcaaaggaactaaattacaatactatgactaacactagtcatactcaattcttgaatttgagcgccatccatggtttgcgaagacttccatcgccaccacttccaaaacttgcgaagcaatgaggatttgttgttgcgattcctccttttgtagcagtctccagaatcttaaccagtgagtacatctgaaaataacctgcacaattgatggaattggtttatgattaaaagccacctcatttcgactgagccaaatagcccaaaataaagcagctattccagagagtaaaacttttttataccccggacccctatttgttccccaagacccgataatatgattaatgctaacgggcatttctaattttaaggcaaagtaaattactctccatatgcttttg

SEQ ID NO: 51443 - DNA, 2160 bp, Zea Mays
agagagaggctaatgctatgctatatgctacgtgtataaatcagggcaagagtggtcgctcccccggtggtggactggtggcctggcctcacaagtcacaaccggctgatagcagcagagcgatcaaaagtgaagctaacaagcgagaaaaggaaacacctacttctctcgtctagccacttccatccgtctctagattctagtcgcccttcaacactagctagcctgaaatcaagtgcaggctcgccagctgtggccactgagaagtgacggaaggaagacaagcagctcgccggccggccgggcgccccgtgtgcccccgttctacgagggttgaagtgaagcttcgtagtacgtagtactccatatagcagctgagctcccacttcggagctccatccatcgttagctcccgctgctgctagctggttcgaggcctcctcaagcagcttcttcgtttctgctgtctgcaatggaggagcagctcagcccgctggccgtgacgcacctgctccagcacacgctgcgcagcctctgcggccacgacgacgcgcagtgggtgtacgccgtcttctggcggatcctccccagaaactacccgcccccaaaatgggatctccagggcggcatatacgaccggacaagagggaacaggaggaactggatcctggcatgggaggatggattctgcaacttcgcagcctctgcctgtgaccacgagggcgcagctgctcctgccgccgccgccgcctcctcctcctacacggcggagtgtgctgctgccgggcaggaggccgccaagggcctgcagcctgagctcttcttcaagatgtcccacgacatctacaactacggtgaagggttgatagggaaagtggcagccgaccacagccacaagtgggtgttccaggaggcccaggagcacgagatcaacctcatctcctcctggagcaaccctgccgactctcatccgaggacatgggaggctcagttcaagtctggcatcaagaccatcgctctgatcgccgtcagagaaggcgtcgtgcagcttggctccatgaagaaggtacaccccgccgacactgttctacgcccactccactcagccactgcactgcagctagcgtgacttggtggtgcgtgcatgcatgatttctcgcctcgcgtgcatgcacgcacgacaagacgtacacactaatgtgtacctgcgttgtacgacatcgtgcggcgtgtgtgttgctgcgtgtgctgctgtttgacgaattgctgcgcgtgcatgttttgctcgctgcgccgtatacgtacgcgcgcgcgcaggtggcggaggacctgagctacgtggtgatgctgcgccggaagttcggctacctggagagcatcccgggggtgctgctgccgcacccgtcgtcggccgcgttcccggcgggcgccatcgctggccccgccgccgcagacgcggcctgcagctggccgcctggactcgtcatgccgccgccggtggagctctacgacccctacgcccagtcagcggccgcggcggcgcagatgcacatcgtaccgtcgatgagcagcctggaggcgctgctgtcgaagctgccgtcggtcgaccctgcggcggccgcgatggccagcaaagaggagatggacgccgtggagcacggcgagcgccacggcatggccgacgtagtggccgcagggagcggcggcgagagcaccagcgttgctgccgccgccgcagtatcttactacgtgaacgtggccaagcccagcgagggattctagtccgtctccgactctccgtctcaagttggtgcacgtacgtacgcatgcgcctagctagtgggcgtggtagttgcgacgtctctttcctggagcgcgccgcgctgcagcatgattactctacatggaaccaatcatgtgtcgtgctctgtactacgtgtccttggagtagccgtacctcgacgtacgtacgtacgtgcgtgtactgtacccgatcaattggtcgttagataaggtcggtcgacagaggcacgtacgtagctagcttgtagtacattcagtgtggtcgatcggtatatatattgaatgttgtatgtatgcgttctgtgatgcagtgctagcatcacctaatcaaaagacatggcatgcactctactacaa

SEQ ID NO: 51444 - DNA, 2162 bp, Zea Mays
cgtataaaatctcagaaggttcaacttcaacaaaagatcaagcaagagtctgaacagtttaggtcttggaaggctgcccgtgaaaaggaagtacttcagctcaagaaggaagggagacgaaatgaatatgagatgcacaagctcttggccttaaatcagaggcagaagatggtcttacagaggaaaactgaggaagcagctgctgctacaaaaagattgaaggagttgctggaagcaaagaagtcatcacgggaaacatatggcagtgcaaatggttcggggatgcaggccttaatacgagctattgaggatgaactagaagtcactgtaagagcacacgaattgcgctcatattacgagcgacaaatgcaagagagagcagcaatatccaaggaaatagcaaaactaaaggaggaatcaaagcacaagatcagaagcagaggagcgggagcgtgtattcaatggtaaaggtagatggtacaatgtcaggtccctcccagaggcaaagaatataatgaattaccttttccagttagcatcatctgcaaggtctcaagtactggataaagaagtaatttgtaatgaaaaagaacacaccattactgaattgaaggaaaaggtggttgtgcttaatggtggaattaggcagttagaaacacaagtgagggatctaaggagccaaaatacacagcttttcactgcattgaacaatgcaaagaaatctgctaggtcgaatggcactggatttgctcagcgtaagagtgttcgagcttcccagcattttggttatagtaaggacaacttcaattgggtggatgatatggacatttcagacagtgagcactcggatgagttagagaatatgagtgatggatccgattcagactgggtacagtcgaccaggaaagccaaaaaacaccagagaagagtgtctagccattcaaatcctaacctggattgtcaaaatacacaaggcaatgcagaaccagagaagccctcagatgaaaagtgcattttgcccaaatatatttcatcagacggctgttcatgctcaaaatcctcctcatgcaagaccaacaaatgcgagtgcagaggctcaggtgcacaatgcggtgcaggctgtggttgtaaggattccaaatgttctaacagggattcttctatagaaaaagccaatcagggagccatgcttcttcagaacgcgttttctgagaaggattcccaagatgcaaagccaaggaagcctttgattaacattggtaataatatggttaaccaaactgccgagacaaagaagcccaggaaaaactggcgcaagtcgacaattcaactcgtcccaggacctctcctgccgtccgagccagtggccaccgaagctgcccctcgggacagagccgacattcccctcaagctaccgagagccatgtcctcggtgactcctgtggagagcaaccctcctcccctcacagaccgcaatgctgccaaaccggacgaatcagtgagcaccggcagcaagaatagcaccggagctgcagtcacgagggcaccgtctcagctgagaaaaaacgcaaccaccgagaaggagaaccagttgcgataatccgattgctgacatgcagtatccgtgtcgcttaaggccttgttcgtttgtgccggattggtgggtcggaacgattcgtaatcggattgcttctctaatttatataaactttgattagctggaacgattccgggtgcaatccgacacaaacgaacaaggcctaagccttctgtttaacagtggtcagtgggggaggctgcctcggcgtcctttggagtggcatgtagactctggaagggctggcgctgtggggaatgacgtgttctgtggaaagccttagctctgctttggctggaatgctaccttgtataatggaaaagtaacatgctggattaagctatgtcagtctcgtaaatggtctccgttcatattgaacatactgaggaaatcaatctgcgcatctgtatgcttaggctggtagaggtgcgattggtacaaggacatgccactggcaatctgtgcatctgtatgcttagagtggtagaggtgctattggtaaatagggtatgccggtcaatctgtgcatctgtatgcttatactggtagagatactgaatggtct

SEQ ID NO: 51445 - DNA, 1127 bp, Zea Mays
aacacctgcgcgaagtctgccaaagacgacgccatgctcgtgagacgcgacaccccccccccccccccccccccccacgcgttgcctgcctccaaacccgcgacgcacatcgttaggatttggtagccgcaatgtcagcagacctgctttgcgatccgctcgccgccgctgtctccttccttccgtctctcgccaacaacgtctcattctccccatctcctttgccacatatgcggttccagcaacccgttcccagagaagcgacccccgccctatctcctctgactgggcgacctcgcctattcctcgcaaaccatgccgtggtgagcgtgcggtgcgataaaggcaattgccacgacggcacggccgcagaagcggaccagaccctcatccggtggcggcacgagcgcgcatcgcagtagcagcagccacagcgacgacggggcggagggtaaaagaggcaaggcttctccagtttttcgaggttggagaccgtatgctcgagggtgccgttctcgatggtctcctcctccaacagcgcggatgtgtagatattagccacgacctcggtcgcggcgtggagcgaagcctggagaggtccccgcggtagcggggcgtgagcagacgaagggaaggcagcccctgcgccgcgtgggaggaggaggcagatcggggagctgcgcttccagctagagctgatttggtggacatggaattagagtggatctatgtgggagcaatccttccctatttaaatttgaatagagaggggattactttctcatgaatcacttcaatttcatgtccaccaaaccagcccttcagtgacgacaataatctgataatggtgttgagctcagtttcactactagcagacgaatttcatgcgatagaagacgagaacattctatagaacaatctgctaatgctcttgttctcattttttctgattttgcttgaatatgtgtattttctttgtgcaattcggagaaagtgtcatccacagtcctgttggcgttgttgtgtcttttaatatcttggcgccgctgtgtcttttaagattctcacatgtagcaataattcaagcatattggtataatgctgggaacaaggtatcgattagcctt

SEQ ID NO: 51446 - DNA, 2420 bp, Zea Mays
cacggttctgccatcgcgcgattcccctcttccatcccgattcctccgcccgtgactccccgcgcccgcagcccccgccgccgtcctcgcgacctgcctaggacagctgtcacgcccgcaaatcacgtgaccatgcccttccatgtcctcgcgtcctccactccgcccgcgattcccctccccgcacccgcagcccccgccgtcgtcctcgcggccagccgaggacagccaccgcgcccgcaaatcacacgaccatgcccttccatgcccgcaaatcacgtcaccccttccatccatggcagtcgcgctccctctgcgcccttccatccatggtcgcggatccctacgcgccgcgattcttcccatacgctccctctgcgcccttccatccatggccgcggatccccgatgttgagatctgggagctgaagctggagatctcgcggatgcgggtgcggctgacggcggacgacggacggcgcaagaattgcggcggccggagctcccagtgctccgacggcaaggcccgcaggcggtagaaggcatccttcgcctatgactgatgcttcgctgctggcgtcgacagtggaggcgcgacaggcggtgatcgtggatggatgcggtctcagcgtctggaggatcggtcggagctaagcagggacggtggctgctgacagctgagtgatacgtgtatttctaggaagatcaagcccagagctgtcgcagagccagaagtgcatctacttccacggcaccgtcagcaaggacctcctcacacacaagttggtcatccagctctctaggaagatcaaggacgacatatgaagactggagtactttgaagtttgatgaacaacaaggacatcctcacgcacaagtttgatgaacagtcaacaaaattcttgagccagttcactccaacccaatgggacaaggatcagtggcatcctttcatggggccactgcggtccatccaagtgttgttcatttgtgttgtcttcatgatcgtggagatcaacacattcttccttaagcttgtgtcctgttgccgagttcctcaaaaggacaaagtcgttactgtggttcagtctctacttgaatgatattagtgacaagcatgctcggactaaccaacgaaaaaggtgaagtgggatggtataccatttgcaattgacatttatggtttttgctacgctggcactcagtgtttccaaatatctattagtcaatgtgcgatcgtaccaaattcaacagggctctctacatatggtatgtataactatctcaatttgaactgcattctggtgggagtcgctcttattgtttagtaatcatttttctcaatgttatgtctaaccgtgttattcaattttgcaatatgcacggcaatttatggtgctatatctattataggctacctcatgtttggagacaagatgctctcataaataactttcaatcttctgaaagattcatttgcagcaaaagttgcacgatggaccacgataactattattgtcggtttctctgattcaattaagtgggaacccttggtagtgattcaattaagtgagaagtgagaaccctcattgtgctatttttttgtttcaggtgatcattcctttcacaaagtatccttacacatcttagttatcaactctatattctttagtgataaaaccattagcttagagtatggaagggttgtgtccagcaaggtttatgacggatagtcttcgctgttatgctgcgtactcgatgtgttgcctttctcctaccattctttgggttgttatctatctttgtagccgaagaaacaatcctgagaaagaatggaaagctccttggctaggaataatgtttctaagtggaatcacctgggttatgcgagaagcacatcaatggattccactggtcctctgttagctggtaggagaagtagcagacatggctcaagtgagatgggggactgcatattcagctcaatgagacattttcttcagttggcgaatcaattactaggagaatttgttagatattaagattaatagtaacatgtattaattcaattttatataatcgttgtgcaccaacattttatttgaaagggagaaataaatcctagcaaaattgactatgggagaagggatataggaacaaaaatggaatatgggagagggaacaaactcatcggcctatgcgccttgattagaatgtctcctaaaagttttaggtattgaaaatatgataggacatttattgtaatatgtttattttctgaaatactaattttgatgtatagaatattgacaaaatcttcatgtcagtttcccttcccaagtaagaatagagcaatgcacttgttctgcccgtaaggtggttgtgtgataagtcaatttactccagtgcttgaagcttgc

SEQ ID NO: 51447 - DNA, 2237 bp, Zea Mays
ctgccatcgcgcgattcccctcttccatcccgattcctccgcccgtgactccccgcgcccgcagcccccgccgccgtcctcgcgacctgcctaggacagctgtcacgcccgcaaatcacgtgaccatgcccttccatgtcctcgcgtcctccactccgcccgcgattcccctccccgcacccgcagcccccgccgtcgtcctcgcggccagccgaggacagccaccgcgcccgcaaatcacacgaccatgcccttccatgcccgcaaatcacgtcaccccttccatccatggcagtcgcgctccctctgcgcccttccatccatggtcgcggatccctacgcgccgcgattcttcccatacgctccctctgcgcccttccatccatggccgcggatccccgatgttgagatctgggagctgaagctggagatctcgcggatgcgggtgcggctgacggcggacgacggacggcgcaagaattgcggcggccggagctcccagtgctccgacggcaaggcccgcaggcggtagaaggcatccttcgcctatgactgatgcttcgctgctggcgtcgacagtggaggcgcgacaggcggtgatcgtggatggatgcggtctcagcgtctggaggatcggtcggagctaagcagggacggtggctgctgacagctgagtgatacgtgtatttctaggaagatcaagcccagagctgtcgcagagccagaagtgcatctacttccacggcaccgtcagcaaggacctcctcacacacaagttggtcatccagctctctaggaagatcaaggacgacatatgaagactggagtactttgaagtttgatgaacaacaaggacatcctcacgcacaagtttgatgaacagtcaacaaaattcttgagccagttcactccaacccaatgggacaaggatcagtggcatcctttcatggggccactgcggtccatccaagtgttgttcatttgtgttgtcttcatgatcgtggagatcaacacattcttccttaagcttgtgtcctgttgccgagttcctcaaaaggacaaagtcgttactgtggttcagtctctacttgaatgatattagtgacaagcatgctcggactaaccaacgaaaaaggtgaagtgggatggtataccatttgcaattgacatttatggtttttgctacgctggcactcagtgtttccaaatatctattagtcaatgtgcgatcgtaccaaattcaacagggctctctacatatggtatgtataactatctcaatttgaactgcattctggtgggagtcgctcttattgtttagtaatcatttttctcaatgttatgtctaaccgtgttattcaattttgcaatatgcacggcaatttatggtgctatatctattataggctacctcatgtttggagacaagatgctctcataaataactttcaatcttctgaaagattcatttgcagcaaaagttgcacgatggaccacgataactattattgtcggtttctctgattcaattaagtgggaacccttggtagtgattcaattaagtgagaagtgagaaccctcattgtgctatttttttgtttcagggttgttatctatctttgtagccgaagaaacaatcctgagaaagaatggaaagctccttggctaggaataatgtttctaagtggaatcacctgggttatgcgagaagcacatcaatggattccactggtcctctgttagctggtaggagaagtagcagacatggctcaagtgagatgggggactgcatattcagctcaatgagacattttcttcagttggcgaatcaattactaggagaatttgttagatattaagattaatagtaacatgtattaattcaattttatataatcgttgtgcaccaacattttatttgaaagggagaaataaatcctagcaaaattgactatgggagaagggatataggaacaaaaatggaatatgggagagggaacaaactcatcggcctatgcgccttgattagaatgtctcctaaaagttttaggtattgaaaatatgataggacatttattgtaatatgtttattttctgaaatactaattttgatgtatagaatattgacaaaatcttcatgtcagtttcccttcccaagtaagaatagagcaatgcacttgttctgcccgtaaggtggttgtgtgataagtcaatttactccagtgcttgaagcttgc

SEQ ID NO: 51448 - DNA, 2279 bp, Zea Mays
gcgcgattcccctcttccatcccgattcctccgcccgtgactccccgcgcccgcagcccccgccgccgtcctcgcgacctgcctaggacagctgtcacgcccgcaaatcacgtgaccatgcccttccatgtcctcgcgtcctccactccgcccgcgattcccctccccgcacccgcagcccccgccgtcgtcctcgcggccagccgaggacagccaccgcgcccgcaaatcacacgaccatgcccttccatgcccgcaaatcacgtcaccccttccatccatggcagtcgcgctccctctgcgcccttccatccatggtcgcggatccctacgcgccgcgattcttcccatacgctccctctgcgcccttccatccatggccgcggatccccgatgttgagatctgggagctgaagctggagatctcgcggatgcgggtgcggctgacggcggacgacggacggcgcaagaattgcggcggccggagctcccagtgctccgacggcaaggcccgcaggcggtagaaggcatccttcgcctatgactgatgcttcgctgctggcgtcgacagtggaggcgcgacaggcggtgatcgtggatggatgcggtctcagcgtctggaggatcggtcggagctaagcagggacggtggctgctgacagctgagtgatacgtgtatttctaggaagatcaagcccagagctgtcgcagagccagaagtgcatctacttccacggcaccgtcagcaaggacctcctcacacacaagttggtcatccagctctctaggaagatcaaggacgacatatgaagactggagtactttgaagtttgatgaacaacaaggacatcctcacgcacaagtttgatgaacagtcaacaaaattcttgagccagttcactccaacccaatgggacaaggatcagtggcatcctttcatggggccactgcggtccatccaagtgttgttcatttgtgttgtcttcatgatcgtggagatcaacacattcttccttaagcttgtgtcctgttgccgagttcctcaaaaggacaaagtcgttactgtggttcagtctctacttgaatgatattagtgacaagcatgctcggactaaccaacgaaaaaggtgaagtgggatggtataccatttgcaattgacatttatggtttttgctacgctggcactcagtgtttccaaatatctattagtcaatgtgcgatcgtaccaaattcaacagggctctctacatatggtatgtataactatctcaatttgaactgcattctggtgggagtcgctcttattgtttagtaatcatttttctcaatgttatgtctaaccgtgttattcaattttgcaatatgcacggcaatttatggtgctatatctattataggctacctcatgtttggagacaagatgctctcataaataactttcaatcttctgaaagattcatttgcagcaaaagttgcacgatggaccacgataactattattgtcggtttctctgattcaattaagtgggaacccttggtagtgattcaattaagtgagaagtgagaaccctcattgtgctatttttttgtttcaggtgatcattcctttcacaaagtatccttacacatcttagttatcaactctggttgttatctatctttgtagccgaagaaacaatcctgagaaagaatggaaagctccttggctaggaataatgtttctaagtggaatcacctgggttatgcgagaagcacatcaatggattccactggtcctctgttagctggtaggagaagtagcagacatggctcaagtgagatgggggactgcatattcagctcaatgagacattttcttcagttggcgaatcaattactaggagaatttgttagatattaagattaatagtaacatgtattaattcaattttatataatcgttgtgcaccaacattttatttgaaagggagaaataaatcctagcaaaattgactatgggagaagggatataggaacaaaaatggaatatgggagagggaacaaactcatcggcctatgcgccttgattagaatgtctcctaaaagttttaggtattgaaaatatgataggacatttattgtaatatgtttattttctgaaatactaattttgatgtatagaatattgacaaaatcttcatgtcagtttcccttcccaagtaagaatagagcaatgcacttgttctgcccgtaaggtggttgtgtgataagtcaatttactccagtgcttgaagcttgc

SEQ ID NO: 51449 - DNA, 2143 bp, Zea Mays
cgcgattcccctcttccatcccgattcctccgcccgtgactccccgcgcccgcagcccccgccgccgtcctcgcgacctgcctaggacagctgtcacgcccgcaaatcacgtgaccatgcccttccatgtcctcgcgtcctccactccgcccgcgattcccctccccgcacccgcagcccccgccgtcgtcctcgcggccagccgaggacagccaccgcgcccgcaaatcacacgaccatgcccttccatgcccgcaaatcacgtcaccccttccatccatggcagtcgcgctccctctgcgcccttccatccatggtcgcggatccctacgcgccgcgattcttcccatacgctccctctgcgcccttccatccatggccgcggatccccgatgttgagatctgggagctgaagctggagatctcgcggatgcgggtgcggctgacggcggacgacggacggcgcaagaattgcggcggccggagctcccagtgctccgacggcaaggcccgcaggcggtagaaggcatccttcgcctatgactgatgcttcgctgctggcgtcgacagtggaggcgcgacaggcggtgatcgtggatggatgcggtctcagcgtctggaggatcggtcggagctaagcagggacggtggctgctgacagctgagtgatacgtgtatttctaggaagatcaagcccagagctgtcgcagagccagaagtgcatctacttccacggcaccgtcagcaaggacctcctcacacacaagttggtcatccagctctctaggaagatcaaggacgacatatgaagactggagtactttgaagtttgatgaacaacaaggacatcctcacgcacaagtttgatgaacagtcaacaaaattcttgagccagttcactccaacccaatgggacaaggatcagtggcatcctttcatggggccactgcggtccatccaagtgttgttcatttgtgttgtcttcatgatcgtggagatcaacacattcttccttaagcttgtgtcctgttgccgagttcctcaaaaggacaaagtcgttactgtggttcagtctctacttgaatgatattagtgacaaggtgatcattcctttcacaaaatattctttagtgataaaaccattagcttagagtatggaagggttgtgtccagcaaggtttatgacggatagtcttcgctgttatgctgcgtactcgatgtgttgcctttctcctaccattctttggtacataactaacacattatgcttaaacatggagtcattatcttataaattctttttctatcactaatcattgttttggttcctatttggcataaattgtctaaatacttataaatgtgttgtcctatattttttgttctggacattgtttggttcccctgcttccagaatttatatgacttgtgaattttaaatgaaagaaaagaaaggaaaattatgaatcatggattattgattcatgccataacattgacttttgtgcagggttgttatctatctttgtagccgaagaaacaatcctgagaaagaatggaaagctccttggctaggaataatgtttctaagtggaatcacctgggttatgcgagaagcacatcaatggattccactggtcctctgttagctggtaggagaagtagcagacatggctcaagtgagatgggggactgcatattcagctcaatgagacattttcttcagttggcgaatcaattactaggagaatttgttagatattaagattaatagtaacatgtattaattcaattttatataatcgttgtgcaccaacattttatttgaaagggagaaataaatcctagcaaaattgactatgggagaagggatataggaacaaaaatggaatatgggagagggaacaaactcatcggcctatgcgccttgattagaatgtctcctaaaagttttaggtattgaaaatatgataggacatttattgtaatatgtttattttctgaaatactaattttgatgtatagaatattgacaaaatcttcatgtcagtttcccttcccaagtaagaatagagcaatgcacttgttctgcccgtaaggtggttgtgtgataagtcaatttactccagtgcttgaagcttgc

SEQ ID NO: 51450 - DNA, 1931 bp, Zea Mays
cgcgattcccctcttccatcccgattcctccgcccgtgactccccgcgcccgcagcccccgccgccgtcctcgcgacctgcctaggacagctgtcacgcccgcaaatcacgtgaccatgcccttccatgtcctcgcgtcctccactccgcccgcgattcccctccccgcacccgcagcccccgccgtcgtcctcgcggccagccgaggacagccaccgcgcccgcaaatcacacgaccatgcccttccatgcccgcaaatcacgtcaccccttccatccatggcagtcgcgctccctctgcgcccttccatccatggtcgcggatccctacgcgccgcgattcttcccatacgctccctctgcgcccttccatccatggccgcggatccccgatgttgagatctgggagctgaagctggagatctcgcggatgcgggtgcggctgacggcggacgacggacggcgcaagaattgcggcggccggagctcccagtgctccgacggcaaggcccgcaggcggtagaaggcatccttcgcctatgactgatgcttcgctgctggcgtcgacagtggaggcgcgacaggcggtgatcgtggatggatgcggtctcagcgtctggaggatcggtcggagctaagcagggacggtggctgctgacagctgagtgatacgtgtatttctaggaagatcaagcccagagctgtcgcagagccagaagtgcatctacttccacggcaccgtcagcaaggacctcctcacacacaagttggtcatccagctctctaggaagatcaaggacgacatatgaagactggagtactttgaagtttgatgaacaacaaggacatcctcacgcacaagtttgatgaacagtcaacaaaattcttgagccagttcactccaacccaatgggacaaggatcagtggcatcctttcatggggccactgcggtccatccaagtgttgttcatttgtgttgtcttcatgatcgtggagatcaacacattcttccttaagcttgtgtcctgttgccgagttcctcaaaaggacaaagtcgttactgtggttcagtctctacttgaatgatattagtgacaaggctacctcatgtttggagacaagatgctctcataaataactttcaatcttctgaaagattcatttgcagcaaaagttgcacgatggaccacgataactattattgtcggtttctctgattcaattaagtgggaacccttggtagtgattcaattaagtgagaagtgagaaccctcattgtgctatttttttgtttcagggttgttatctatctttgtagccgaagaaacaatcctgagaaagaatggaaagctccttggctaggaataatgtttctaagtggaatcacctgggttatgcgagaagcacatcaatggattccactggtcctctgttagctggtaggagaagtagcagacatggctcaagtgagatgggggactgcatattcagctcaatgagacattttcttcagttggcgaatcaattactaggagaatttgttagatattaagattaatagtaacatgtattaattcaattttatataatcgttgtgcaccaacattttatttgaaagggagaaataaatcctagcaaaattgactatgggagaagggatataggaacaaaaatggaatatgggagagggaacaaactcatcggcctatgcgccttgattagaatgtctcctaaaagttttaggtattgaaaatatgataggacatttattgtaatatgtttattttctgaaatactaattttgatgtatagaatattgacaaaatcttcatgtcagtttcccttcccaagtaagaatagagcaatgcacttgttctgcccgtaaggtggttgtgtgataagtcaatttactccagtgcttgaagcttgc

SEQ ID NO: 51451 - DNA, 2371 bp, Zea Mays
cgcgattcccctcttccatcccgattcctccgcccgtgactccccgcgcccgcagcccccgccgccgtcctcgcgacctgcctaggacagctgtcacgcccgcaaatcacgtgaccatgcccttccatgtcctcgcgtcctccactccgcccgcgattcccctccccgcacccgcagcccccgccgtcgtcctcgcggccagccgaggacagccaccgcgcccgcaaatcacacgaccatgcccttccatgcccgcaaatcacgtcaccccttccatccatggcagtcgcgctccctctgcgcccttccatccatggtcgcggatccctacgcgccgcgattcttcccatacgctccctctgcgcccttccatccatggccgcggatccccgatgttgagatctgggagctgaagctggagatctcgcggatgcgggtgcggctgacggcggacgacggacggcgcaagaattgcggcggccggagctcccagtgctccgacggcaaggcccgcaggcggtagaaggcatccttcgcctatgactgatgcttcgctgctggcgtcgacagtggaggcgcgacaggcggtgatcgtggatggatgcggtctcagcgtctggaggatcggtcggagctaagcagggacggtggctgctgacagctgagtgatacgtgtatttctaggaagatcaagcccagagctgtcgcagagccagaagtgcatctacttccacggcaccgtcagcaaggacctcctcacacacaagttggtcatccagctctctaggaagatcaaggacgacatatgaagactggagtactttgaagtttgatgaacaacaaggacatcctcacgcacaagtttgatgaacagtcaacaaaattcttgagccagttcactccaacccaatgggacaaggatcagtggcatcctttcatggggccactgcggtccatccaagtgttgttcatttgtgttgtcttcatgatcgtggagatcaacacattcttccttaagcttgtgtcctgttgccgagttcctcaaaaggacaaagtcgttactgtggttcagtctctacttgaatgatattagtgacaagaggtcctcaaaatctacaccaagttatgtcagggactatatctccactcaactcattttaaccttgtacatttcaatcaaatccaaatacatgtgaaataaatgtagtaggttactctgaccagtgttgcgctcgcgcgccagcatgctcggactaaccaacgaaaaaggtgaagtgggatggtataccatttgcaattgacatttatggtttttgctacgctggcactcagtgtttccaaatatctattagtcaatgtgcgatcgtaccaaattcaacagggctctctacatatggtatgtataactatctcaatttgaactgcattctggtgggagtcgctcttattgtttagtaatcatttttctcaatgttatgtctaaccgtgttattcaattttgcaatatgcacggcaatttatggtgctatatctattataggctacctcatgtttggagacaagatgctctcataaataactttcaatcttctgaaagattcatttgcagcaaaagttgcacgatggaccacgataactattattgtcggtttctctgattcaattaagtgggaacccttggtagtgattcaattaagtgagaagtgagaaccctcattgtgctatttttttgtttcagggttgttatctatctttgtagccgaagaaacaatcctgagaaagaatggaaagctccttggctaggaataatgtttctaagtggaatcacctgggttatgcgagaagcacatcaatggattccactggtcctctgttagctggtaggagaagtagcagacatggctcaagtgagatgggggactgcatattcagctcaatgagacattttcttcagttggcgaatcaattactaggagaatttgttagatattaagattaatagtaacatgtattaattcaattttatataatcgttgtgcaccaacattttatttgaaagggagaaataaatcctagcaaaattgactatgggagaagggatataggaacaaaaatggaatatgggagagggaacaaactcatcggcctatgcgccttgattagaatgtctcctaaaagttttaggtattgaaaatatgataggacatttattgtaatatgtttattttctgaaatactaattttgatgtatagaatattgacaaaatcttcatgtcagtttcccttcccaagtaagaatagagcaatgcacttgttctgcccgtaaggtggttgtgtgataagtcaatttactccagtgcttgaagcttgc

SEQ ID NO: 51452 - DNA, 2469 bp, Zea Mays
cgcgattcccctcttccatcccgattcctccgcccgtgactccccgcgcccgcagcccccgccgccgtcctcgcgacctgcctaggacagctgtcacgcccgcaaatcacgtgaccatgcccttccatgtcctcgcgtcctccactccgcccgcgattcccctccccgcacccgcagcccccgccgtcgtcctcgcggccagccgaggacagccaccgcgcccgcaaatcacacgaccatgcccttccatgcccgcaaatcacgtcaccccttccatccatggcagtcgcgctccctctgcgcccttccatccatggtcgcggatccctacgcgccgcgattcttcccatacgctccctctgcgcccttccatccatggccgcggatccccgatgttgagatctgggagctgaagctggagatctcgcggatgcgggtgcggctgacggcggacgacggacggcgcaagaattgcggcggccggagctcccagtgctccgacggcaaggcccgcaggcggtagaaggcatccttcgcctatgactgatgcttcgctgctggcgtcgacagtggaggcgcgacaggcggtgatcgtggatggatgcggtctcagcgtctggaggatcggtcggagctaagcagggacggtggctgctgacagctgagtgatacgtgtatttctaggaagatcaagcccagagctgtcgcagagccagaagtgcatctacttccacggcaccgtcagcaaggacctcctcacacacaagttggtcatccagctctctaggaagatcaaggacgacatatgaagactggagtactttgaagtttgatgaacaacaaggacatcctcacgcacaagtttgatgaacagtcaacaaaattcttgagccagttcactccaacccaatgggacaaggatcagtggcatcctttcatggggccactgcggtccatccaagtgttgttcatttgtgttgtcttcatgatcgtggagatcaacacattcttccttaagcttgtgtcctgttgccgagttcctcaaaaggacaaagtcgttactgtggttcagtctctacttgaatgatattagtgacaagaggtcctcaaaatctacaccaagttatgtcagggactatatctccactcaactcattttaaccttgtacatttcaatcaaatccaaatacatgtgaaataaatgtagtaggttactctgaccagtgttgcgctcgcgcgccagcatgctcggactaaccaacgaaaaaggtgaagtgggatggtataccatttgcaattgacatttatggtttttgctacgctggcactcagtgtttccaaatatctattagtcaatgtgcgatcgtaccaaattcaacagggctctctacatatggtgatcattcctttcacaaagtatccttacacatcttagttatcaactctatattctttagtgataaaaccattagcttagagtatggaagggttgtgtccagcaaggtttatgacggatagtcttcgctgttatgctgcgtactcgatgtgttgcctttctcctaccattctttggtacataactaacacattatgcttaaacatggagtcattatcttataaattctttttctatcactaatcattgttttggttcctatttggcataaattgtctaaatacttataaatgtgttgtcctatattttttgttctggacattgtttggttcccctgcttccagaatttatatgacttgtgaattttaaatgaaagaaaagaaaggaaaattatgaatcatggattattgattcatgccataacattgacttttgtgcagggttgttatctatctttgtagccgaagaaacaatcctgagaaagaatggaaagctccttggctaggaataatgtttctaagtggaatcacctgggttatgcgagaagcacatcaatggattccactggtcctctgttagctggtaggagaagtagcagacatggctcaagtgagatgggggactgcatattcagctcaatgagacattttcttcagttggcgaatcaattactaggagaatttgttagatattaagattaatagtaacatgtattaattcaattttatataatcgttgtgcaccaacattttatttgaaagggagaaataaatcctagcaaaattgactatgggagaagggatataggaacaaaaatggaatatgggagagggaacaaactcatcggcctatgcgccttgattagaatgtctcctaaaagttttaggtattgaaaatatgataggacatttattgtaatatgtttattttctgaaatactaattttgatgtatagaatattgacaaaatcttcatgtcagtttcccttcccaagtaagaatagagcaatgcacttgttctgcccgtaaggtggttgtgtgataagtcaatttactccagtgcttgaagcttgc

SEQ ID NO: 51453 - DNA, 1879 bp, Zea Mays
cgcgattcccctcttccatcccgattcctccgcccgtgactccccgcgcccgcagcccccgccgccgtcctcgcgacctgcctaggacagctgtcacgcccgcaaatcacgtgaccatgcccttccatgtcctcgcgtcctccactccgcccgcgattcccctccccgcacccgcagcccccgccgtcgtcctcgcggccagccgaggacagccaccgcgcccgcaaatcacacgaccatgcccttccatgcccgcaaatcacgtcaccccttccatccatggcagtcgcgctccctctgcgcccttccatccatggtcgcggatccctacgcgccgcgattcttcccatacgctccctctgcgcccttccatccatggccgcggatccccgatgttgagatctgggagctgaagctggagatctcgcggatgcgggtgcggctgacggcggacgacggacggcgcaagaattgcggcggccggagctcccagtgctccgacggcaaggcccgcaggcggtagaaggcatccttcgcctatgactgatgcttcgctgctggcgtcgacagtggaggcgcgacaggcggtgatcgtggatggatgcggtctcagcgtctggaggatcggtcggagctaagcagggacggtggctgctgacagctgagtgatacgtgtatttctaggaagatcaagcccagagctgtcgcagagccagaagtgcatctacttccacggcaccgtcagcaaggacctcctcacacacaagttggtcatccagctctctaggaagatcaaggacgacatatgaagactggagtactttgaagtttgatgaacaacaaggacatcctcacgcacaagtttgatgaacagtcaacaaaattcttgagccagttcactccaacccaatgggacaaggatcagtggcatcctttcatggggccactgcggtccatccaagtgttgttcatttgtgttgtcttcatgatcgtggagatcaacacattcttccttaagcttgtgtcctgttgccgagttcctcaaaaggacaaagtcgttactgtggttcagtctctacttgaatgatattagtgacaaggtgatcattcctttcacaaaatattctttagtgataaaaccattagcttagagtatggaagggttgtgtccagcaaggtttatgacggatagtcttcgctgttatgctgcgtactcgatgtgttgcctttctcctaccattctttgggttgttatctatctttgtagccgaagaaacaatcctgagaaagaatggaaagctccttggctaggaataatgtttctaagtggaatcacctgggttatgcgagaagcacatcaatggattccactggtcctctgttagctggtaggagaagtagcagacatggctcaagtgagatgggggactgcatattcagctcaatgagacattttcttcagttggcgaatcaattactaggagaatttgttagatattaagattaatagtaacatgtattaattcaattttatataatcgttgtgcaccaacattttatttgaaagggagaaataaatcctagcaaaattgactatgggagaagggatataggaacaaaaatggaatatgggagagggaacaaactcatcggcctatgcgccttgattagaatgtctcctaaaagttttaggtattgaaaatatgataggacatttattgtaatatgtttattttctgaaatactaattttgatgtatagaatattgacaaaatcttcatgtcagtttcccttcccaagtaagaatagagcaatgcacttgttctgcccgtaaggtggttgtgtgataagtcaatttactccagtgcttgaagcttgc

SEQ ID NO: 51454 - DNA, 1862 bp, Zea Mays
cgcgattcccctcttccatcccgattcctccgcccgtgactccccgcgcccgcagcccccgccgccgtcctcgcgacctgcctaggacagctgtcacgcccgcaaatcacgtgaccatgcccttccatgtcctcgcgtcctccactccgcccgcgattcccctccccgcacccgcagcccccgccgtcgtcctcgcggccagccgaggacagccaccgcgcccgcaaatcacacgaccatgcccttccatgcccgcaaatcacgtcaccccttccatccatggcagtcgcgctccctctgcgcccttccatccatggtcgcggatccctacgcgccgcgattcttcccatacgctccctctgcgcccttccatccatggccgcggatccccgatgttgagatctgggagctgaagctggagatctcgcggatgcgggtgcggctgacggcggacgacggacggcgcaagaattgcggcggccggagctcccagtgctccgacggcaaggcccgcaggcggtagaaggcatccttcgcctatgactgatgcttcgctgctggcgtcgacagtggaggcgcgacaggcggtgatcgtggatggatgcggtctcagcgtctggaggatcggtcggagctaagcagggacggtggctgctgacagctgagtgatacgtgtatttctaggaagatcaagcccagagctgtcgcagagccagaagtgcatctacttccacggcaccgtcagcaaggacctcctcacacacaagttggtcatccagctctctaggaagatcaaggacgacatatgaagactggagtactttgaagtttgatgaacaacaaggacatcctcacgcacaagtttgatgaacagtcaacaaaattcttgagccagttcactccaacccaatgggacaaggatcagtggcatcctttcatggggccactgcggtccatccaagtgttgttcatttgtgttgtcttcatgatcgtggagatcaacacattcttccttaagcttgtgtcctgttgccgagttcctcaaaaggacaaagtcgttactgtggttcagtctctacttgaatgatattagtgacaagcaaaagttgcacgatggaccacgataactattattgtcggtttctctgattcaattaagtgggaacccttggtagtgattcaattaagtgagaagtgagaaccctcattgtgctatttttttgtttcagggttgttatctatctttgtagccgaagaaacaatcctgagaaagaatggaaagctccttggctaggaataatgtttctaagtggaatcacctgggttatgcgagaagcacatcaatggattccactggtcctctgttagctggtaggagaagtagcagacatggctcaagtgagatgggggactgcatattcagctcaatgagacattttcttcagttggcgaatcaattactaggagaatttgttagatattaagattaatagtaacatgtattaattcaattttatataatcgttgtgcaccaacattttatttgaaagggagaaataaatcctagcaaaattgactatgggagaagggatataggaacaaaaatggaatatgggagagggaacaaactcatcggcctatgcgccttgattagaatgtctcctaaaagttttaggtattgaaaatatgataggacatttattgtaatatgtttattttctgaaatactaattttgatgtatagaatattgacaaaatcttcatgtcagtttcccttcccaagtaagaatagagcaatgcacttgttctgcccgtaaggtggttgtgtgataagtcaatttactccagtgcttgaagcttgc

SEQ ID NO: 51455 - DNA, 2261 bp, Zea Mays
cgcgattcccctcttccatcccgattcctccgcccgtgactccccgcgcccgcagcccccgccgccgtcctcgcgacctgcctaggacagctgtcacgcccgcaaatcacgtgaccatgcccttccatgtcctcgcgtcctccactccgcccgcgattcccctccccgcacccgcagcccccgccgtcgtcctcgcggccagccgaggacagccaccgcgcccgcaaatcacacgaccatgcccttccatgcccgcaaatcacgtcaccccttccatccatggcagtcgcgctccctctgcgcccttccatccatggtcgcggatccctacgcgccgcgattcttcccatacgctccctctgcgcccttccatccatggccgcggatccccgatgttgagatctgggagctgaagctggagatctcgcggatgcgggtgcggctgacggcggacgacggacggcgcaagaattgcggcggccggagctcccagtgctccgacggcaaggcccgcaggcggtagaaggcatccttcgcctatgactgatgcttcgctgctggcgtcgacagtggaggcgcgacaggcggtgatcgtggatggatgcggtctcagcgtctggaggatcggtcggagctaagcagggacggtggctgctgacagctgagtgatacgtgtatttctaggaagatcaagcccagagctgtcgcagagccagaagtgcatctacttccacggcaccgtcagcaaggacctcctcacacacaagttggtcatccagctctctaggaagatcaaggacgacatatgaagactggagtactttgaagtttgatgaacaacaaggacatcctcacgcacaagtttgatgaacagtcaacaaaattcttgagccagttcactccaacccaatgggacaaggatcagtggcatcctttcatggggccactgcggtccatccaagtgttgttcatttgtgttgtcttcatgatcgtggagatcaacacattcttccttaagcttgtgtcctgttgccgagttcctcaaaaggacaaagtcgttactgtggttcagtctctacttgaatgatattagtgacaaggttactctgaccagtgttgcgctcgcgcgccagcatgctcggactaaccaacgaaaaaggtgaagtgggatggtataccatttgcaattgacatttatggtttttgctacgctggcactcagtgtttccaaatatctattagtcaatgtgcgatcgtaccaaattcaacagggctctctacatatggtatgtataactatctcaatttgaactgcattctggtgggagtcgctcttattgtttagtaatcatttttctcaatgttatgtctaaccgtgttattcaattttgcaatatgcacggcaatttatggtgctatatctattataggctacctcatgtttggagacaagatgctctcataaataactttcaatcttctgaaagattcatttgcagcaaaagttgcacgatggaccacgataactattattgtcggtttctctgattcaattaagtgggaacccttggtagtgattcaattaagtgagaagtgagaaccctcattgtgctatttttttgtttcagggttgttatctatctttgtagccgaagaaacaatcctgagaaagaatggaaagctccttggctaggaataatgtttctaagtggaatcacctgggttatgcgagaagcacatcaatggattccactggtcctctgttagctggtaggagaagtagcagacatggctcaagtgagatgggggactgcatattcagctcaatgagacattttcttcagttggcgaatcaattactaggagaatttgttagatattaagattaatagtaacatgtattaattcaattttatataatcgttgtgcaccaacattttatttgaaagggagaaataaatcctagcaaaattgactatgggagaagggatataggaacaaaaatggaatatgggagagggaacaaactcatcggcctatgcgccttgattagaatgtctcctaaaagttttaggtattgaaaatatgataggacatttattgtaatatgtttattttctgaaatactaattttgatgtatagaatattgacaaaatcttcatgtcagtttcccttcccaagtaagaatagagcaatgcacttgttctgcccgtaaggtggttgtgtgataagtcaatttactccagtgcttgaagcttgc

SEQ ID NO: 51456 - DNA, 1569 bp, Zea Mays
ccatttcacactgccatttccagaatcaaacagatacactagttttcagataacgatagcaacaggtctcacagatagagtaacatacatagttaatgagtcatgatggcaacaataggtaatgagtagagtaatgatgtcggattgccgcatcagtttgaaactcgccttctggtttttcggtttgatttgagctctttgatgcagtatcgttagggtcggaatcagaattagaacttgcatcgaagctgatgccgtactctaggtccgattccatgatatcatgaatatgcacgtaatcaatgatctgaaggtaaaaaacacaagtgagtagtgacacaagatttatactagtccgggctctcctaaaagataatacccgtccgtggcttcttttttatatttgtctgtgcccccttaggggcatctcccctcccttttatagtcgaaggaaggggttagttacaagaaaaatgaatatagatctcctcctagattaccggatctatctctatctacaactccttatatctcgagtgttgttgttaaaatgcaaaatattcagataagacctccttatcacccaatcttctctccaatgtaggattctagacactcaagtctgagtccgaaccctagaggaatccgagtccgagttactgaaaggatctgatccacgagcagaaccgagttgggcccatagtcttgcttctcgaattgcttgagtgcttggggtacccccgatacatatcattcacggtgtatgtatatactcgttggtaatgataatgacataagatacgaaaaaaatcattgataatgtaccaataaaaatctgataaacaaaaaaacatatatcaataatgacatttggataaaatatctaaagcaaatcaatgaagagatataccggagcactgttgtgcgcctacggcgcaggccggagccacggacgggcacacacgcacccgcgcacggccacgggccgcacaagcaagctgcagcccttaaagcacaggtgctgaactgctaattgttgaaggccagaacctaaaaccgtgaagcgcacacgcaccgcgcacggcacggaagccgcctcacccttgctggagagtacagagaattggagagagggcgacggcgacctgcggctgcagaagctggagaagcgagcagctgcggcgaagagtcgagatcgaaagagccgcgaagaagaggcttctggggtaatgagctgggccaaggtatggctcgggccatacttagccatattaggccatctgccactgagtgaggtctaagaaagggataaatcgaggcaagactttcccccacaaatacagagaggttgattcaaatccgtgacctagtgacttagtgagacaactctcaccactacaccagagctgcccttctaaaagatgaagctataataaaattgaaatagagaacaacatggcacaatccttgggaacatacctagcagtagttcttttgatcaaagaactactgcatttcccggttgcagcaagagcaacactggcagcaatctctgatgtactgaacacc

SEQ ID NO: 51457 - DNA, 6096 bp, Zea Mays
aagcgaaagaaaaaaaatattatttatggaatacactgtgtgtttgaataatgctactcaacaagcaaaataccactctcttctttaatctggtttccattgggtctccttaccctaggtggtctgaccatcatcctttaagttggtttattgcactgattgccgtaagaacaacatttgtttataagataggcctctagcttagttggttagattgtctgattagcactcctcaggtcttgggttcgacaaccgtgggagcgaattttaggccggggttaaaaaaatctcctcatatgtcccacgccaaagacaggtgtaaggtccggacttggtcgcggtcgttctcacatggactacagtaccactgtgtatgggtgagacacgagttcagagtttttctcgacctgcgtgagaaggtcttctttttaattgtaatgccgtgagggcggtcttacccacgcaggtcagttttttaagataggcctaaattacggtaaaccccacttgaaggcctctacaagcttttatggactatgggctacacaatacacacaattacacaaagggtagcagcagcgctatgtgaagggcttttagggaagcatacatttttttagtttgagttgttacctacggataaagaataagctagatttaaggttgccacctggtctacaaaggcatcatattgttataggatttgcttcctctgatcctagatataagtccatctggacttgactgcttgagcacagcacatgaatcattgctagggttaagatgggtggcaagtgcattacattcatcagcaagcagttaagtagggacctggaagaatgaatcaaaaaggtgcattgaagttatcataaacttatatgtggtgtatatgtgtaataccatgtccactcccagaccagcggtacttactcctgtcagccctctagtatcatagatcatccctacagaccaacacaagtcttttgtgcgcactttgtcctcactcatgtgcacccgagaaaacttcccgtcggtcaccatctcagacttgttgtgaggttcttttgagatatgcttccaaaaaaggtgcactttgtttgtataagtattctatcaatcctattaaatattaggctaggatatcataattcatactccttaggagaccgacgtcctcgtcggtgaaccccaagacagaaatggatcaaaggaggggctactaagccagccaatcgtgacgctagtggtatgaagacagatgactggtaccttgtggtgggcaacctgtccaattagctattgttgcctgccgatctagaacctgggcatgggtgtctgttgaccatagtcgtgccatggagtagatggagggcaaccaccagtcagacaactacgtgtcaatgactaacggatagcgcagatgccggacatcagataactatggttaggacgcatactaggacgaggccattggcatattgctcgtgtgttggataaggacatttaatcttttgttgtctttacggatgaaactaaataactagtcactaacaactgagtcgtcaacatggtattttatgtgacatccccgtaaaaacaactaaaaaatagattatcatgttagatgcggacatgactgatgtgtggtggcttacagagtgggacatttgagttagtctagagatctactactacctttaacacacggtggccgggcggggctgcagccccgacagccccctacgaatccgcccctgcgtcacatgggccatatggccgaatccctagcccacaaaccggtgaaaccgcgaggctcggctctataacaccccgtccactcccggaccgatgatacttactcttggtagcctatatagtcttttgtgtttactttgtcctcactcatgttcacccgggaaaacttctcgatcggtcacccatcccaaaattgctctaatccaagcacactgcacacttaacctatatgatctttcgagatatgattccgaaaaagaaaatgtaccttactgttatgagtattctatcaaattctattaagccttggactaagatatcacacaatccacacgggccaggatatcacaatatgggagaaggttcaatcgacttatttttgtacgtcaacaacaataagctccataaattggactgggactgaaatgtcaacataagaggctcgctgaattagcacctaatttattcaacttgatctctagtagaagtgtcaagagaaggacggtggctcaggccctaaataattagggttgggtggttgatgtaagactgtgtccaacagatcatgtatatggtcgtgcaaaacactattttgcattgtagatagcaatgtttacagagtgaagtttgaaataggaggtgtgatagagaatgatataggagagctgctagagatagcctaagtgggggtccttacagtgcaattattggctgagtaccatctatagatgcccaagtgggccgatactaagcatgacacgacccgtagtgcttcggcacggcacgagcacgattcatatagtgccagtgccggcacgacacgagtctagtgccgtgcttcggccgtcaccccgacacgatgggctggctagtggtcagcacgattaggcatggcttagaccaaccagtggtctatagatgtgattgtgaattgtgatttgttatgattttaaacataataaattcactttataatggtataaatcttcaagttttaaaattatatatatagatataatcttaaagatctatattttctgagctcttaaagtgaaatagtgctttggctggcacgagcactattagactgtctccagcaacgtcatctatatccatcctctatatccgtactttacagtctactctaaaaaattacatcctctatatctccttcctctccaacaacatcctctaaatcacatcctctatacacataaatacctatattagagacatttttaatttttgtacatacgtatttgtcatactctcaaatgtattgtacatattttagtcttggtaaaccggttgtttaaagtatttaaatggatagagaaccgtttagagaaattctatatatagaggatccaacagcgtcctctaaatttagaggaccgtttagaggacgttgctggatggagtagaggacgacctcatcctctaaatttagggtacaagaccctttagaggtccttgttggagttagtcttaggtgttagtgtcgtatagtaccggcacgacacgattaggcactatagtgtagtgcctaggccgatggttagacactagtgacggcacgacacgattaataatagtgcttaatagtgtcatgtctaatagtgacagtgtcgtgccgtacggcccgtttggccatttatagcaccatcaaattagggacttagggtatctctagcaacctccctatctcactccctatatcactctctatttcaaacttcactctttaaacaatgcaatctacaatgtaaaacagtgttttggacgtccatatccatgctcgctggagacagccttagtagatgtcccagatcaacaccgatggaaactgtcctcttctggttcctacagcagcaagttggcctaccaagttttttttcttgcggactatcaaattttcctcatggaaataatttggaaaggttgggctccacttaagtgctgattattcgtttggttgcccatcaataatcagtgctcgacggctgatcatcttgccaaacctgggatgattaaagataaacatttagctgtttagaaactagtgtgactggtgataagattattagattaaccagtgtgaaatagggctgtgttttcaggttggcttgtgctaatccgttcatatgatctttatctgtcacactggttgctgcaaatgctacttttcgccacttctactgaatagtttggttgatgtgcaggcggagtggatggcaccagaagtacttcggaatgaacgatcggatgaaaaatgcgatgtttttagctacggagtcatattatgggaactttgtacactactacagccttgggaaggtatgaatgccatgcaagtggttggtgcagttgggtttcagaatcgtcgccttgaaatcccagataacatcgatcctgctgtagcagagataatagtgcaatgctggcatacggatccaaagttgcggccatcatttgcagatatcatggctgcactaaaaccactgttgaagaacttgaccagcaatctagcccctaagagagtgcaacaaacagatgagtgagacaaggaggttgacaaccgcccaacctagaggtgcaacatttcggattggcaaagccatggtaagcttaaggccgcttgccattgatccacattcgaagatcagtgctggtatacccgtgaaagaagacggaggagggctgtgatctatgcaaagaattgtgcagaacagtaatgttttggcactgtggaacgattgaaccaggaactcgtatgggtggcagaccggggcttttgttcataccgtccctttttttttcttttgttgcctcaccgaatggtgggtattattatgtgtaaggtggcgattggttcacgaaacgtaatgtaaatgacaacggtaatgattcatgtttgattaccagcggtaacaagtttgaataggactatatcagtttctagggtgatatatgattacattacacataaacaaatatggtttacgttatctgttaccgttgaccttacaaatacgtgaacctgccaacctgaaaagagagggaaaggttgccctgcttgtgttgcgagtttggactcacctcacagctgacgcgtgtccacttcgcctctcaccatccgtcgtgaacagtggatcccgagcgcgctgggcgttcccgcttccattccatctaaccagttcccagccacgaaaactccgcaaacatcgcacgcacgtacgccgtttccatgccatgcatggacaccacgcgctagttaacccgagatcggccccccatcgctgatgccaggaccgatcacccgacgacgcacaaacaccactccgcacggattagccgacgccgacggtgagcagcccatcagagcgcgacgatggcgggcgtcttttggggaggcgggagggcggacgaggtggctgacttcgacgagtacgaccccaccccctacggcggcggctacgacatcgccctcaccttcgggcgtccgctgccgccctccgaggagacctgctacccgatctccaccgcctcctcgtacgaccgtccgcagcagcacggaggccggaggcccggggccgaggagtcccacggctcagctgcagggtacggtggaggcggcggcgggtacgcgggggcggggcggcctcatcagcttcataaggaggaggagacccacggctacgggaggaaggggggacacgacgacgaccacgagcagcaggcgtaccgaaagccgaagccctcgtacgggcacggggacggcgacgacgaccaccaggcgtacaggaagccgaagccgtcgtacggggacgagaggcccagctccggccggaagaagaagaatgacgacgacgatgactctgatgacgacggcgcgaggaagccacgttacaaaaagaaagacgacgacgactcggatgacgatgacaggaagaagcgctacgagaagaacgaccgccgccgccgccacgactatgacgattgagctatatgcatgcagtctcgtatatacacatgtgctcgagtcacgcgttatgcaatgtatcatccccattgcatctcctactagcagtactgtagtaaataagcgaagctgagatgcagggggatgcatatggtggacacagttttgatttcaagtgacgccgctttacagcctacttcttccttgtttttgttcttcaccttttgtactgttctgatggtaacctgtatactcgcgcggttacttgcgaccattgtttttttttgaacaaaatattactgtcgattttcaggttcacagtaactaaaaaaaacgtcatatacatgacatgctatgct

SEQ ID NO: 51458 - DNA, 1179 bp, Zea Mays
acaaatatgatttcacaaggcgtccgtccgctgaaacccacagccttttgcactctctcaccagggcttgctgctgcttgcaacctcaccctcctctccgggagagcctctcgcctacagctccccagctgcccttccacgccacgccgaccaaggcgccaaaagcaaacgctacgccagtacgtggtgagggagcttgtcacggctgcgttgcttgccacctcgtcttcgcggaggtcctcgccgcgacgacgacgatggagctctgacgggggcggtcaccggcgcggtggcgggcagggcttccgacagcggcggcgttctgcggggagctgggctgggggcggtcgccggagccgtcctctccatcgaggttctcgaggcttctcgcgcctactggtgctcggaccggctgcggctgggctcgcacggcgcgtcgtccatggctaatttcattgagcagcttcttcgtgcccggtttgtgcaagagcagtttacaacttcaggatatgcatcatatcgctggcaggtgagcatatcggattttggtcacgatgacctatacgacatattcggggacatctcatcgaaagggctcccacaagagtcgctgaagaaactaccacactatgtggtcactgaccagacgcgcgcggactcgttcggccagatcctgtcctgccctatctgtctacaggacatcgtagccggcgacacagcgaggaggctgcccagttgctcccacactttccaccagccttgcgtggatagatggctcgtggatcgcggatcgtgccccgtctgcaggcaggacgtgtgagatagccagataggtgatcgacctgagtagatggagcaatagctgggtgatgcgaaatgtttgctcctacactaagttcatatatatatatagctactagagagaagatacgtactgtggtgtaaattagcagagaatctgcctgttctgttccactaccagccagcgtaaacggccgtgcgcatcggacttcgtttcttgcacccggttccaacgtgtaatgaaataataacactgctgttgggaagcagtactacctgtttctgtagaatctgtctgtatgtctgtttggcactctgcgtagtttctggaacagattccattccacccgtgtcggcaacggcgatattcttgctgtc

SEQ ID NO: 51459 - DNA, 1107 bp, Zea Mays
gatttcacaaggcgtccgtccgctgaaacccacagccttttgcactctctcaccagggcttgctgctgcttgcaacctcaccctcctctccgggagagcctctcgcctacagctccccagctgcccttccacgccacgccgaccaaggcgccaaaagcaaacgctacgccagtacgtggtgagggagcttgtcacggctgcgttgcttgccacctcgtcttcgcggaggtcctcgccgcgacgacgacgatggaggttgccgaggcgcccgacgaggacggcctggacgagcgtggcgtggcgctgcacctgcacctcccgaggctgctggccggcgtcgtctccggcgccctcactggcctcttcgctctcggctaatttcattgagcagcttcttcgtgcccggtttgtgcaagagcagtttacaacttcaggatatgcatcatatcgctggcaggtgagcatatcggattttggtcacgatgacctatacgacatattcggggacatctcatcgaaagggctcccacaagagtcgctgaagaaactaccacactatgtggtcactgaccagacgcgcgcggactcgttcggccagatcctgtcctgccctatctgtctacaggacatcgtagccggcgacacagcgaggaggctgcccagttgctcccacactttccaccagccttgcgtggatagatggctcgtggatcgcggatcgtgccccgtctgcaggcaggacgtgtgagatagccagataggtgatcgacctgagtagatggagcaatagctgggtgatgcgaaatgtttgctcctacactaagttcatatatatatatagctactagagagaagatacgtactgtggtgtaaattagcagagaatctgcctgttctgttccactaccagccagcgtaaacggccgtgcgcatcggacttcgtttcttgcacccggttccaacgtgtaatgaaataataacactgctgttgggaagcagtactacctgtttctgtagaatctgtctgtatgtctgtttggcactctgcgtagtttctggaacagattccattccacccgtgtcggcaacggcgatattcttgctgtc

SEQ ID NO: 51460 - DNA, 264 bp, Zea Mays
cacatgtcctctctctctcccccgcgcatctcgtccctctcctccacctcgcccgcgtcgcttggaaaccgccgaccgcctgtgccgccctcgcccccccaccccgcgcgtgataatggtttggttgaggagtctgaataactcacaggagaagaccctgagcagcagcgggttggtgtaggcaagtgtcccttgacccacttatgtcctatacattccttaattcattttccgcatttacacagtttatacctaaggtttgac

SEQ ID NO: 51461 - DNA, 332 bp, Zea Mays
ctctctctcccccgcgcatctcgtccctctcctccacctcgcccgcgtcgcttggaaaccgccgaccgcctgtgccgccctcgcccccccaccccgcgcgtggttgtccatgttgcaactactgctcaggagaagatgaagccgtggaggaagacttccaggagttccaagattatgacgagttttaggcgtgggttagcggcaacccccagtcggctgcctgtgaaggccgtgtgtatcttttcgcactttgattattgttaaggactatgtggatgtctcagacatatgatgtaatcgactattattacccttttatgttattatttgag

SEQ ID NO: 51462 - DNA, 878 bp, Zea Mays
atttaggaaacctaacgggcggctacagccccgaggaatctttgtaaaggctacgtagtgataccctgctgggtcaccttggtagtgatcaatggagagtcatgatctccgggcagaaagggaatcacgacttgtgggtaaagtgcgcaacctctgcagagtgttatgaaaactgatatatcatccttgctcgcggttatgagcggccaagggagatccattgattagagatacttgatcagagatgttcggattacacgtggtgatgaggatgatggttttgatattgactatggtaatggtaagtggtattctttccgcttggaaagggtacttttgggttaacaacttaggttaatactaaaatctagctctctctattaataataataatctgaccaactaaaagcaactgcttgacttaaccccacataaagctagtccactatagccaaacatgacatttgctgagtatgttgatgtgtactcacccttgctctacacaccaaaccctccccttccccaggttgtccatgttgcaactactgctcaggagaagatgaagccgtggaggaagacttccaggagttccaagattatgacgagttttaggcgtgggttagcggcaacccccagtcggctgcctgtgaaggccgtgtgtatcttttcgcactttgattattgttaaggactatgtggatgtctcagacatatgatgtaatcgactattattacccttttatgttattatttgagctctatgtgatgatgtccagttatgtaactgctgtgtacgtgaattgctgatcctggcacgtacatggttcgcatttgatttgccttctaaaaccgggtgtgacaccaccggccaaattgac

SEQ ID NO: 51463 - DNA, 2938 bp, Zea Mays
gggatggtccaaggagagcttggggctcgctgccacctcgcgcgccagcgcctaaataaatcactcccacgcacacccaccaccgcgccgagcacctcctccttcccttccttctctctcccaccctcctcactagctctatctagctgagtgaactgaacagcccactggctcgtcttagctaagctcagctgtaaagctaaggttcggagtagctagcgtggtggccggagagtgtagcgagcggcgttcagctcaccgggggctgctgggtgagtgagggagccagcgtcgtgagagcgctccaagatgattacggggacggacttctaccacgtcatgacggccgtggtgccgctgtacgtggcgatgatcctggcctacgggtcggtgcggtggtggcgcatcttctcgccggaccagtgctccgggatcaaccgcttcgtggcgctcttcgcggtgccgctgctgtccttccacttcatctccaccaacaacccctacaccatgaacctgcgcttcatcgccgccgacacgctgcagaagctcatggtgctggccatgctcaccgcgtggagccacctcagccgccggggcagcctggagtggaccatcacgctcttctccctctccacgctgcccaacacgctcgtcatgggcatccccctgctcaagggcatgtacggcgacttctccggcagcctcatggtgcagatcgtcgtgctccagtgcatcatctggtacacgctcatgctcttcatgttcgagtaccgcggcgcgcggatgctcatcaccgagcagttcccggacaacgccggggccatcgcctccatcgtcgtcgacccggacgtggtctccctcgacggccgcagggacgccatcgagacggaggccgaggtcaaggaggacggcaggatacacgtcaccgtgcgccgctccaacgcctcgcgctccgacatctactcgcgccgctccatgggcttctccagcaccacgccgcgccccagcaacctgaccaacgccgagatctactcgctgcagtcgtcgcgcaacccgaccccgcggggctccagcttcaaccacaacgacttctactccatggtcggccgcagctccaacttcggcgcggccgacgcgttcggcatccgcaccggcgccacgccgcgcccgtccaactacgaggacgacgcgtccaagcccaagtaccctctccccgtggtgaatgcgacgtccggggcgggggcggctcactaccccgcgccgaacccggccgtggccgcggcgcccaagggcgccaggaaggcggcgacgaacgggcaggccaagggcgaggacctccacatgttcgtctggagctccagcgcgtcgcccgtgtcggacgtcttcggcggtggcgccccggactacaacgaggccgcggccgccaagtccccccgcaaaatggatggaggcaaggacagggacgactacgtggagcgcgacgagttcagcttcgggaacaggggcgcgatggacagggacgcggaggcgggggacgggaaagccgcggcggcgggcggggaccccagcacggtggccgcgccgacggcgatgccgccgacgagcgtcatgacccggctgatcctgatcatggtgtggcgcaagctcatccgcaacccaaacacctactccagcctcatcggcgtcatctggtcgctcgtctgcttcaggtggaacttccagatgccggccatcgtcctgcagtccatctccatcctgtcggacgcggggctcgggatggccatgttcagtctcgggctgttcatggcgctgcagccgcggatcatcgcgtgcgggaacaaggtggcgacgttcgccatggcggtgcgcttcctgaccggtccggcggttatggcggccgcgtccttcgccgtgggcctccgcggcacgcttctgcacgtcgccatcgtccaggtacttctgacttctgagggtggggaggggaagacggatagatttcacaatataccccgccggcacgcccgcctgcaacagcaagaatcatcgctgcgctgtttcctttctcggtccccctcctccctcgtgctcgcctctctctcccacctctctcgccgtggccttttgcgctcggcggacagcacaaaagttaccctttttttctcactgtgcttttggttttttgcttcgccaaacggcggaacgagcaggcagctctgcctcagggcattgtccccttcgtcttcgcaaaggagtacaacgtgcaccctgacattctcagcaccgcagtcatttttggcatgctcatcgccctgccgatcacgctcgtctactacatcctgctcggcctgtgaccgacccgtgggtgatggcaatggcatgccccgcattgctgtaactgtaaagaccgctgctgccactttccgttcaagggaggcaagtgaggagactgtctgctacgacatttgcttggcgcttcaaaaatgagtggcttgtttctctctctcttctatctattttttattttttctctagaagtaggtgtgaggattgtatggatggaaagtgtgggaggtggacaagtcgcggtagctaggtaggacgacaatggtgaggcaaaacggaccaaaaggaggtgcaagtacaaaagcttgaagggaacaggagatccagtttaagcacgtcacgggatgggttggatatttcaacgggttcagggtattttggttggctgcgctgaccgatgtaaaatcagcgcgccattgtgacaggagatcgatcttgcttgagataaacagctcacctccggagtttgatggcttgagataagggctcaactcaaaatagacagaaatatataccgtatttgtcactgaaacaaatcagtcttttatacacttggtattttaaaaaaaattgaactttcttattcgacttggaa

SEQ ID NO: 51464 - DNA, 582 bp, Zea Mays
cactgccactgccaccgtcgcgtcgtctcagcagcacatgagcgcgcataccttctacgccatgttcaccgtctggggagtctgcttcttcgcgtccatgaaggatcccttctacgacagcgagacgtacaggagccagggtggcgacgggaccgtgcactggtactacgacaggcaagaggacctggaggcgtctgcgagggaggagctgctgcgggaggagctgctcgaggagattgagcagagggttgggggcctcagggagctggaggaagcgagcaaggaggagcagctcacaaagtgatcacgcgggcgaatgggctactcatcagctctctatctgagcttcgttagcaaataagttcagacttctctttactgccatgctcaagtctgtatatggccaaaacccaaaacgattgatcaactgcgctactgcagtgcaatagcaggatacgtatagttttcttttcaagggaaacaggaggggagtgcagtgcacccccgcccatactgcatgttattaataaaagaaagttatttacagaatcaggacaggctctacaggatacatggcaagct

SEQ ID NO: 51465 - DNA, 1758 bp, Zea Mays
cccacatcaacaaccaccgttccgtccccgtccccacggcctgcgcgccccgtcaccacgggcatcgcgcccgccggtttgaaacccttccgccgccgcctcctctatttaaccccacaacctcaccccacttcacttcactccccagtccccatagactccagccctgagctgcaccgtgagcgctcgccgctccgcatcgccgtcccagtcccacaccccgcatccagcctgcccccagcgtaatggcgcttcgccaggccgtcctcctggccgtggtcctcgccgcgctgctcccgctcgccctctctcgcgggttgggcttggtgcacgggcatgtgcggccgcacacgcacgggctggggctcggccaccaccacgcccagccgcacccgcacccgcacgggcacgcaccgctcgtaggtggcgcgtggtcctctgctcacgccaccttctacggcggcggcgacgcgtccggcaccatgggcggtgcgtgcgggtacggcaacctctacagccaggggtacggcaccaacacggcggcgctgagcacggcgctcttcaacaacggccactcgtgcctgccgggctccgtcgtggtgacggccaccaacttctgcccgcccaacaacgcgctcccctccgacgacggcggctggtgcaacccgccgcgcgcccacttcgacatgtcgcagcccgtgttccagcgcatcgcgctctacagggccggcattgttcccgtctcctaccgcagggttgcgtgcaacaagaagggcggcatacgtttcaccatcaacggccactcctacttcaacctggtactggtgaccaacgtgggaggcgccggcgacgtgcacgcggttgccgtgaaggccgagcgctcccccgggtggcaggccctgtcgcgcaactggggccagaactggcagagcaacacgctcctggacgggcaggccctgtccttccgcgtcaccaccagcgacggccgctccgtgctctccaacaacgccgccccccgcggctggtctttcggccagactttcagcggtgcccagttcaactgaacacacccccaccgttcatgcagcgtcgacgcagtggcactagtactagttgttccgtccaccccgattggagcctgccgagaggcgccatggttttatgaatggtctgcacctcgcatttgctcctgggaattaccagtagtttaggcctagtaatagcgcgggttttatcgtgcttgcgttagcatggtgttttagtgttccttggttgtatccggcttggaaattggaggtggtggtaaggctggtctgcagataaacggaggcaggctgccttgtatcacccgccaattatgcgtttagggcctcatggtgatggctccttcgagatgagatgttttctgagttattcaagtgtgttagttgtaatgaatcttatcaagttactatttcctaatatattatccttcggaaatgggtgcttgagtttaagcaggaacttcagtgtgcctctcctgagactcaattttattctggaatttgaatgtattttggatccgtcatcaactttctcatttactacgacatggtttcctcggctgttaacttggattccggacttaggcccctaaccctgttgatcctgtttctatcatgattcctttcaatttacacatcagacattgcagccgttccgactgcttgattcactgccctgagtctacagtaaactgcttaaataagaaaaaaaaga

SEQ ID NO: 51466 - DNA, 1084 bp, Zea Mays
ctcatacatacaacatgaacttggacaaaattacaccaatagcaagcaagatatcaactaatcaacaagtatatcaagattaataataaatcacaagtaaacacaaagatttactaagaaaccctttgcggagaaaaaccacatcgatgacgagcaagcaattcgatgtgaataggaaggatacaagacgtaaccaatacatataactattttttgtttgtcccataacataaagcatgttctttctagatacacatacatcaatgtggtagtactagtattgatagagggaattaaatacattcattgggctttaaaataaaggtgatttatgccttatatactggaacctggaatgaaaaacttggttgcaccaataaacatacaacagaggtggcgataagtaacatacaactccccatttattagtgggaattctatgtgcctcatctccaactcaatactgaatagtttagaacacctcgaaggctcgaaccaggtccaacgtgatctaggtcctgtttagatctatccagtttattagaaactagttttaaaaccttaaagtcctccaaataggtcaattttttattcaatttctaaaaactagttttctggcttcttaaaaaccaagaatccagttactccatccaaaatcagtttttgatggtcagtcaatacttatagaaaaagctataaaccatttaaaaaaactagtggactcaaacacctctattcagttctctgtctctaaaagttagtttttagaaaccaagtttagaaactagtttctttaaatgtagtggatcaaaacatagccgtagactaagaaccaaatgcaggccattaccgtagctcaaatacatcactccgtcgctttcatattatcctgtgcccgtgcccagtggtatcatcgcgcccacccaaattccgtctgtttagtttagcttttttcttaccagtttttttttttgaaaatctgactatgtagagaatctgactgtgaaaagtatctaaaatctaaacaaaaggttacgaaggctaaatagatttccaagaatctatagaataaagttaatgcttt

SEQ ID NO: 51467 - DNA, 2004 bp, Zea Mays
ccgcgacatgaagggcgtcggcgtaactcacttaccactggtacttggccttgacgagcacgtcctcatacagcacggcggcgtggtcccagctgaggtcctgcgccatgccgcgcgcctccaggccgcgccagctctccttgtagttccggaacgtgttgaggcagtgcgagagcgcgtcgatcatccgattcgcctccgcgcggtcgaacgtccaccccagcccggtgtcgttgaacgggtcgaacggcgccaccgtgtcccggagcccgcccacggcgtgcaccacgggcacggtcccgtacgccatcgcgtagagctggttcagcccgcacggctcgaaccgcgacggcatcagcaggacgtccgcgcccgccgtgatgcggtgcgccaagggcaccgagaaccccacccacgcgcgcaccttgtcgctgtgctccgcctcgcaccgccgcagcatgtcctccaggtcggggcgccccgtgcccagcatcacaagctgcacgtcctgtcccgcgatccagtggatcgcgtcggcgatgatgtccacgcccttctggtggtccagccgcccgatgaacccgattagtggcacgtcgtcgcggacctgcaggccgagctgccgctgcagggcagccttgcactgccgcttgcccgtgtccagcgtctcgaacgtgtagttggtgtattcgtcggagtggaggtgcacgtccacagcggggttccactcgctcatgtcgatgccgttcacgatgccctgcagcttccagtcgttctggtttatgatgtcgtggaggccccacccaccttccgatgtcctcagctcccataggtatccattactgacggtcaccacctggtctgccatcttcagccctgcggcaaaaacgttgcagtgctcgccaccgatattgtcgtacagtttgaagtgatcgatgtagtgttcaggcaagtcaaagttgacgaagtcgtctacagggccacgaccctgcagcaaagggaaaattgagcgtaactgcatcagtcattttggccacgtcaagtcaagcagcagaaggtaactgaaacacattaacctacgcaatacttaagtcttgagcacataattgttcattaggtttcatgaatcatgatagcatattcattcccatcagaactaagtaaatgaaacctgaaagttacacgaaccgaattgatgtactgaaaatagaaatggacctaatcactccctgaaaatagcaaataactgatgcataaaacatactgtatccagcaaaaagtattcctaagaatataccacaaaaacatttcctcacagggtaaccttccttatatgccaccatattttggccctgtttgtttcgacttctggcagcttctggccaccaaaagctgctccggactgccaaacgctcagctttttagccagcttctataaaatttgttggggcaaaaaccatccaaaatcaacataaacacataatcggttgagtcgttgtaatagtacgaatccgtcactttctagatcctgagtcttatgatcaactttattttactccacacgtaatcgtaatgatactcagattctctccacaaccagattttcagaaaagctggtcagaaaaaagctgaaccaaacaggccctttatcctttcaatttttttcatatttccgtttcatctgagtttcagaccagtagtcaactggaagaaactaataagaacaaaataggcttctaggtttattgagtcaacacaataattgatgactagatgaatctagaaatcttctgcaggagaaatatgaacaatgataccaacaagataagtacatgtgatttcaaaatgaagtatactaatgggttaagtatttagagagagaacaagaggcggcctaagtttaaggtgcaaaaaacctgatgagcaatgttgtgtatcacaagcactgagcgagcatactgcatcaaaccattgtcccggtagtaggcttttaggtagaccgga

SEQ ID NO: 51468 - DNA, 445 bp, Zea Mays
gcagaactcggctggaacttcggacgactcagctcggaatcctctcgtggcagtgtataaatccaacacgcaaccgtggatctcgccaaatcgccaggatcacgacgccctgcgcgcacccctgcctacacacacctgccgccgccttcccagcgcgcggagccgctccgcgccgtcgatcctccatggtcaaggcatcgggcgaaaccaggaaatatcgcggggcgcggtggagcgtcccatgatgactgctcgcgcgggggggtccaatgctggcggaagtgttgccgtagagcttcggcgcctcggaacttctcgccatcggtgatggtccaccgtggaccgcatccctccgcatctatgctcgactccacgcaggtcaagaacaggtaccgcatgttgaggcgcttggaggatgctgcgatgtgttcgtgagtggtctagg

SEQ ID NO: 51469 - DNA, 2359 bp, Zea Mays
gtctgacccacacgatccagcagaagccgcacgagcggcaaaccgaccactagcctacgtgctctgagggacaacagcatcgctccatgaacgaatgataaagaatttttgctcgacatgactcaggatttcagctccgactcagcgatgtgaaaacaggtgagaaaaaagggtaccaatgaagagggaagtctgtccaaaaaggattttgggatcatgggagaatcaaagaagtgatgacatagagaagcaagatgaagttatgttacctggattcaggtttcatccaacagatgaagagcttgtcaggttttaccttaaaagaaaaatccagcagaagtctctccccattgagctcatcaggcagctagacatctacaaatatgatccatgggatctcccaaaactggcgagtactggagagaaggaatggtatttctactgtccaagggataggaagtatcggaacagcacaagaccaaacagggtaactggagcaggcttctggaaggctactggaactgacaggccaatctactcttctgatgggagcaagtgcataggcttgaagaaatctcttgtcttctacaaaggtagagcagccaaaggtgtcaaaaccgactggatgatgcatgaattcaggttgccatcactcactgacccaacactgctgcagaagaagccactggagaagaccattccaccaaatgattcctgggcgatctgcaggattttcaagaaaaccaattcaacagcacagagagctctctcacattcctgggtatctcctcctctatccagcacaaatgaaaactacattcgcctatcctcacaggctacacagagaagttatcacagctcagagaacacatcctctacgatgacagacatcatctcctccatccagttcactggtagtagttacatgccttcaatagtttcctcttgccgcaaccctctgagcatcattgacagcagcagcaggccggctgcgtccctaatgctcccctcatctggagcagaacatcacgccatgagtatcctctcagcaatcccacatgatcttccagctgggatggacattgcatcaatggtcctcaatgcatcacccactacactccagaacctagataggatccccacaaacattgagtttggtcaaccacaccaccccagcaacagcagcatggccaacagatgcacggctgatttgcttgacattggcaacagtgtcaccggtgctccccggtcaatcaacttcccgttcaacctgcaaggggcactgccagatgactggaggatgaccttgccttgggactctctcccttgcacaaccgaggtctcaacaaattacaagtcgaccaagtactatacttagtttgaattctgtactaatgtaggctttgctttatagtgcagcagacagtgtacctaattttcacttattggagcttctaccaccatctgctagcattgctgttatcatggagtattagaatttcgttctgttaacatcgaagctagcagagttattaggatgcatttgtgttagtaccttttgtgcaatgtagccatgtaggagcagttgcgatcttgatgtttcatgtgtaactctgtaagactgcaagtctaacttagcttcagttttgtccacagttctatgcactgaagttgtgcccaacgaagtagaccagtgaccagtccaccacccaccagttctctcctctaccatggtttcataatatgggagcagctgttatggatcaaactctcgtatggcactatgacagtaataataactcaatgaaacttgctttacttgccgcgtaaatgcgaggtttatcggcctctcggggacattttgccgaacgggtggtgcgcacgcccaggccatcgacactgtatcctccttcaaggttgaggtattcacgccggccgccgcattggcattgcctcacggagttgctggtaatctggtaccgaaaccacaatctcgtggtcgtgaagcagagcagttgtctggactctggagcctttgttgctgccgtgcctgccgcgcagaaaattgagtcttctagttctcggtatctgtttcgggcctgtgatgagggcgtagtagaaccaagaccaattctcagcgttggatctaggcttgttcaaacgttggattggattgctttggttcagatcaaggtcgggtcgttagtctttagacacggctcatgtctgactctgctcagtcggtttttttgttaggtcggaatttttttgggttttgagtcagtttttttgttggattaggtattgtgtcaaaaattcatgacccatacatgacacataaattattttaaataaaaaa

SEQ ID NO: 51470 - DNA, 2245 bp, Zea Mays
acaagggtgcaaaacgttagccaaatggtaggaagggaaaccctacaaagtaaccaaccaagagagctaagactacgagtctgcaacttaaagctgcttcttccttctctgagattttgtgctagcttttctccaaatttagttagtctttgataagagcagagccagtgcttagtgacccaccttgtttggccccaaagaaatatatggtagtcccacactgagtggaagaaagggttcgttttagctccagtaatcagcagaaaccagaatcttttagctacttcctaccgagtgaagtttgaccatacagattaaccgttaggttttgtagctggtaacttcttgtaactagaagcaggtgagcactgcttgagatatacagcatctaaccagtagtttgttgtactgtgtaaacatatggatgccatcagaagtgatgacatagagaagcaagatgaagttatgttacctggattcaggtttcatccaacagatgaagagcttgtcaggttttaccttaaaagaaaaatccagcagaagtctctccccattgagctcatcaggcagctagacatctacaaatatgatccatgggatctcccaaaactggcgagtactggagagaaggaatggtatttctactgtccaagggataggaagtatcggaacagcacaagaccaaacagggtaactggagcaggcttctggaaggctactggaactgacaggccaatctactcttctgatgggagcaagtgcataggcttgaagaaatctcttgtcttctacaaaggtagagcagccaaaggtgtcaaaaccgactggatgatgcatgaattcaggttgccatcactcactgacccaacactgctgcagaagaagccactggagaagaccattccaccaaatgattcctgggcgatctgcaggattttcaagaaaaccaattcaacagcacagagagctctctcacattcctgggtatctcctcctctatccagcacaaatgaaaactacattcgcctatcctcacaggctacacagagaagttatcacagctcagagaacacatcctctacgatgacagacatcatctcctccatccagttcactggtagtagttacatgccttcaatagtttcctcttgccgcaaccctctgagcatcattgacagcagcagcaggccggctgcgtccctaatgctcccctcatctggagcagaacatcacgccatgagtatcctctcagcaatcccacatgatcttccagctgggatggacattgcatcaatggtcctcaatgcatcacccactacactccagaacctagataggatccccacaaacattgagtttggtcaaccacaccaccccagcaacagcagcatggccaacagatgcacggctgatttgcttgacattggcaacagtgtcaccggtgctccccggtcaatcaacttcccgttcaacctgcaaggggcactgccagatgactggaggatgaccttgccttgggactctctcccttgcacaaccgagttctatgcactgaagttgtgcccaacgaagtagaccagtgaccagtccaccacccaccagttctctcctctaccatggtttcataatatgggagcagctgttatggatcaaactctcgtatggcactatgacagtaataataactcaatgaaacttgctttacttgccgcgtaaatgcgaggtttatcggcctctcggggacattttgccgaacgggtggtgcgcacgcccaggccatcgacactgtatcctccttcaaggttgaggtattcacgccggccgccgcattggcattgcctcacggagttgctggtaatctggtaccgaaaccacaatctcgtggtcgtgaagcagagcagttgtctggactctggagcctttgttgctgccgtgcctgccgcgcagaaaattgagtcttctagttctcggtatctgtttcgggcctgtgatgagggcgtagtagaaccaagaccaattctcagcgttggatctaggcttgttcaaacgttggattggattgctttggttcagatcaaggtcgggtcgttagtctttagacacggctcatgtctgactctgctcagtcggtttttttgttaggtcggaatttttttgggttttgagtcagtttttttgttggattaggtattgtgtcaaaaattcatgacccatacatgacacataaattattttaaataaaaaa

SEQ ID NO: 51471 - DNA, 1951 bp, Zea Mays
gcttagtgcattactcatgaaaatggaaaagagtgcattatgagcacggcggctctatcagagcgtgatacattcacaagctgaagagggctcggtcatccggaccggaattcgtaaaggcattagtgcattagcatcgtcaccactcgcgccgtcgtactacctcgccgactccctcgcttcgcagatcgcactaaagggaacacatggatctagcttgattttgtaccaaattcagagcaactgatcgtggggattcgattctccatagtttatttgcggggccgttccgatcagcgatggtgaagaggctcaggcgcaagggcgacgtctcctccgcgccgccgcctaaggccgccgcatctcggtcaaccaatcccgacaaatttaaaaagaagggggtcaaaaccgatccggagaaattgaaggcggcctgcactgaatccgcaaacattgctgaggcgtctgcttcagcgcagacacccaccccgaaaccagtcaagacgagtccggcggccgccgccgccgcagagattgcagatgatcgggtcgcccagagcaaaacggaggacggaaagtttagtaggaaggagacgatgaagggaagagaggagcagaagggagaaggggccagtgatggggtcacccagaccaagactgaggatatgaatgtgactaggaaggaaacgatgaaggggggagagaggaagggggacgggagtaggaaggagatgatgaaggggagggaagagcgtgtgaaaacggaagagaagacagggaaggaaaaggaggaggaaaagagtggctcaggattcatattcatgtgcagtgcaaggacgaagccagaatgctaccagaacggcgtgtttggccttcccagggggaagatggatgtggtggagaagatccagcgagggacgaagctgttcttgtatgattttgacctcaagctactgtatggggtgtacaaggcagatacaaggggaggattggatcttgtgcgtcacgcctttgatggcaaattccctgcacaggttaaatttagcgttttcaaggattgtcttcctattcctgagagtagtttcaagcatgccattaaggagaactacagctcaaagggcagactattggcactgttcaagcctatcagcctttctaaaccagctccacaacatattgaggatattcgaaaaccaagtgattatgaagaaagaagacagttgcaacatattgaagaaagggctgcacctattaatgtccacgcacatcctcttgaagatcggtacaagatgacacggtcattacatccgccactttttgatgagcctcgacgtggtttggtgctaaatccttatcatatgcaagagcctcaacatgttcctcttaattactatcaccaagtggctactaggtctccataccatcaacctcatatggatattatgcacgaaagctgaggtaactgtaagagatcaccaagcactgccaggagagcttgctgcacggtctgaacgcgtggatgagctgtaccgttcttacaaactctctacacgcgcaatggacctcagtccgggagcatcctacctgacaacttatgagcacccgactagtgtttatggtgagggcattcagaggccagctttgacaagggttagtggcccaagtgtgcctgtgtccacccgttattcctttgctggcccaccagcatattgatcatccagatgcaagcactcaaatcggccccagccgctgtacaagttactgtaggcaatggcttcttgtacaccgttggaagccaggatagaacctgatggtagtagctttgcagtttaattattgcctttggtttcttttgcaagataaatctatgagatgtaatgtggaccttgtttgacccaagttgttttaactaaaatgcaaaacgatggatgtctttgtgttgatttgcagc

SEQ ID NO: 51472 - DNA, 1449 bp, Zea Mays
gaaaatggaaaagagtgcattatgagcacggcggctctatcagagcgtgatacattcacaagctgaagagggctcggtcatccggaccggaattcgtaaaggcattagtgcattagcatcgtcaccactcgcgccgtcgtactacctcgccgactccctcgcttcgcagtttatttgcggggccgttccgatcagcgatggtgaagaggctcaggcgcaagggcgacgtctcctccgcgccgccgcctaaggccgccgcatctcggtcaaccaatcccgacaaatttaaaaagaagggggtcaaaaccgatccggagaaattgaaggcggcctgcactgaatccgcaaacattgctgaggcgtctgcttcagcgcagacacccaccccgaaaccagtcaagacgagtccggcggccgccgccgccgcagagattgcagatgatcgggtcgcccagagcaaaacggaggacggaaagtttagtaggaaggagacgatgaagggaagagaggagcagaagggagaaggggccagtgatggggtcacccagaccaagactgaggatatgaatgtgactaggaaggaaacgatgaaggggggagagaggaagggggacgggagtaggaaggagatgatgaaggggagggaagagcgtgtgaaaacggaagagaagacagggaaggaaaaggaggaggaaaagagtggctcaggattcatattcatgtgcagtgcaaggacgaagccagaatgctaccagaacggcgtgtttggccttcccagggggaagatggatgtggtggagaagatccagcgagggacgaagctgttcttgtatgattttgacctcaagctactgtatggggtgtacaaggcagatacaaggggaggattggatcttgtgcgtcacgcctttgatggcaaattccctgcacaggttaaatttagcgttttcaaggattgtcttcctattcctgagagtagtttcaagcatgccattaaggagaactacagctcaaagggcaggttcacccaagagctcaacactaaacaagttcaaagactattggcactgttcaagcctatcagcctttctaaaccagctccacaacatattgaggatattcgaaaaccaagtgattatgaagaaagaagacagttgcaacatattgaagaaagggctgcacctattaatgtccacgcacatcctcttgaagatcggtacaagatgacacggtcattacatccgccactttttgatgagcctcgacgtggtttggtgctaaatccttatcatatgcaagagcctcaacatgttcctcttaattactatcaccaagtggctactaggtctccataccatcaacctcatatggatattatgcacgaaagttcaactatgtcgacaaccatgttcaaccattgccttttgattcgtcattaggaaagccaag

SEQ ID NO: 51473 - DNA, 1969 bp, Zea Mays
gaaaatggaaaagagtgcattatgagcacggcggctctatcagagcgtgatacattcacaagctgaagagggctcggtcatccggaccggaattcgtaaaggcattagtgcattagcatcgtcaccactcgcgccgtcgtactacctcgccgactccctcgcttcgcagatcgcactaaagggaacacatggatctagcttgattttgtaccaaattcagagcaactgatcgtggggattcgattctccatagtttatttgcggggccgttccgatcagcgatggtgaagaggctcaggcgcaagggcgacgtctcctccgcgccgccgcctaaggccgccgcatctcggtcaaccaatcccgacaaatttaaaaagaagggggtcaaaaccgatccggagaaattgaaggcggcctgcactgaatccgcaaacattgctgaggcgtctgcttcagcgcagacacccaccccgaaaccagtcaagacgagtccggcggccgccgccgccgcagagattgcagatgatcgggtcgcccagagcaaaacggaggacggaaagtttagtaggaaggagacgatgaagggaagagaggagcagaagggagaaggggccagtgatggggtcacccagaccaagactgaggatatgaatgtgactaggaaggaaacgatgaaggggggagagaggaagggggacgggagtaggaaggagatgatgaaggggagggaagagcgtgtgaaaacggaagagaagacagggaaggaaaaggaggaggaaaagagtggctcaggattcatattcatgtgcagtgcaaggacgaagccagaatgctaccagaacggcgtgtttggccttcccagggggaagatggatgtggtggagaagatccagcgagggacgaagctgttcttgtatgattttgacctcaagctactgtatggggtgtacaaggcagatacaaggggaggattggatcttgtgcgtcacgcctttgatggcaaattccctgcacaggttaaatttagcgttttcaaggattgtcttcctattcctgagagtagtttcaagcatgccattaaggagaactacagctcaaagggcaggttcacccaagagctcaacactaaacaagttcaaagactattggcactgttcaagcctatcagcctttctaaaccagctccacaacatattgaggatattcgaaaaccaagtgattatgaagaaagaagacagttgcaacatattgaagaaagggctgcacctattaatgtccacgcacatcctcttgaagatcggtacaagatgacacggtcattacatccgccactttttgatgagcctcgacgtggtttggtgctaaatccttatcatatgcaagagcctcaacatgttcctcttaattactatcaccaagtggctactaggtctccataccatcaacctcatatggatattatgcacgaaagctgaggtaactgtaagagatcaccaagcactgccaggagagcttgctgcacggtctgaacgcgtggatgagctgtaccgttcttacaaactctctacacgcgcaatggacctcagtccgggagcatcctacctgacaacttatgagcacccgactagtgtttatggtgagggcattcagaggccagctttgacaagggttagtggcccaagtgtgcctgtgtccacccgttattcctttgctggcccaccagcatattgatcatccagatgcaagcactcaaatcggccccagccgctgtacaagttactgtaggcaatggcttcttgtacaccgttggaagccaggatagaacctgatggtagtagctttgcagtttaattattgcctttggtttcttttgcaagataaatctatgagatgtaatgtggaccttgtttgacccaagttgttttaactaaaatgcaaaacgatggatgtctttgtgttgatttgcagc

SEQ ID NO: 51474 - DNA, 1130 bp, Zea Mays
gaaaatggaaaagagtgcattatgagcacggcggctctatcagagcgtgatacattcacaagctgaagagggctcggtcatccggaccggaattcgtaaaggcattagtgcattagcatcgtcaccactcgcgccgtcgtactacctcgccgactccctcgcttcgcaggttaaatttagcgttttcaaggattgtcttcctattcctgagagtagtttcaagcatgccattaaggagaactacagctcaaagggcaggttcacccaagagctcaacactaaacaagttcaaagactattggcactgttcaagcctatcagcctttctaaaccagctccacaacatattgaggatattcgaaaaccaagtgattatgaagaaagaagacagttgcaacatattgaagaaagggctgcacctattaatgtccacgcacatcctcttgaagatcggtacaagatgacacggtcattacatccgccactttttgatgagcctcgacgtggtttggtgctaaatccttatcatatgcaagagcctcaacatgttcctcttaattactatcaccaagtggctactaggtctccataccatcaacctcatatggatattatgcacgaaagaactgcagctgaggtaactgtaagagatcaccaagcactgccaggagagcttgctgcacggtctgaacgcgtggatgagctgtaccgttcttacaaactctctacacgcgcaatggacctcagtccgggagcatcctacctgacaacttatgagcacccgactagtgtttatggtgagggcattcagaggccagctttgacaagggttagtggcccaagtgtgcctgtgtccacccgttattcctttgctggcccaccagcatattgatcatccagatgcaagcactcaaatcggccccagccgctgtacaagttactgtaggcaatggcttcttgtacaccgttggaagccaggatagaacctgatggtagtagctttgcagtttaattattgcctttggtttcttttgcaagataaatctatgagatgtaatgtggaccttgtttgacccaagttgttttaactaaaatgcaaaacgatggatgtctttgtgttgatttgcagc

SEQ ID NO: 51475 - DNA, 1926 bp, Zea Mays
gaaaatggaaaagagtgcattatgagcacggcggctctatcagagcgtgatacattcacaagctgaagagggctcggtcatccggaccggaattcgtaaaggcattagtgcattagcatcgtcaccactcgcgccgtcgtactacctcgccgactccctcgcttcgcagagcaactgatcgtggggattcgattctccatagtttatttgcggggccgttccgatcagcgatggtgaagaggctcaggcgcaagggcgacgtctcctccgcgccgccgcctaaggccgccgcatctcggtcaaccaatcccgacaaatttaaaaagaagggggtcaaaaccgatccggagaaattgaaggcggcctgcactgaatccgcaaacattgctgaggcgtctgcttcagcgcagacacccaccccgaaaccagtcaagacgagtccggcggccgccgccgccgcagagattgcagatgatcgggtcgcccagagcaaaacggaggacggaaagtttagtaggaaggagacgatgaagggaagagaggagcagaagggagaaggggccagtgatggggtcacccagaccaagactgaggatatgaatgtgactaggaaggaaacgatgaaggggggagagaggaagggggacgggagtaggaaggagatgatgaaggggagggaagagcgtgtgaaaacggaagagaagacagggaaggaaaaggaggaggaaaagagtggctcaggattcatattcatgtgcagtgcaaggacgaagccagaatgctaccagaacggcgtgtttggccttcccagggggaagatggatgtggtggagaagatccagcgagggacgaagctgttcttgtatgattttgacctcaagctactgtatggggtgtacaaggcagatacaaggggaggattggatcttgtgcgtcacgcctttgatggcaaattccctgcacaggttaaatttagcgttttcaaggattgtcttcctattcctgagagtagtttcaagcatgccattaaggagaactacagctcaaagggcaggttcacccaagagctcaacactaaacaagttcaaagactattggcactgttcaagcctatcagcctttctaaaccagctccacaacatattgaggatattcgaaaaccaagtgattatgaagaaagaagacagttgcaacatattgaagaaagggctgcacctattaatgtccacgcacatcctcttgaagatcggtacaagatgacacggtcattacatccgccactttttgatgagcctcgacgtggtttggtgctaaatccttatcatatgcaagagcctcaacatgttcctcttaattactatcaccaagtggctactaggtctccataccatcaacctcatatggatattatgcacgaaagaactgcagctgaggtaactgtaagagatcaccaagcactgccaggagagcttgctgcacggtctgaacgcgtggatgagctgtaccgttcttacaaactctctacacgcgcaatggacctcagtccgggagcatcctacctgacaacttatgagcacccgactagtgtttatggtgagggcattcagaggccagctttgacaagggttagtggcccaagtgtgcctgtgtccacccgttattcctttgctggcccaccagcatattgatcatccagatgcaagcactcaaatcggccccagccgctgtacaagttactgtaggcaatggcttcttgtacaccgttggaagccaggatagaacctgatggtagtagctttgcagtttaattattgcctttggtttcttttgcaagataaatctatgagatgtaatgtggaccttgtttgacccaagttgttttaactaaaatgcaaaacgatggatgtctttgtgttgatttgcagc

SEQ ID NO: 51476 - DNA, 1857 bp, Zea Mays
gaaaatggaaaagagtgcattatgagcacggcggctctatcagagcgtgatacattcacaagctgaagagggctcggtcatccggaccggaattcgtaaaggcattagtgcattagcatcgtcaccactcgcgccgtcgtactacctcgccgactccctcgcttcgcagtttatttgcggggccgttccgatcagcgatggtgaagaggctcaggcgcaagggcgacgtctcctccgcgccgccgcctaaggccgccgcatctcggtcaaccaatcccgacaaatttaaaaagaagggggtcaaaaccgatccggagaaattgaaggcggcctgcactgaatccgcaaacattgctgaggcgtctgcttcagcgcagacacccaccccgaaaccagtcaagacgagtccggcggccgccgccgccgcagagattgcagatgatcgggtcgcccagagcaaaacggaggacggaaagtttagtaggaaggagacgatgaagggaagagaggagcagaagggagaaggggccagtgatggggtcacccagaccaagactgaggatatgaatgtgactaggaaggaaacgatgaaggggggagagaggaagggggacgggagtaggaaggagatgatgaaggggagggaagagcgtgtgaaaacggaagagaagacagggaaggaaaaggaggaggaaaagagtggctcaggattcatattcatgtgcagtgcaaggacgaagccagaatgctaccagaacggcgtgtttggccttcccagggggaagatggatgtggtggagaagatccagcgagggacgaagctgttcttgtatgattttgacctcaagctactgtatggggtgtacaaggcagatacaaggggaggattggatcttgtgcgtcacgcctttgatggcaaattccctgcacaggttaaatttagcgttttcaaggattgtcttcctattcctgagagtagtttcaagcatgccattaaggagaactacagctcaaagggcagactattggcactgttcaagcctatcagcctttctaaaccagctccacaacatattgaggatattcgaaaaccaagtgattatgaagaaagaagacagttgcaacatattgaagaaagggctgcacctattaatgtccacgcacatcctcttgaagatcggtacaagatgacacggtcattacatccgccactttttgatgagcctcgacgtggtttggtgctaaatccttatcatatgcaagagcctcaacatgttcctcttaattactatcaccaagtggctactaggtctccataccatcaacctcatatggatattatgcacgaaagaactgcagctgaggtaactgtaagagatcaccaagcactgccaggagagcttgctgcacggtctgaacgcgtggatgagctgtaccgttcttacaaactctctacacgcgcaatggacctcagtccgggagcatcctacctgacaacttatgagcacccgactagtgtttatggtgagggcattcagaggccagctttgacaagggttagtggcccaagtgtgcctgtgtccacccgttattcctttgctggcccaccagcatattgatcatccagatgcaagcactcaaatcggccccagccgctgtacaagttactgtaggcaatggcttcttgtacaccgttggaagccaggatagaacctgatggtagtagctttgcagtttaattattgcctttggtttcttttgcaagataaatctatgagatgtaatgtggaccttgtttgacccaagttgttttaactaaaatgcaaaacgatggatgtctttgtgttgatttgcagc

SEQ ID NO: 51477 - DNA, 1335 bp, Zea Mays
gaaaatggaaaagagtgcattatgagcacggcggctctatcagagcgtgatacattcacaagctgaagagggctcggtcatccggaccggaattcgtaaaggcattagtgcattagcatcgtcaccactcgcgccgtcgtactacctcgccgactccctcgcttcgcagtgcaaggacgaagccagaatgctaccagaacggcgtgtttggccttcccagggggaagatggatgtggtggagaagatccagcgagggacgaagctgttcttgtatgattttgacctcaagctactgtatggggtgtacaaggcagatacaaggggaggattggatcttgtgcgtcacgcctttgatggcaaattccctgcacaggttaaatttagcgttttcaaggattgtcttcctattcctgagagtagtttcaagcatgccattaaggagaactacagctcaaagggcaggttcacccaagagctcaacactaaacaagttcaaagactattggcactgttcaagcctatcagcctttctaaaccagctccacaacatattgaggatattcgaaaaccaagtgattatgaagaaagaagacagttgcaacatattgaagaaagggctgcacctattaatgtccacgcacatcctcttgaagatcggtacaagatgacacggtcattacatccgccactttttgatgagcctcgacgtggtttggtgctaaatccttatcatatgcaagagcctcaacatgttcctcttaattactatcaccaagtggctactaggtctccataccatcaacctcatatggatattatgcacgaaagaactgcagctgaggtaactgtaagagatcaccaagcactgccaggagagcttgctgcacggtctgaacgcgtggatgagctgtaccgttcttacaaactctctacacgcgcaatggacctcagtccgggagcatcctacctgacaacttatgagcacccgactagtgtttatggtgagggcattcagaggccagctttgacaagggttagtggcccaagtgtgcctgtgtccacccgttattcctttgctggcccaccagcatattgatcatccagatgcaagcactcaaatcggccccagccgctgtacaagttactgtaggcaatggcttcttgtacaccgttggaagccaggatagaacctgatggtagtagctttgcagtttaattattgcctttggtttcttttgcaagataaatctatgagatgtaatgtggaccttgtttgacccaagttgttttaactaaaatgcaaaacgatggatgtctttgtgttgatttgcagc

SEQ ID NO: 51478 - DNA, 553 bp, Zea Mays
ccccttctcctcctcggtgcttcacgttgagccaaggttaaatttagcgttttcaaggattgtcttcctattcctgagagtagtttcaagcatgccattaaggagaactacagctcaaagggcaggttcacccaagagctcaacactaaacaagttcaaagactattggcactgttcaagcctatcagcctttctaaaccagctccacaacatattgaggatattcgaaaaccaagtgattatgaagaaagaagacagttgcaacatattgaagaaagggctgcacctattaatgtccacgcacatcctcttgaagatcggtacaagatgacacggtcattacatccgccactttttgatgagcctcgacgtggtttggtgctaaatccttatcatatgcaagagcctcaacatgttcctcttaattactatcaccaagtggctactaggtctccataccatcaacctcatatggatattatgcacgaaagttcaactatgtcgacaaccatgttcaaccattgccttttgattcgtcattaggaaagccaag

SEQ ID NO: 51479 - DNA, 1743 bp, Zea Mays
gattcctcaaaccaaagaccctctaaaggtttatttgatttgatgtctaacttaccacactttacctaactttttctatctaaaattagttctttaattaagtaattaaccctagctaaaatttagcacagttagttacgaatcaaaaggccattaaagtcttctcgtggaaaagatgtgagccatccgttgcgtctaatcaatacggccaggaggggaggttcggcctgggacgctacccggtgtgagccgtcctcaccagtcaccgcagaagccacagaggggcagccgcctgcgcggtggccagcatcgtccggccgggttcgtcgggaagcgacccaaccccacgcccgcttccaacctcgttctgaccgacggcgaccgccgtgccgcgccaccgctatacttacatctgctccatcatccctcgcccgccgcgaccaccaacctcggcagggaaatccaactccggtttctcctcctcgcagcgtctctcccgcagtcggggagatccgggttggcccgcccggtaatccatccctcgccctcgtgccgcctgtaatttcgcctcctaacccgaccgccgggggccacagcggcgccggaggcggtggagtggggacgatggggatcggggcggtgtcggacgagttgctgggcacgttcgtgccgatcgccgtgtactggctctactcagggctctacgtcgcgctggatggggtggggcggctcgacggataccggctgcacaccagggaggaggccgctacgaagaacgtcgtctccaaggccgccgtcgtcagaggcgttctcgtccagcaggtcttccaggttattggtgatgagagtagtactggacagaagcaacctcctgttcttgtcatagtgttgcagtttataactgcaatggttgttatggacacatggcagtacttcatgcacagatacatgcacattaacaagtttctgtataaacacatccattctaagcaccatactcttgtagtcccttattcctttggagctctatacaaccatcctcttgagggccttattttggacaccattggtggtgcactctcattcctcgtctctggtatgactccacggacatccatattctttttctcctttgcaaccatcaaaactgtggatgatcattgtgggctgtggcttcctggtaatatcctccaggcgctgttcagcaataacagtgcttatcatgacattcaccatcagctctatggaaacaagtacaacttttcacaacccttctttgtgatgtgggacaagattctcggaacttacatgccctactctattgaacaacgaaaaggaggggggatcgaatcaaaaccagctaaactcgactgagctgaggataccaagactgattagtacatgcatgcatagtttctatttttttttttttgacttgtccaatactcatgccttgtggtactgctgactgcgcaaatgatgtacacaccctgtgtcataacttcatatagtgaggctgcttttgctctctacatttcttgttttgttttttagggtgttctatcttgtaacaagatacagtgagtaaagtattgtaatgtaccaaagaatactcaacaccacttggatttgtgttctgttgaattttctgttcttccatccgtcattttgttcggaagttgatattggcaatggccctctactcgtgcgtcctgttgttaaacaaagaaagttgatattggc

SEQ ID NO: 51480 - DNA, 1053 bp, Zea Mays
atctgtcgagcctgcaatttcaccttcatcaccaagccccactcattgtagttggtcttggtgagcacgggtgtgccactgctggactccttgacgacggtctagacgatggggcccatggcggccatgacgtcactctgggttattggtgatgagagtagtactggacagaagcaacctcctgttcttgtcatagtgttgcagtttataactgcaatggttgttatggacacatggcagtacttcatgcacagatacatgcacattaacaagtttctgtataaacacatccattctaagcaccatactcttgtagtcccttattcctttggagctctatacaaccatcctcttgagggccttattttggacaccattggtggtgcactctcattcctcgtctctggtatgactccacggacatccatattctttttctcctttgcaaccatcaaaactgtggatgatcattgtgggctgtggcttcctggtaatatcctccaggcgctgttcagcaataacagtgcttatcatgacattcaccatcagctctatggaaacaagtacaacttttcacaacccttctttgtgatgtgggacaagattctcggaacttacatgccctactctattgaacaacgaaaaggaggggggatcgaatcaaaaccagctaaactcgactgagctgaggataccaagactgattagtacatgcatgcatagtttctatttttttttttttgacttgtccaatactcatgccttgtggtactgctgactgcgcaaatgatgtacacaccctgtgtcataacttcatatagtgaggctgcttttgctctctacatttcttgttttgttttttagggtgttctatcttgtaacaagatacagtgagtaaagtattgtaatgtaccaaagaatactcaacaccacttggatttgtgttctgttgaattttctgttcttccatccgtcattttgttcggaagttgatattggcaatggccctctactcgtgcgtcctgttgttaaacaaagaaagttgatattggc

SEQ ID NO: 51481 - DNA, 3627 bp, Zea Mays
acaagggcaaaatttcgcccggtttctctcgctgcccatcccacctgtacggtgtacgcctcgccggagcgcgcgcgctgcgcggggcatgccggagctccgcctaccgataaacgccccggccgcggccgggtgccgccgccattcccggaggctacggcgccgctgccgcctaatcttcctccctctcctctccctcgctctcctctccctcgcctacctctccttttcgtcccatgccaacctcccaatccacgcaatgcattatggcctgtctaatagggagaatatttccaagtggaatggccacgaatacagccctgatgttacaaatatctctatgactaaagttgagctggaagcccccaaaagtcgaaagaaactacacaagcgctatgcaccatgccaaattcagtttttgccatcagtcgatgatcttgtggagcctgctcactatggaaattttacacagttctctttgagctatatattgaaggaagaagtattgcttcataatgacttcttcgaaccattgtttggtggataccagagtcttcgagatagagaagagacataccatgctaaagaccaaaccctccactgtggttttgttagatggccagatgattaccctagtacaggatttgatctggatgaaaatgatagaaggtatatggatacctgtcatgttgctgtatcatcatgtatttttggaagctctgattacttgaggagaccaactaaaagcagggacatgtgcctgatggaaatggattcataggcttatggagaagtgttgtagttaagaacttaccatacaaagatatgcggagagctgggaaggtgccaaaatttctagctcatcgactcttcccatctgccacgtattctatatggttggatagcaaactgcgcctccatgctgatccaatgcttattattgaatatttcttatggagaaagaaagcagaatacgccatctcaatgcactatgatcgctcttgcgtatgggaggaagtagtccaaaacaaacgcttgaacaagtacaatcatactgctattgatgagcaatttcacttttaccagtccgatggtcttgtcaagtttaatgactctggccaactgcctgttcttccaagctatgtacctgaaggatcattcattgtgcgtgctcatacaccgatgtctaacctgttttcatgcctttggtttaatgaagtaaaccgttttacctcacgtgaccagttgagtttcacatacacttatttgaagctcaggagaacgaatccagggaaaccttttcacctaaatatgtttaaggactgcgaaagaagagcaatagttaaactgttccatcaccgaactaacgagactacagatccaccaccagctaaccttcgtttggacacgattcgtcatccatacaggactgaggctgccatttgagaaatcaacagcaatgcgacttcaatttattgtgctgaatgtaccatagtaccaatgtgcctaacatgcttgtttgtagagaaaagaaatgaacctttgcacagccgttggcagtagaattgtagaaatcccaatggtctcacttcctcataaaaaaatcatttcgatttcagctttgtaatataaaaatgttcattgaacacatgaaatgttagaatgacacccttttaagctcatcggcaaaacgtgtaccattttctggctttgtaagtacattattgttgtatctccgaattttttaatcgatgggtgtctcctggttcaacattaaacaatctcatgaccagtgcggattctgatgactacttctatcaacactgcaaatcttgctaacaagttggtactttatttatggccaatgttttcacataaacgaaggacatctggatatagattgcaacgaaatcttgaattcttgatgccaaagccatagaagcatacatgacattaagaaagatgaaatggatgcaaaggaaacaaagaaactaccgaagtctgaatgcaacacaggaaacagataatatggcttcttagttcttgcagttgcagacccatcaaacaaaaagagtaagtgttgaacatctatgaaccacttcaatacaatcaccacttcagttcgcggtcaaccaataaccaatgtttgaacatctatgaacccagcggccaatgcaactgataaaagagaactcgagcataaagaaaaccgttttacaagagcagaaggatgccaactgctaatgaattatctcatgacagttttctatgcaagataacgatataattttctatctactttgtctctttccaagaactctcgttcaatcagagattcaatgcgtttctttatgacaacaggatttggcaagaaacgggcttgcaattgcttggtgacctcagctacaatgctgttatgatccaacaccctccgtgatttcatgatcctgacaatggctgcttcgatctgaggtttcctgtcctcctcaacccgttggcgagtctcctgtttctctggttcagattccttctgtgccaccactgtcccaatcttcactttaacaagcttgcttgtgaacttatcattgaagtagaatgtgtcatcctcagatatgtccttgctcataggctccttacggagaacatttttccccttgacacaagcaagtgactgcagacatctctttaggtctgaggcaggtatctcagtatcccgttcaatgtctttgtaggtcaatccatcagcattgttaaacagcatgagaacacacatctgataagtggatacatttagttcatgcttctggccttttccaaatgtggcttttatatcagctgtacccatgtttgtttgccatgtcaatctcctgccattgtgagttccaagataatatgcccggaatttctcacatactgtaagtatttcagttggaaggttgcaaggaggactgggctgcgtaggccaagaaccagttgtcaaaatgtggacatcaagcgtagggccatccccaagttcctcagacttcttggcatagaagtcttgcatggtgtcctgggaggttttcatatcagtgaacatgccctctagcttggaagtgaactggtatccacattctgtcttgagtttaactatcatacttctctcagcatcatcagaaacagttttgctagacaggagccttttcgccaaatgctgcttatagtacttttcaaacacatccttctcctggaggtatcggaacagcatcatgactttgtccaatataacttccacatcttcttccgttgctcctttaagtcctttgcggagtttgtcatcaacatataatgatatgaattcaggtgatcggctgtttaagttgaggaaatactcgaaagacgaattcagagcattctggaaggttttgtcattgccgaaggcaacactgatgatcttatcatgtttgtccttctcatttaacaagcgttgaacaaattccactggatctttcaaactttctggatctatcactaactgcttccctgtttccctcaagtaagaagtcatgacatctctaatcgttgataacccatcaggaacccttcggaacaaggaatacatccgacccaaatctttgtattggtcat

SEQ ID NO: 51482 - DNA, 3624 bp, Zea Mays
acaagggcaaaatttcgcccggtttctctcgctgcccatcccacctgtacggtgtacgcctcgccggagcgcgcgcgctgcgcggggcatgccggagctccgcctaccgataaacgccccggccgcggccgggtgccgccgccattcccggaggctacggcgccgctgccgcctaatcttcctccctctcctctccctcgctctcctctccctcgcctacctctccttttcgtcccatgccaacctcccaatccacgcaatgcattatggcctgtctaatagggagaatatttccaagtggaatggccacgaatacagccctgatgttacaaatatctctatgactaaagttgagctggaagcccccaaaagtcgaaagaaactacacaagcgctatgcaccatgccaaattcagtttttgccatcagtcgatgatcttgtggagcctgctcactatggaaattttacacagttctctttgagctatatattgaaggaagaagtattgcttcataatgacttcttcgaaccattgtttggtggataccagagtcttcgagatagagaagagacataccatgctaaagaccaaaccctccactgtggttttgttagatggccagatgattaccctagtacaggatttgatctggatgaaaatgatagaagattggctcttatgctaagaagaatgtgtgcttcgtcatgttcatggatgagctaacactggcaaccctttcctccgaaggacatgtgcctgatggaaatggattcataggcttatggagaagtgttgtagttaagaacttaccatacaaagatatgcggagagctgggaaggtgccaaaatttctagctcatcgactcttcccatctgccacgtattctatatggttggatagcaaactgcgcctccatgctgatccaatgcttattattgaatatttcttatggagaaagaaagcagaatacgccatctcaatgcactatgatcgctcttgcgtatgggaggaagtagtccaaaacaaacgcttgaacaagtacaatcatactgctattgatgagcaatttcacttttaccagtccgatggtcttgtcaagtttaatgactctggccaactgcctgttcttccaagctatgtacctgaaggatcattcattgtgcgtgctcatacaccgatgtctaacctgttttcatgcctttggtttaatgaagtaaaccgttttacctcacgtgaccagttgagtttcacatacacttatttgaagctcaggagaacgaatccagggaaaccttttcacctaaatatgtttaaggactgcgaaagaagagcaatagttaaactgttccatcaccgaactaacgagactacagatccaccaccagctaaccttcgtttggacacgattcgtcatccatacaggactgaggctgccatttgagaaatcaacagcaatgcgacttcaatttattgtgctgaatgtaccatagtaccaatgtgcctaacatgcttgtttgtagagaaaagaaatgaacctttgcacagccgttggcagtagaattgtagaaatcccaatggtctcacttcctcataaaaaaatcatttcgatttcagctttgtaatataaaaatgttcattgaacacatgaaatgttagaatgacacccttttaagctcatcggcaaaacgtgtaccattttctggctttgtaagtacattattgttgtatctccgaattttttaatcgatgggtgtctcctggttcaacattaaacaatctcatgaccagtgcggattctgatgactacttctatcaacactgcaaatcttgctaacaagttggtactttatttatggccaatgttttcacataaacgaaggacatctggatatagattgcaacgaaatcttgaattcttgatgccaaagccatagaagcatacatgacattaagaaagatgaaatggatgcaaaggaaacaaagaaactaccgaagtctgaatgcaacacaggaaacagataatatggcttcttagttcttgcagttgcagacccatcaaacaaaaagagtaagtgttgaacatctatgaaccacttcaatacaatcaccacttcagttcgcggtcaaccaataaccaatgtttgaacatctatgaacccagcggccaatgcaactgataaaagagaactcgagcataaagaaaaccgttttacaagagcagaaggatgccaactgctaatgaattatctcatgacagttttctatgcaagataacgatataattttctatctactttgtctctttccaagaactctcgttcaatcagagattcaatgcgtttctttatgacaacaggatttggcaagaaacgggcttgcaattgcttggtgacctcagctacaatgctgttatgatccaacaccctccgtgatttcatgatcctgacaatggctgcttcgatctgaggtttcctgtcctcctcaacccgttggcgagtctcctgtttctctggttcagattccttctgtgccaccactgtcccaatcttcactttaacaagcttgcttgtgaacttatcattgaagtagaatgtgtcatcctcagatatgtccttgctcataggctccttacggagaacatttttccccttgacacaagcaagtgactgcagacatctctttaggtctgaggcaggtatctcagtatcccgttcaatgtctttgtaggtcaatccatcagcattgttaaacagcatgagaacacacatctgataagtggatacatttagttcatgcttctggccttttccaaatgtggcttttatatcagctgtacccatgtttgtttgccatgtcaatctcctgccattgtgagttccaagataatatgcccggaatttctcacatactgtaagtatttcagttggaaggttgcaaggaggactgggctgcgtaggccaagaaccagttgtcaaaatgtggacatcaagcgtagggccatccccaagttcctcagacttcttggcatagaagtcttgcatggtgtcctgggaggttttcatatcagtgaacatgccctctagcttggaagtgaactggtatccacattctgtcttgagtttaactatcatacttctctcagcatcatcagaaacagttttgctagacaggagccttttcgccaaatgctgcttatagtacttttcaaacacatccttctcctggaggtatcggaacagcatcatgactttgtccaatataacttccacatcttcttccgttgctcctttaagtcctttgcggagtttgtcatcaacatataatgatatgaattcaggtgatcggctgtttaagttgaggaaatactcgaaagacgaattcagagcattctggaaggttttgtcattgccgaaggcaacactgatgatcttatcatgtttgtccttctcatttaacaagcgttgaacaaattccactggatctttcaaactttctggatctatcactaactgcttccctgtttccctcaagtaagaagtcatgacatctctaatcgttgataacccatcaggaacccttcggaacaaggaatacatccgacccaaatctttgtattggtcat

SEQ ID NO: 51483 - DNA, 4612 bp, Zea Mays
acaagggcaaaatttcgcccggtttctctcgctgcccatcccacctgtacggtgtacgcctcgccggagcgcgcgcgctgcgcggggcatgccggagctccgcctaccgataaacgccccggccgcggccgggtgccgccgccattcccggaggctacggcgccgctgccgcctaatcttcctccctctcctctccctcgctctcctctccctcgcctacctctccttttcgtcccatgccaacctcccaatccacgcaatgcattatggcctgtctaatagggagaatatttccaagtggaatggccacgaatacagccctgatgttacaaatatctctatgactaaagttgagctggaagcccccaaaagtcgaaagaaactacacaagcgctgtaagacttctctttacactctgtacaggccgcgcttctcaaagatgagacatttttaatcaaatgcaacaaataacttttatcagctttttgggccatatatgcacctatttgcattccatagttatgtattttattagtgagtgattgtgtgcctaactgctgcattcaggtcctgcccaaaaaggaaaaaaaaactgcagcattcaagtgataagtgatctagacacggcttgtttgcttgccgccctggcctagagccctggtctagacacagctgtaaatttttggacacaaggactagagccctcaaagacacatgcattcctatgcttccaactccgaagcaagcagaatgacaagcgaattcagtccttttctttgctcttttggaacagccttgattgtcttgcactaccagctggaaaaacgagaatcctttacctgtggtgcaaggggaagcaaaccccacatgaaagatagttgtccaaacctggcttgcgaaaacacaagcaacaagggtatgctgtattgtttatcagccttatcgcagggagggcaaacaaatgggtgatgaagtcctcttgtttcaaggcggtcaaatgagactgcagttgctagcctgggtttgcatcttgctatatttcaaccacatgcccccccccctctctctcttttctgcttaggtaggaacaaaccttggcatacctttttttgtgggaatatgtattttatctcaaggtagtactgaataatctgattaggccctaccttacatatgatcgttgccacaaaacaagttagtttaaaaaatctgataggccctaccttatatatgctacatgaatcattgtacaaaaatatgttagagaagtttctgtttacttacgaaatacaacattgcagatgcaccatgccaaattcagtttttgccatcagtcgatgatcttgtggagcctgctcactatggaaattttacacagttctctttgagctatatattgaaggaagaagtattgcttcataatgacttcttcgaaccattgtttggtggataccagagtcttcgagatagagaagagacataccatgctaaagaccaaaccctccactgtggttttgttagatggccagatgattaccctagtacaggatttgatctggatgaaaatgatagaaggtatatggatacctgtcatgttgctgtatcatcatgtatttttggaagctctgattacttgaggagaccaactaaaagcaggattggctcttatgctaagaagaatgtgtgcttcgtcatgttcatggatgagctaacactggcaaccctttcctccgaaggacatgtgcctgatggaaatggattcataggcttatggagaagtgttgtagttaagaacttaccatacaaagatatgcggagagctgggaaggtgccaaaatttctagctcatcgactcttcccatctgccacgtattctatatggttggatagcaaactgcgcctccatgctgatccaatgcttattattgaatatttcttatggagaaagaaagcagaatacgccatctcaatgcactatgatcgctcttgcgtatgggaggaagtagtccaaaacaaacgcttgaacaagtacaatcatactgctattgatgagcaatttcacttttaccagtccgatggtcttgtcaagtttaatgactctggccaactgcctgttcttccaagctatgtacctgaaggatcattcattgtgcgtgctcatacaccgatgtctaacctgttttcatgcctttggtttaatgaagtaaaccgttttacctcacgtgaccagttgagtttcacatacacttatttgaagctcaggagaacgaatccagggaaaccttttcacctaaatatgtttaaggactgcgaaagaagagcaatagttaaactgttccatcaccgaactaacgagactacagatccaccaccagctaaccttcgtttggacacgattcgtcatccatacaggactgaggctgccatttgagaaatcaacagcaatgcgacttcaatttattgtgctgaatgtaccatagtaccaatgtgcctaacatgcttgtttgtagagaaaagaaatgaacctttgcacagccgttggcagtagaattgtagaaatcccaatggtctcacttcctcataaaaaaatcatttcgatttcagctttgtaatataaaaatgttcattgaacacatgaaatgttagaatgacacccttttaagctcatcggcaaaacgtgtaccattttctggctttgtaagtacattattgttgtatctccgaattttttaatcgatgggtgtctcctggttcaacattaaacaatctcatgaccagtgcggattctgatgactacttctatcaacactgcaaatcttgctaacaagttggtactttatttatggccaatgttttcacataaacgaaggacatctggatatagattgcaacgaaatcttgaattcttgatgccaaagccatagaagcatacatgacattaagaaagatgaaatggatgcaaaggaaacaaagaaactaccgaagtctgaatgcaacacaggaaacagataatatggcttcttagttcttgcagttgcagacccatcaaacaaaaagagtaagtgttgaacatctatgaaccacttcaatacaatcaccacttcagttcgcggtcaaccaataaccaatgtttgaacatctatgaacccagcggccaatgcaactgataaaagagaactcgagcataaagaaaaccgttttacaagagcagaaggatgccaactgctaatgaattatctcatgacagttttctatgcaagataacgatataattttctatctactttgtctctttccaagaactctcgttcaatcagagattcaatgcgtttctttatgacaacaggatttggcaagaaacgggcttgcaattgcttggtgacctcagctacaatgctgttatgatccaacaccctccgtgatttcatgatcctgacaatggctgcttcgatctgaggtttcctgtcctcctcaacccgttggcgagtctcctgtttctctggttcagattccttctgtgccaccactgtcccaatcttcactttaacaagcttgcttgtgaacttatcattgaagtagaatgtgtcatcctcagatatgtccttgctcataggctccttacggagaacatttttccccttgacacaagcaagtgactgcagacatctctttaggtctgaggcaggtatctcagtatcccgttcaatgtctttgtaggtcaatccatcagcattgttaaacagcatgagaacacacatctgataagtggatacatttagttcatgcttctggccttttccaaatgtggcttttatatcagctgtacccatgtttgtttgccatgtcaatctcctgccattgtgagttccaagataatatgcccggaatttctcacatactgtaagtatttcagttggaaggttgcaaggaggactgggctgcgtaggccaagaaccagttgtcaaaatgtggacatcaagcgtagggccatccccaagttcctcagacttcttggcatagaagtcttgcatggtgtcctgggaggttttcatatcagtgaacatgccctctagcttggaagtgaactggtatccacattctgtcttgagtttaactatcatacttctctcagcatcatcagaaacagttttgctagacaggagccttttcgccaaatgctgcttatagtacttttcaaacacatccttctcctggaggtatcggaacagcatcatgactttgtccaatataacttccacatcttcttccgttgctcctttaagtcctttgcggagtttgtcatcaacatataatgatatgaattcaggtgatcggctgtttaagttgaggaaatactcgaaagacgaattcagagcattctggaaggttttgtcattgccgaaggcaacactgatgatcttatcatgtttgtccttctcatttaacaagcgttgaacaaattccactggatctttcaaactttctggatctatcactaactgcttccctgtttccctcaagtaagaagtcatgacatctctaatcgttgataacccatcaggaacccttcggaacaaggaatacatccgacccaaatctttgtattggtcat

SEQ ID NO: 51484 - DNA, 3942 bp, Zea Mays
acaagggcaaaatttcgcccggtttctctcgctgcccatcccacctgtacggtgtacgcctcgccggagcgcgcgcgctgcgcggggcatgccggagctccgcctaccgataaacgccccggccgcggccgggtgccgccgccattcccggaggctacggcgccgctgccgcctaatcttcctccctctcctctccctcgctctcctctccctcgcctacctctccttttcgtcccatgccaacctcccaatccacgcaatgcattatggcctgtctaatagggagaatatttccaagtggaatggccacgaatacagccctgatgttacaaatatctctatgactaaagttgagctggaagcccccaaaagtcgaaagaaactacacaagcgctatgcaccatgccaaattcagtttttgccatcagtcgatgatcttgtggagcctgctcactatggaaattttacacagttctctttgagctatatattgaaggaagaagtattgcttcataatgacttcttcgaaccattgtttggtggataccagagtcttcgagatagagaagagacataccatgctaaagaccaaaccctccactgtggttttgttagatggccagatgattaccctagtacaggatttgatctggatgaaaatgatagaaggtatatggatacctgtcatgttgctgtatcatcatgtatttttggaagctctgattacttgaggagaccaactaaaagcagggtgattttctaatctcttttgtatggatgagctccactgtccctgtgctgtattaaatagcttgtttccagtagcaaaatggcttaagtataaggtttacacttctagttgatttttatgttctgtcatgatggatattcattggcctttactccttatcagtattttatttcatgaatatttcttgttttttataagtctatagtaattgtacaacataccataacctctcacagattggctcttatgctaagaagaatgtgtgcttcgtcatgttcatggatgagctaacactggcaaccctttcctccgaaggacatgtgcctgatggaaatggattcataggcttatggagaagtgttgtagttaagaacttaccatacaaagatatgcggagagctgggaaggtgccaaaatttctagctcatcgactcttcccatctgccacgtattctatatggttggatagcaaactgcgcctccatgctgatccaatgcttattattgaatatttcttatggagaaagaaagcagaatacgccatctcaatgcactatgatcgctcttgcgtatgggaggaagtagtccaaaacaaacgcttgaacaagtacaatcatactgctattgatgagcaatttcacttttaccagtccgatggtcttgtcaagtttaatgactctggccaactgcctgttcttccaagctatgtacctgaaggatcattcattgtgcgtgctcatacaccgatgtctaacctgttttcatgcctttggtttaatgaagtaaaccgttttacctcacgtgaccagttgagtttcacatacacttatttgaagctcaggagaacgaatccagggaaaccttttcacctaaatatgtttaaggactgcgaaagaagagcaatagttaaactgttccatcaccgaactaacgagactacagatccaccaccagctaaccttcgtttggacacgattcgtcatccatacaggactgaggctgccatttgagaaatcaacagcaatgcgacttcaatttattgtgctgaatgtaccatagtaccaatgtgcctaacatgcttgtttgtagagaaaagaaatgaacctttgcacagccgttggcagtagaattgtagaaatcccaatggtctcacttcctcataaaaaaatcatttcgatttcagctttgtaatataaaaatgttcattgaacacatgaaatgttagaatgacacccttttaagctcatcggcaaaacgtgtaccattttctggctttgtaagtacattattgttgtatctccgaattttttaatcgatgggtgtctcctggttcaacattaaacaatctcatgaccagtgcggattctgatgactacttctatcaacactgcaaatcttgctaacaagttggtactttatttatggccaatgttttcacataaacgaaggacatctggatatagattgcaacgaaatcttgaattcttgatgccaaagccatagaagcatacatgacattaagaaagatgaaatggatgcaaaggaaacaaagaaactaccgaagtctgaatgcaacacaggaaacagataatatggcttcttagttcttgcagttgcagacccatcaaacaaaaagagtaagtgttgaacatctatgaaccacttcaatacaatcaccacttcagttcgcggtcaaccaataaccaatgtttgaacatctatgaacccagcggccaatgcaactgataaaagagaactcgagcataaagaaaaccgttttacaagagcagaaggatgccaactgctaatgaattatctcatgacagttttctatgcaagataacgatataattttctatctactttgtctctttccaagaactctcgttcaatcagagattcaatgcgtttctttatgacaacaggatttggcaagaaacgggcttgcaattgcttggtgacctcagctacaatgctgttatgatccaacaccctccgtgatttcatgatcctgacaatggctgcttcgatctgaggtttcctgtcctcctcaacccgttggcgagtctcctgtttctctggttcagattccttctgtgccaccactgtcccaatcttcactttaacaagcttgcttgtgaacttatcattgaagtagaatgtgtcatcctcagatatgtccttgctcataggctccttacggagaacatttttccccttgacacaagcaagtgactgcagacatctctttaggtctgaggcaggtatctcagtatcccgttcaatgtctttgtaggtcaatccatcagcattgttaaacagcatgagaacacacatctgataagtggatacatttagttcatgcttctggccttttccaaatgtggcttttatatcagctgtacccatgtttgtttgccatgtcaatctcctgccattgtgagttccaagataatatgcccggaatttctcacatactgtaagtatttcagttggaaggttgcaaggaggactgggctgcgtaggccaagaaccagttgtcaaaatgtggacatcaagcgtagggccatccccaagttcctcagacttcttggcatagaagtcttgcatggtgtcctgggaggttttcatatcagtgaacatgccctctagcttggaagtgaactggtatccacattctgtcttgagtttaactatcatacttctctcagcatcatcagaaacagttttgctagacaggagccttttcgccaaatgctgcttatagtacttttcaaacacatccttctcctggaggtatcggaacagcatcatgactttgtccaatataacttccacatcttcttccgttgctcctttaagtcctttgcggagtttgtcatcaacatataatgatatgaattcaggtgatcggctgtttaagttgaggaaatactcgaaagacgaattcagagcattctggaaggttttgtcattgccgaaggcaacactgatgatcttatcatgtttgtccttctcatttaacaagcgttgaacaaattccactggatctttcaaactttctggatctatcactaactgcttccctgtttccctcaagtaagaagtcatgacatctctaatcgttgataacccatcaggaacccttcggaacaaggaatacatccgacccaaatctttgtattggtcat

SEQ ID NO: 51485 - DNA, 2607 bp, Zea Mays
ggaatctactactactctataagggtgtaaggagggcgtccaccatgcccccgcccgacgcccccttgcccccgtccatctcgccgcaaggcacgcggcgcgcctcgcgatgccccctcgcccccgtttgtctcgccgtgatgcgtgcggcgcgcctcgcgatgccctctcgcccatgcccctgctcgcctcttctccgccccatccccctgtgtctagcgcgctacccgcccctcccaacgtcgtcctctccgtcccatcctcccatcgtgcgacaaccgatccacgcctcgaggcccaggccgtgccacgccggtggggaagcgaaactcacttacaggacgcggatctccttccaaactcgaaggcgacgatccggcacaggggcaaccttccatggtaggcgagatccacggcccactcgcgatgcgcccccatgtcagccactcccgttcgtcacctcacgatccgatgaaggcgaagggcgcacctaaagcattgtggcaagccggtatctgccgcagcggcggtagaggtcttcgaggagcacaaaggtgagggcggaggaggcgtaggaaccgagggtaccaaagtcgattcaacagaatgagacagtggtttgcaaggatctgtgcacgaggttggtgttgcggtggagggagcaaacaacacaggtgtagctgcttgtggggtggggacaatgaggcagcaagactcaaggtccaggatgatgaacaacaacagcggcgtcgacgcaggaggccctggttcaggcatgggtctgggagtgccggatgtgccattggggtcaatagtaattcacgataatgcagggtgctgtcagcaagaacatggagagccttgccgtcttggccttccaatattttatgaatttggtgattggataaaggaacaatcttttccttttgcagattaagacaaaaggggtcacaatgacagcgctgttggctaaggcgacagcaacggctctgcttcagcatcctatggtgaacttgcagctgcagggatggaaagagcttcacatacaaaaatagtatcaacattgctatagcagtggccatagatggtgggttgattacatcggttcttcaagatgctggtgggctaggggttatctagagatgacaaggccctcaagttggctttccagcactggatcgaagcgatgagtacaaacgggcagtggggattgagcacgtgggagagcgccgcagctgctgcggctgtggcggatgtggcggccatggcgtggcgacctgtggcaaatggcggcatgaagaagaagctgatttgaggagtcgtcgctggactgggagaagtacatgaaggacaataacaaaattctcggagaatttgagtgccttgacaaatcaccatttagatactttcttggggaactatatggtggcaattcactgggaagcacaattgcagtgggcaatgagaagaagcggcagcgggtgtacaacactatgtttcatgtcccatggagatgtgaacggggaaattcagagtcgtgttcgcctcaattcctgcacccatctttgcagctctatattgttcaacaaaagatttgggaactgggatagctgaagatgcctctactgaagatgatgatttcagtggcgacctaccaccagagtttgaaaatatcatgatattcaatggtgttgaaaccgagagtgacattgctcctccagtgctcgaggaaaacaaggatgctgttgtatctgcaacaaaaactgcaaagtccctggatgggtttgccttaaaaacagggcaggaggaggagggtccggaagaggttgatgctactgaaaaagcaatggaagtggttgataatgttgtgaagtccctggatgaagaggtagaatcaaaggagatgcagaagcagcaaccgcatgattataatagcatgagcctaggggtggtaacgggtcatttaatttagcctagcaaatttacggatcgaatcaagttagggccggatcataaaataatacaattttgaactaataaaattaagggctttgttggttcgtgaagcaagtattagggccatgatccattaccactcctacatgagcctcaggaatcttaaagccacacacaagaaatatctcattgctgcaaaggaagaggaggtcaccgaagggaagaggcttcctctcgaggaggtggaagagaacgcatgcatcagccactgaacagaacaagcaggcgatttttttgtgtggatggcgtctgccacaaaaggattgaatcgaggagtgtgctctggttgtgaagtgataactaggctaccacatgttcattttcaaaagttttcgtgtgtgatcgtgatcaggggtgaaactgtggtttcagccaacaaacttgcagttcctattgcttctccccacttttttcctttatatatattttgtatcggttacagaacatggtttatccagtggtatgctgatgaaagatgctaagtttcgcttaatataatgtatatgaaggtcctgggtacctcaaattttgtccacattgaaccagtacgaatgacatcttccttgaaagttatagaaatgcttcaaagtt

SEQ ID NO: 51486 - DNA, 3242 bp, Zea Mays
ggaatctactactactctataagggtgtaaggagggcgtccaccatgcccccgcccgacgcccccttgcccccgtccatctcgccgcaaggcacgcggcgcgcctcgcgatgccccctcgcccccgtttgtctcgccgtgatgcgtgcggcgcgcctcgcgatgccctctcgcccatgcccctgctcgcctcttctccgccccatccccctgtgtctagcgcgctacccgcccctcccaacgtcgtcctctccgtcccatcctcccatcgtgcgacaaccgatccacgcctcgaggcccaggccgtgccacgccggtggggaagcgaaactcacttacaggacgcggatctccttccaaactcgaaggcgacgatccggcacaggggcaaccttccatggtaggcgagatccacggcccactcgcgatgcgcccccatgtcagccactcccgttcgtcacctcacgatccgatgaaggcgaagggcgcacctaaagcattgtggcaagccggtatctgccgcagcggcggtagaggtcttcgaggagcacaaaggtgagggcggaggaggcgtaggaaccgagggtaccaaagtcgattcaacagaatgagacagtggtttgcaaggatctgtgcacgaggttggtgttgcggtggagggagcaaacaacacagctgcttgtggggtggggacaatgaggcagcaagactcaaggtccaggatgatgaacaacaacagcggcgtcgacgcaggaggccctggttcaggcatgggtctgggagtgccggatgtgccattggggtcaatagtaattcacgataatgcaggattaagacaaaaggggtcacaatgacagcgctgttggctaaggcgacagcaacggctctgcttcagcatcctatggtgaacttgcagctgcagggatggaaagagcttcacatacaaaaatagtatcaacattgctatagcagtggccatagatggtgggttgattacatcggttcttcaagatgctgaaggagttagttgataaggcgctagcaaagcagttgcagccccatgagtacaactctgatatttttttgcctcatacacaaatatgaatatgtagcacattgttgtatatcttttctaatgctctgaataagatgtggtggtacagtgcagaataatatgttctgttttttattcaactattcaaatcttatttttattcggctattcaaatcatattttttttattagctgattgccggagagattgaaatcaaaggggttgagctgcaggagagttgtagtttgtcgttcttttccatggtaggcattttcattgggatcatacaattattctctgtcgatgtttacaagaaaatagtatctaaaaacaagatgcttctgttccatgagggtgtgattgagactgaaacggtgggtaccagagtgaaggagtcggaggcagttttagtagagaaagaggtcgaactgatcgatgagcctcagattcaagagagccctccagttcctgcattgttggatgatgagcaaccatattacttgaatcagctagcccatgttttgaaagttgtattggtacctcttctatggttagtggtggaatggcctgaacagtcctatgaaacagcaaaaactctgttacagtccactcagatagaattcttgctttcgtgtagatctaggtcatcgtgtcgccgtctttgtttggctggttgtagagcccccgctctaggtttgtttagctcctcggttcttctagctccggtatggtttcctttttgcgcatagtggcggcatctgatgcatagttcgacggtccctcgcgttgctccgagcacgtgggagagcgccgcagctgctgcggctgtggcggatgtggcggccatggcgtggcgacctgtggcaaatggcggcatgaagaagaagctgatttgaggagtcgtcgctggactgggagaagtacatgaaggacaataacaaaattctcggagaatttgagtgccttgacaaatcaccatttagatactttcttggggaactatatggtggcaattcactgggaagcacaattgcagtgggcaatgagaagaagcggcagcgggtgtacaacactatgtttcatgtcccatggagatgtgaacggggaaattcagagtcgtgttcgcctcaattcctgcacccatctttgcagctctatattgttcaacaaaagatttgggaactgggatagctgaagatgcctctactgaagatgatgatttcagtggcgacctaccaccagagtttgaaaatatcatgatattcaatggtgttgaaaccgagagtgacattgctcctccagtgctcgaggaaaacaaggatgctgttgtatctgcaacaaaaactgcaaagtccctggatgggtttgccttaaaaacagggcaggaggaggagggtccggaagaggttgatgctactgaaaaagcaatggaagtggttgataatgttgtgaagtccctggatgaagaggtagaatcaaaggagatgcagaagcagcaaccgcatgattataatagcatgagcctaggggtggtaacgggtcatttaatttagcctagcaaatttacggatcgaatcaagttagggccggatcataaaataatacaattttgaactaataaaattaagggctttgttggttcgtgaagcaagtattagggccatgatccattaccactcctacatgagcctcaggaatcttaaagccacacacaagaaatatctcattgctgcaaaggaagaggaggtcaccgaagggaagaggcttcctctcgaggaggtggaagagaacgcatgcatcagccactgaacagaacaagcaggcgatttttttgtgtggatggcgtctgccacaaaaggattgaatcgaggagtgtgctctggttgtgaagtgataactaggctaccacatgttcattttcaaaagttttcgtgtgtgatcgtgatcaggggtgaaactgtggtttcagccaacaaacttgcagttcctattgcttctccccacttttttcctttatatatattttgtatcggttacagaacatggtttatccagtggtatgctgatgaaagatgctaagtttcgcttaatataatgtatatgaaggtcctgggtacctcaaattttgtccacattgaaccagtacgaatgacatcttccttgaaagttatagaaatgcttcaaagtt

SEQ ID NO: 51487 - DNA, 3472 bp, Zea Mays
ggaatctactactactctataagggtgtaaggagggcgtccaccatgcccccgcccgacgcccccttgcccccgtccatctcgccgcaaggcacgcggcgcgcctcgcgatgccccctcgcccccgtttgtctcgccgtgatgcgtgcggcgcgcctcgcgatgccctctcgcccatgcccctgctcgcctcttctccgccccatccccctgtgtctagcgcgctacccgcccctcccaacgtcgtcctctccgtcccatcctcccatcgtgcgacaaccgatccacgcctcgaggcccaggccgtgccacgccggtggggaagcgaaactcacttacaggacgcggatctccttccaaactcgaaggcgacgatccggcacaggggcaaccttccatggtaggcgagatccacggcccactcgcgatgcgcccccatgtcagccactcccgttcgtcacctcacgatccgatgaaggcgaagggcgcacctaaagcattgtggcaagccggtatctgccgcagcggcggtagaggtcttcgaggagcacaaaggtgagggcggaggaggcgtaggaaccgagggtaccaaagtcgattcaacagaatgagacagtggtttgcaaggatctgtgcacgaggttggtgttgcggtggagggagcaaacaacacagctgcttgtggggtggggacaatgaggcagcaagactcaaggtccaggatgatgaacaacaacagcggcgtcgacgcaggaggccctggttcaggcatgggtctgggagtgccggatgtgccattggggtcaatagtaattcacgataatgcagggtgctgtcagcaagaacatggagagccttgccgtcttggccttccaatattttatgaatttggtgattggataaaggaacaatcttttccttttgcagattaagacaaaaggggtcacaatgacagcgctgttggctaaggcgacagcaacggctctgcttcagcatcctatggtgaacttgcagctgcagggatggaaagagcttcacatacaaaaatagtatcaacattgctatagcagtggccatagatggtgggttgattacatcggttcttcaagatgctggtaaggtcaaacactttaccgtgcacaatgaatgttgattttttatgatttatttaaatgagtggttacttgttggtttatgcgtcttgacatttattcattgtcaaggaaacagaaggagttagttgataaggcgctagcaaagcagttgcagccccatgagtacaactctgatatttttttgcctcatacacaaatatgaatatgtagcacattgttgtatatcttttctaatgctctgaataagatgtggtggtacagtgcagaataatatgttctgttttttattcaactattcaaatcttatttttattcggctattcaaatcatattttttttattagctgattgccggagagattgaaatcaaaggggttgagctgcaggagagttgtagtttgtcgttcttttccatgggtgtgattgagactgaaacggtgggtaccagagtgaaggagtcggaggcagttttagtagagaaagaggtcgaactgatcgatgagcctcagattcaagagagccctccagttcctgcattgttggatgatgagcaaccatattacttgaatcagctagcccatgttttgaaagttgtattggtacctcttctatggttagtggtggaatggcctgaacagtcctatgaaacagcaaaaactctgttacagtccactcaggtggaagaggttgtttgtagatgttttttgttttcatatctgaactgtaatagtaaggttacaataatttttcacatagctgatggaacttctgtttgtgtgaagccaacagatggtccctcctgctaattagaaaccaatttttttagactttttcagcctcctctactgctcatgttgctggcttgtaataggtgggctaggggttatctagagatgacaaggccctcaagttggctttccagcactggatcgaagcgatgagtacaaacgggcagtggggattgagcacgtgggagagcgccgcagctgctgcggctgtggcggatgtggcggccatggcgtggcgacctgtggcaaatggcggcatgaagaagaagctgatttgaggagtcgtcgctggactgggagaagtacatgaaggacaataacaaaattctcggagaatttgagtgccttgacaaatcaccatttagatactttcttggggaactatatggtggcaattcactgggaagcacaattgcagtgggcaatgagaagaagcggcagcgggtgtacaacactatgtttcatgtcccatggagatgtgaacggggaaattcagagtcgtgttcgcctcaattcctgcacccatctttgcagctctatattgttcaacaaaagatttgggaactgggatagctgaagatgcctctactgaagatgatgatttcagtggcgacctaccaccagagtttgaaaatatcatgatattcaatggtgttgaaaccgagagtgacattgctcctccagtgctcgaggaaaacaaggatgctgttgtatctgcaacaaaaactgcaaagtccctggatgggtttgccttaaaaacagggcaggaggaggagggtccggaagaggttgatgctactgaaaaagcaatggaagtggttgataatgttgtgaagtccctggatgaagaggtagaatcaaaggagatgcagaagcagcaaccgcatgattataatagcatgagcctaggggtggtaacgggtcatttaatttagcctagcaaatttacggatcgaatcaagttagggccggatcataaaataatacaattttgaactaataaaattaagggctttgttggttcgtgaagcaagtattagggccatgatccattaccactcctacatgagcctcaggaatcttaaagccacacacaagaaatatctcattgctgcaaaggaagaggaggtcaccgaagggaagaggcttcctctcgaggaggtggaagagaacgcatgcatcagccactgaacagaacaagcaggcgatttttttgtgtggatggcgtctgccacaaaaggattgaatcgaggagtgtgctctggttgtgaagtgataactaggctaccacatgttcattttcaaaagttttcgtgtgtgatcgtgatcaggggtgaaactgtggtttcagccaacaaacttgcagttcctattgcttctccccacttttttcctttatatatattttgtatcggttacagaacatggtttatccagtggtatgctgatgaaagatgctaagtttcgcttaatataatgtatatgaaggtcctgggtacctcaaattttgtccacattgaaccagtacgaatgacatcttccttgaaagttatagaaatgcttcaaagtt

SEQ ID NO: 51488 - DNA, 3681 bp, Zea Mays
ggaatctactactactctataagggtgtaaggagggcgtccaccatgcccccgcccgacgcccccttgcccccgtccatctcgccgcaaggcacgcggcgcgcctcgcgatgccccctcgcccccgtttgtctcgccgtgatgcgtgcggcgcgcctcgcgatgccctctcgcccatgcccctgctcgcctcttctccgccccatccccctgtgtctagcgcgctacccgcccctcccaacgtcgtcctctccgtcccatcctcccatcgtgcgacaaccgatccacgcctcgaggcccaggccgtgccacgccggtggggaagcgaaactcacttacaggacgcggatctccttccaaactcgaaggcgacgatccggcacaggggcaaccttccatgctgcttgtggggtggggacaatgaggcagcaagactcaaggtccaggatgatgaacaacaacagcggcgtcgacgcaggaggccctggttcaggcatgggtctgggagtgccggatgtgccattggggtcaataattaagacaaaaggggtcacaatgacagcgctgttggctaaggcgacagcaacggctctgcttcagcatcctatggtgaacttgcagctgcagggatggaaagagcttcacatacaaaaatagtatcaacattgctatagcagtggccatagatggtgggttgattacatcggttcttcaagatgctggtaaggtcaaacactttaccgtgcacaatgaatgttgattttttatgatttatttaaatgagtggttacttgttggtttatgcgtcttgacatttattcattgtcaaggaaacagaaggagttagttgataaggcgctagcaaagcagttgcagccccatgagtacaactctgatatttttttgcctcatacacaaatatgaatatgtagcacattgttgtatatcttttctaatgctctgaataagatgtggtggtacagtgcagaataatatgttctgttttttattcaactattcaaatcttatttttattcggctattcaaatcatattttttttattagctgattgccggagagattgaaatcaaaggggttgagctgcaggagagttgtagtttgtcgttcttttccatggtaggcattttcattgggatcatacaattattctctgtcgatgtttacaagaaaatagtatctaaaaacaagatgcttctgttccatgagggtgtgattgagactgaaacggtgggtaccagagtgaaggagtcggaggcagttttagtagagaaagaggtcgaactgatcgatgagcctcagattcaagagagccctccagttcctgcattgttggatgatgaggtggattttgcttaatcgtcacttgctattagagaatccgacattcccgtgaaaaaggtgctgataatcgtgacaatcacttctgttcggccacagcaaccatattacttgaatcagctagcccatgttttgaaagttgtattggtacctcttctatggttagtggtggaatggcctgaacagtcctatgaaacagcaaaaactctgttacagtccactcaggtggaagaggttgtttgtagatgttttttgttttcatatctgaactgtaatagtaaggttacaataatttttcacatagctgatggaacttctgtttgtgtgaagccaacagatggtccctcctgctaattagaaaccaatttttttagactttttcagcctcctctactgctcatgttgctggcttgtaataggtgggctaggggttatctagagatgacaaggccctcaagttggctttccagcactggatcgaagcgatgagtacaaacgggcagtggggattggtgggttttactgcccattcttgctcttttcatggtacaattatcctgtttttttcctacagtgatgttttattttgtggcaccatctttcgaccataaacaaatacactcactttgatgaatgttgatatactttcagcattcaattgtagatagaattcttgctttcgtgtagatctaggtcatcgtgtcgccgtctttgtttggctggttgtagagcccccgctctaggtttgtttagctcctcggttcttctagctccggtatggtttcctttttgcgcatagtggcggcatctgatgcatagttcgacggtccctcgcgttgctccggtatgtcgtgttcctctcatatttcttcgtctattttttggcctattgtagaattgttttgtttgtttcccgttttctttatagagcacgtgggagagcgccgcagctgctgcggctgtggcggatgtggcggccatggcgtggcgacctgtggcaaatggcggcatgaagaagaagctgatttgaggagtcgtcgctggactgggagaagtacatgaaggacaataacaaaattctcggagaatttgagtgccttgacaaatcaccatttagatactttcttggggaactatatggtggcaattcactgggaagcacaattgcagtgggcaatgagaagaagcggcagcgggtgtacaacactatgtttcatgtcccatggagatgtgaacggggaaattcagagtcgtgttcgcctcaattcctgcacccatctttgcagctctatattgttcaacaaaagatttgggaactgggatagctgaagatgcctctactgaagatgatgatttcagtggcgacctaccaccagagtttgaaaatatcatgatattcaatggtgttgaaaccgagagtgacattgctcctccagtgctcgaggaaaacaaggatgctgttgtatctgcaacaaaaactgcaaagtccctggatgggtttgccttaaaaacagggcaggaggaggagggtccggaagaggttgatgctactgaaaaagcaatggaagtggttgataatgttgtgaagtccctggatgaagaggtagaatcaaaggagatgcagaagcagcaaccgcatgattataatagcatgagcctaggggtggtaacgggtcatttaatttagcctagcaaatttacggatcgaatcaagttagggccggatcataaaataatacaattttgaactaataaaattaagggctttgttggttcgtgaagcaagtattagggccatgatccattaccactcctacatgagcctcaggaatcttaaagccacacacaagaaatatctcattgctgcaaaggaagaggaggtcaccgaagggaagaggcttcctctcgaggaggtggaagagaacgcatgcatcagccactgaacagaacaagcaggcgatttttttgtgtggatggcgtctgccacaaaaggattgaatcgaggagtgtgctctggttgtgaagtgataactaggctaccacatgttcattttcaaaagttttcgtgtgtgatcgtgatcaggggtgaaactgtggtttcagccaacaaacttgcagttcctattgcttctccccacttttttcctttatatatattttgtatcggttacagaacatggtttatccagtggtatgctgatgaaagatgctaagtttcgcttaatataatgtatatgaaggtcctgggtacctcaaattttgtccacattgaaccagtacgaatgacatcttccttgaaagttatagaaatgcttcaaagtt

SEQ ID NO: 51489 - DNA, 3559 bp, Zea Mays
ggaatctactactactctataagggtgtaaggagggcgtccaccatgcccccgcccgacgcccccttgcccccgtccatctcgccgcaaggcacgcggcgcgcctcgcgatgccccctcgcccccgtttgtctcgccgtgatgcgtgcggcgcgcctcgcgatgccctctcgcccatgcccctgctcgcctcttctccgccccatccccctgtgtctagcgcgctacccgcccctcccaacgtcgtcctctccgtcccatcctcccatcgtgcgacaaccgatccacgcctcgaggcccaggccgtgccacgccggtggggaagcgaaactcacttacaggacgcggatctccttccaaactcgaaggcgacgatccggcacaggggcaaccttccatgctgcttgtggggtggggacaatgaggcagcaagactcaaggtccaggatgatgaacaacaacagcggcgtcgacgcaggaggccctggttcaggcatgggtctgggagtgccggatgtgccattgggattaagacaaaaggggtcacaatgacagcgctgttggctaaggcgacagcaacggctctgcttcagcatcctatggtgaacttgcagctgcagggatggaaagagcttcacatacaaaaatagtatcaacattgctatagcagtggccatagatggtgggttgattacatcggttcttcaagatgctgaaggagttagttgataaggcgctagcaaagcagttgcagccccatgagtacaactctgatatttttttgcctcatacacaaatatgaatatgtagcacattgttgtatatcttttctaatgctctgaataagatgtggtggtacagtgcagaataatatgttctgttttttattcaactattcaaatcttatttttattcggctattcaaatcatattttttttattagctgattgccggagagattgaaatcaaaggggttgagctgcaggagagttgtagtttgtcgttcttttccatggtaggcattttcattgggatcatacaattattctctgtcgatgtttacaagaaaatagtatctaaaaacaagatgcttctgttccatgagggtgtgattgagactgaaacggtgggtaccagagtgaaggagtcggaggcagttttagtagagaaagaggtcgaactgatcgatgagcctcagattcaagagagccctccagttcctgcattgttggatgatgaggtggattttgcttaatcgtcacttgctattagagaatccgacattcccgtgaaaaaggtgctgataatcgtgacaatcacttctgttcggccacagcaaccatattacttgaatcagctagcccatgttttgaaagttgtattggtacctcttctatggttagtggtggaatggcctgaacagtcctatgaaacagcaaaaactctgttacagtccactcaggtggaagaggttgtttgtagatgttttttgttttcatatctgaactgtaatagtaaggttacaataatttttcacatagctgatggaacttctgtttgtgtgaagccaacagatggtccctcctgctaattagaaaccaatttttttagactttttcagcctcctctactgctcatgttgctggcttgtaataggtgggctaggggttatctagagatgacaaggccctcaagttggctttccagcactggatcgaagcgatgagtacaaacgggcagtggggattggtgggttttactgcccattcttgctcttttcatggtacaattatcctgtttttttcctacagtgatgttttattttgtggcaccatctttcgaccataaacaaatacactcactttgatgaatgttgatatactttcagcattcaattgtagatagaattcttgctttcgtgtagatctaggtcatcgtgtcgccgtctttgtttggctggttgtagagcccccgctctaggtttgtttagctcctcggttcttctagctccggtatggtttcctttttgcgcatagtggcggcatctgatgcatagttcgacggtccctcgcgttgctccggtatgtcgtgttcctctcatatttcttcgtctattttttggcctattgtagaattgttttgtttgtttcccgttttctttatagagcacgtgggagagcgccgcagctgctgcggctgtggcggatgtggcggccatggcgtggcgacctgtggcaaatggcggcatgaagaagaagctgatttgaggagtcgtcgctggactgggagaagtacatgaaggacaataacaaaattctcggagaatttgagtgccttgacaaatcaccatttagatactttcttggggaactatatggtggcaattcactgggaagcacaattgcagtgggcaatgagaagaagcggcagcgggtgtacaacactatgtttcatgtcccatggagatgtgaacggggaaattcagagtcgtgttcgcctcaattcctgcacccatctttgcagctctatattgttcaacaaaagatttgggaactgggatagctgaagatgcctctactgaagatgatgatttcagtggcgacctaccaccagagtttgaaaatatcatgatattcaatggtgttgaaaccgagagtgacattgctcctccagtgctcgaggaaaacaaggatgctgttgtatctgcaacaaaaactgcaaagtccctggatgggtttgccttaaaaacagggcaggaggaggagggtccggaagaggttgatgctactgaaaaagcaatggaagtggttgataatgttgtgaagtccctggatgaagaggtagaatcaaaggagatgcagaagcagcaaccgcatgattataatagcatgagcctaggggtggtaacgggtcatttaatttagcctagcaaatttacggatcgaatcaagttagggccggatcataaaataatacaattttgaactaataaaattaagggctttgttggttcgtgaagcaagtattagggccatgatccattaccactcctacatgagcctcaggaatcttaaagccacacacaagaaatatctcattgctgcaaaggaagaggaggtcaccgaagggaagaggcttcctctcgaggaggtggaagagaacgcatgcatcagccactgaacagaacaagcaggcgatttttttgtgtggatggcgtctgccacaaaaggattgaatcgaggagtgtgctctggttgtgaagtgataactaggctaccacatgttcattttcaaaagttttcgtgtgtgatcgtgatcaggggtgaaactgtggtttcagccaacaaacttgcagttcctattgcttctccccacttttttcctttatatatattttgtatcggttacagaacatggtttatccagtggtatgctgatgaaagatgctaagtttcgcttaatataatgtatatgaaggtcctgggtacctcaaattttgtccacattgaaccagtacgaatgacatcttccttgaaagttatagaaatgcttcaaagtt

SEQ ID NO: 51490 - DNA, 2410 bp, Zea Mays
ggaatctactactactctataagggtgtaaggagggcgtccaccatgcccccgcccgacgcccccttgcccccgtccatctcgccgcaaggcacgcggcgcgcctcgcgatgccccctcgcccccgtttgtctcgccgtgatgcgtgcggcgcgcctcgcgatgccctctcgcccatgcccctgctcgcctcttctccgccccatccccctgtgtctagcgcgctacccgcccctcccaacgtcgtcctctccgtcccatcctcccatcgtgcgacaaccgatccacgcctcgaggcccaggccgtgccacgccggtggggaagcgaaactcacttacaggacgcggatctccttccaaactcgaaggcgacgatccggcacaggggcaaccttccatggtaggcgagatccacggcccactcgcgatgcgcccccatgtcagccactcccgttcgtcacctcacgatccgatgaaggcgaagggcgcacctaaagcattgtggcaagccggtatctgccgcagcggcggtagaggtcttcgaggagcacaaaggtgagggcggaggaggcgtaggaaccgagggtaccaaagtcgattcaacagaatgagacagtggtttgcaaggatctgtgcacgaggttggtgttgcggtggagggagcaaacaacacagctgcttgtggggtggggacaatgaggcagcaagactcaaggtccaggatgatgaacaacaacagcggcgtcgacgcaggaggccctggttcaggcatgggtctgggagtgccggatgtgccattggggtcaatagtaattcacgataatgcaggattaagacaaaaggggtcacaatgacagcgctgttggctaaggcgacagcaacggctctgcttcagcatcctatggtgaacttgcagctgcagggatggaaagagcttcacatacaaaaatagtatcaacattgctatagcagtggccatagatggtgggttgattacatcggttcttcaagatgctgagcacgtgggagagcgccgcagctgctgcggctgtggcggatgtggcggccatggcgtggcgacctgtggcaaatggcggcatgaagaagaagctgatttgaggagtcgtcgctggactgggagaagtacatgaaggacaataacaaaattctcggagaatttgagtgccttgacaaatcaccatttagatactttcttggggaactatatggtggcaattcactgggaagcacaattgcagtgggcaatgagaagaagcggcagcgggtgtacaacactatgtttcatgtcccatggagatgtgaacggggaaattcagagtcgtgttcgcctcaattcctgcacccatctttgcagctctatattgttcaacaaaagatttgggaactgggatagctgaagatgcctctactgaagatgatgatttcagtggcgacctaccaccagagtttgaaaatatcatgatattcaatggtgttgaaaccgagagtgacattgctcctccagtgctcgaggaaaacaaggatgctgttgtatctgcaacaaaaactgcaaagtccctggatgggtttgccttaaaaacagggcaggaggaggagggtccggaagaggttgatgctactgaaaaagcaatggaagtggttgataatgttgtgaagtccctggatgaagaggtagaatcaaaggagatgcagaagcagcaaccgcatgattataatagcatgagcctaggggtggtaacgggtcatttaatttagcctagcaaatttacggatcgaatcaagttagggccggatcataaaataatacaattttgaactaataaaattaagggctttgttggttcgtgaagcaagtattagggccatgatccattaccactcctacatgagcctcaggaatcttaaagccacacacaagaaatatctcattgctgcaaaggaagaggaggtcaccgaagggaagaggcttcctctcgaggaggtggaagagaacgcatgcatcagccactgaacagaacaagcaggcgatttttttgtgtggatggcgtctgccacaaaaggattgaatcgaggagtgtgctctggttgtgaagtgataactaggctaccacatgttcattttcaaaagttttcgtgtgtgatcgtgatcaggggtgaaactgtggtttcagccaacaaacttgcagttcctattgcttctccccacttttttcctttatatatattttgtatcggttacagaacatggtttatccagtggtatgctgatgaaagatgctaagtttcgcttaatataatgtatatgaaggtcctgggtacctcaaattttgtccacattgaaccagtacgaatgacatcttccttgaaagttatagaaatgcttcaaagtt

SEQ ID NO: 51491 - DNA, 3230 bp, Zea Mays
ggaatctactactactctataagggtgtaaggagggcgtccaccatgcccccgcccgacgcccccttgcccccgtccatctcgccgcaaggcacgcggcgcgcctcgcgatgccccctcgcccccgtttgtctcgccgtgatgcgtgcggcgcgcctcgcgatgccctctcgcccatgcccctgctcgcctcttctccgccccatccccctgtgtctagcgcgctacccgcccctcccaacgtcgtcctctccgtcccatcctcccatcgtgcgacaaccgatccacgcctcgaggcccaggccgtgccacgccggtggggaagcgaaactcacttacaggacgcggatctccttccaaactcgaaggcgacgatccggcacaggggcaaccttccatggtaggcgagatccacggcccactcgcgatgcgcccccatgtcagccactcccgttcgtcacctcacgatccgatgaaggcgaagggcgcacctaaagcattgtggcaagccggtatctgccgcagcggcggtagaggtcttcgaggagcacaaaggtgagggcggaggaggcgtaggaaccgagggtaccaaagtcgattcaacagaatgagacagtggtttgcaaggatctgtgcacgaggttggtgttgcggtggagggagcaaacaacacaggtgtagctgcttgtggggtggggacaatgaggcagcaagactcaaggtccaggatgatgaacaacaacagcggcgtcgacgcaggaggccctggttcaggcatgggtctgggagtgccggatgtgccattggggtcaatagtaattcacgataatgcagggtgctgtcagcaagaacatggagagccttgccgtcttggccttccaatattttatgaatttggtgattggataaaggaacaatcttttccttttgcagattaagacaaaaggggtcacaatgacagcgctgttggctaaggcgacagcaacggctctgcttcagcatcctatggtgaacttgcagctgcagggatggaaagagcttcacatacaaaaatagtatcaacattgctatagcagtggccatagatggtgggttgattacatcggttcttcaagatgctgctgattgccggagagattgaaatcaaaggggttgagctgcaggagagttgtagtttgtcgttcttttccatgggtgtgattgagactgaaacggtgggtaccagagtgaaggagtcggaggcagttttagtagagaaagaggtcgaactgatcgatgagcctcagattcaagagagccctccagttcctgcattgttggatgatgaggtggattttgcttaatcgtcacttgctattagagaatccgacattcccgtgaaaaaggtgctgataatcgtgacaatcacttctgttcggccacagcaaccatattacttgaatcagctagcccatgttttgaaagttgtattggtacctcttctatggttagtggtggaatggcctgaacagtcctatgaaacagcaaaaactctgttacagtccactcaggtggaagaggttgtttgtagatgttttttgttttcatatctgaactgtaatagtaaggttacaataatttttcacatagctgatggaacttctgtttgtgtgaagccaacagatggtccctcctgctaattagaaaccaatttttttagactttttcagcctcctctactgctcatgttgctggcttgtaataggtgggctaggggttatctagagatgacaaggccctcaagttggctttccagcactggatcgaagcgatgagtacaaacgggcagtggggattgagcacgtgggagagcgccgcagctgctgcggctgtggcggatgtggcggccatggcgtggcgacctgtggcaaatggcggcatgaagaagaagctgatttgaggagtcgtcgctggactgggagaagtacatgaaggacaataacaaaattctcggagaatttgagtgccttgacaaatcaccatttagatactttcttggggaactatatggtggcaattcactgggaagcacaattgcagtgggcaatgagaagaagcggcagcgggtgtacaacactatgtttcatgtcccatggagatgtgaacggggaaattcagagtcgtgttcgcctcaattcctgcacccatctttgcagctctatattgttcaacaaaagatttgggaactgggatagctgaagatgcctctactgaagatgatgatttcagtggcgacctaccaccagagtttgaaaatatcatgatattcaatggtgttgaaaccgagagtgacattgctcctccagtgctcgaggaaaacaaggatgctgttgtatctgcaacaaaaactgcaaagtccctggatgggtttgccttaaaaacagggcaggaggaggagggtccggaagaggttgatgctactgaaaaagcaatggaagtggttgataatgttgtgaagtccctggatgaagaggtagaatcaaaggagatgcagaagcagcaaccgcatgattataatagcatgagcctaggggtggtaacgggtcatttaatttagcctagcaaatttacggatcgaatcaagttagggccggatcataaaataatacaattttgaactaataaaattaagggctttgttggttcgtgaagcaagtattagggccatgatccattaccactcctacatgagcctcaggaatcttaaagccacacacaagaaatatctcattgctgcaaaggaagaggaggtcaccgaagggaagaggcttcctctcgaggaggtggaagagaacgcatgcatcagccactgaacagaacaagcaggcgatttttttgtgtggatggcgtctgccacaaaaggattgaatcgaggagtgtgctctggttgtgaagtgataactaggctaccacatgttcattttcaaaagttttcgtgtgtgatcgtgatcaggggtgaaactgtggtttcagccaacaaacttgcagttcctattgcttctccccacttttttcctttatatatattttgtatcggttacagaacatggtttatccagtggtatgctgatgaaagatgctaagtttcgcttaatataatgtatatgaaggtcctgggtacctcaaattttgtccacattgaaccagtacgaatgacatcttccttgaaagttatagaaatgcttcaaagtt

SEQ ID NO: 51492 - DNA, 3076 bp, Zea Mays
ggaatctactactactctataagggtgtaaggagggcgtccaccatgcccccgcccgacgcccccttgcccccgtccatctcgccgcaaggcacgcggcgcgcctcgcgatgccccctcgcccccgtttgtctcgccgtgatgcgtgcggcgcgcctcgcgatgccctctcgcccatgcccctgctcgcctcttctccgccccatccccctgtgtctagcgcgctacccgcccctcccaacgtcgtcctctccgtcccatcctcccatcgtgcgacaaccgatccacgcctcgaggcccaggccgtgccacgccggtggggaagcgaaactcacttacaggacgcggatctccttccaaactcgaaggcgacgatccggcacaggggcaaccttccatggtaggcgagatccacggcccactcgcgatgcgcccccatgtcagccactcccgttcgtcacctcacgatccgatgaaggcgaagggcgcacctaaagcattgtggcaagccggtatctgccgcagcggcggtagaggtcttcgaggagcacaaaggtgagggcggaggaggcgtaggaaccgagggtaccaaagtcgattcaacagaatgagacagtggtttgcaaggatctgtgcacgaggttggtgttgcggtggagggagcaaacaacacagctgcttgtggggtggggacaatgaggcagcaagactcaaggtccaggatgatgaacaacaacagcggcgtcgacgcaggaggccctggttcaggcatgggtctgggagtgccggatgtgccattggggtcaatagtaattcacgataatgcagggtgctgtcagcaagaacatggagagccttgccgtcttggccttccaatattttatgaatttggtgattggataaaggaacaatcttttccttttgcagattaagacaaaaggggtcacaatgacagcgctgttggctaaggcgacagcaacggctctgcttcagcatcctatggtgaacttgcagctgcagggatggaaagagcttcacatacaaaaatagtatcaacattgctatagcagtggccatagatggtgggttgattacatcggttcttcaagatgctggtaaggtcaaacactttaccgtgcacaatgaatgttgattttttatgatttatttaaatgagtggttacttgttggtttatgcgtcttgacatttattcattgtcaaggaaacagaaggagttagttgataaggcgctagcaaagcagttgcagccccatgagtacaactctgatatttttttgcctcatacacaaatatgaatatgtagcacattgttgtatatcttttctaatgctctgaataagatgtggtggtacagtgcagaataatatgttctgttttttattcaactattcaaatcttatttttattcggctattcaaatcatattttttttattagctgattgccggagagattgaaatcaaaggggttgagctgcaggagagttgtagtttgtcgttcttttccatggtaggcattttcattgggatcatacaattattctctgtcgatgtttacaagaaaatagtatctaaaaacaagatgcttctgttccatgagggtgtgattgagactgaaacggtgggtaccagagtgaaggagtcggaggcagttttagtagagaaagaggtcgaactgatcgatgagcctcagattcaagagagccctccagttcctgcattgttggatgatgaggtggattttgcttaatcgtcacttgctattagagaatccgacattcccgtgaaaaaggtgctgataatcgtgacaatcacttctgttcggccacagcaaccatattacttgaatcagctagcccatgttttgaaagttgtattggtacctcttctatggttagtggtggaatggcctgaacagtcctatgaaacagcaaaaactctgttacagtccactcagatagaattcttgctttcgtgtagatctaggtcatcgtgtcgccgtctttgtttggctggttgtagagcccccgctctaggtttgtttagctcctcggttcttctagctccggtatggtttcctttttgcgcatagtggcggcatctgatgcatagttcgacggtccctcgcgttgctccggtatgtcgtgttcctctcatatttcttcgtctattttttggcctattgtagaattgttttgtttgtttcccgttttctttatagagcacgtgggagagcgccgcagctgctgcggctgtggcggatgtggcggccatggcgtggcgacctgtggcaaatggcggcatgaagaagaagctgatttgaggagtcgtcgctggactgggagaagtacatgaaggacaataacaaaattctcggagaatttgagtgccttgacaaatcaccatttagatactttcttggggaactatatggtggcaattcactgggaagcacaattgcagtgggcaatgagaagaagcggcagcgggtgtacaacactatgtttcatgtcccatggagatgtgaacggggaaattcagagtcgtgttcgcctcaattcctgcacccatctttgcagctctatattgttcaacaaaagatttggaagaggaggtcaccgaagggaagaggcttcctctcgaggaggtggaagagaacgcatgcatcagccactgaacagaacaagcaggcgatttttttgtgtggatggcgtctgccacaaaaggattgaatcgaggagtgtgctctggttgtgaagtgataactaggctaccacatgttcattttcaaaagttttcgtgtgtgatcgtgatcaggggtgaaactgtggtttcagccaacaaacttgcagttcctattgcttctccccacttttttcctttatatatattttgtatcggttacagaacatggtttatccagtggtatgctgatgaaagatgctaagtttcgcttaatataatgtatatgaaggtcctgggtacctcaaattttgtccacattgaaccagtacgaatgacatcttccttgaaagttatagaaatgcttcaaagtt

SEQ ID NO: 51493 - DNA, 3593 bp, Zea Mays
ggaatctactactactctataagggtgtaaggagggcgtccaccatgcccccgcccgacgcccccttgcccccgtccatctcgccgcaaggcacgcggcgcgcctcgcgatgccccctcgcccccgtttgtctcgccgtgatgcgtgcggcgcgcctcgcgatgccctctcgcccatgcccctgctcgcctcttctccgccccatccccctgtgtctagcgcgctacccgcccctcccaacgtcgtcctctccgtcccatcctcccatcgtgcgacaaccgatccacgcctcgaggcccaggccgtgccacgccggtggggaagcgaaactcacttacaggacgcggatctccttccaaactcgaaggcgacgatccggcacaggggcaaccttccatgctgcttgtggggtggggacaatgaggcagcaagactcaaggtccaggatgatgaacaacaacagcggcgtcgacgcaggaggccctggttcaggcatgggtctgggagtgccggatgtgccattggggtcaatagtaattcacgataatgcaggattaagacaaaaggggtcacaatgacagcgctgttggctaaggcgacagcaacggctctgcttcagcatcctatggtgaacttgcagctgcagggatggaaagagcttcacatacaaaaatagtatcaacattgctatagcagtggccatagatggtgggttgattacatcggttcttcaagatgctggaaacagaaggagttagttgataaggcgctagcaaagcagttgcagccccatgagtacaactctgatatttttttgcctcatacacaaatatgaatatgtagcacattgttgtatatcttttctaatgctctgaataagatgtggtggtacagtgcagaataatatgttctgttttttattcaactattcaaatcttatttttattcggctattcaaatcatattttttttattagctgattgccggagagattgaaatcaaaggggttgagctgcaggagagttgtagtttgtcgttcttttccatggtaggcattttcattgggatcatacaattattctctgtcgatgtttacaagaaaatagtatctaaaaacaagatgcttctgttccatgagggtgtgattgagactgaaacggtgggtaccagagtgaaggagtcggaggcagttttagtagagaaagaggtcgaactgatcgatgagcctcagattcaagagagccctccagttcctgcattgttggatgatgaggtggattttgcttaatcgtcacttgctattagagaatccgacattcccgtgaaaaaggtgctgataatcgtgacaatcacttctgttcggccacagcaaccatattacttgaatcagctagcccatgttttgaaagttgtattggtacctcttctatggttagtggtggaatggcctgaacagtcctatgaaacagcaaaaactctgttacagtccactcaggtggaagaggttgtttgtagatgttttttgttttcatatctgaactgtaatagtaaggttacaataatttttcacatagctgatggaacttctgtttgtgtgaagccaacagatggtccctcctgctaattagaaaccaatttttttagactttttcagcctcctctactgctcatgttgctggcttgtaataggtgggctaggggttatctagagatgacaaggccctcaagttggctttccagcactggatcgaagcgatgagtacaaacgggcagtggggattggtgggttttactgcccattcttgctcttttcatggtacaattatcctgtttttttcctacagtgatgttttattttgtggcaccatctttcgaccataaacaaatacactcactttgatgaatgttgatatactttcagcattcaattgtagatagaattcttgctttcgtgtagatctaggtcatcgtgtcgccgtctttgtttggctggttgtagagcccccgctctaggtttgtttagctcctcggttcttctagctccggtatggtttcctttttgcgcatagtggcggcatctgatgcatagttcgacggtccctcgcgttgctccggtatgtcgtgttcctctcatatttcttcgtctattttttggcctattgtagaattgttttgtttgtttcccgttttctttatagagcacgtgggagagcgccgcagctgctgcggctgtggcggatgtggcggccatggcgtggcgacctgtggcaaatggcggcatgaagaagaagctgatttgaggagtcgtcgctggactgggagaagtacatgaaggacaataacaaaattctcggagaatttgagtgccttgacaaatcaccatttagatactttcttggggaactatatggtggcaattcactgggaagcacaattgcagtgggcaatgagaagaagcggcagcgggtgtacaacactatgtttcatgtcccatggagatgtgaacggggaaattcagagtcgtgttcgcctcaattcctgcacccatctttgcagctctatattgttcaacaaaagatttgggaactgggatagctgaagatgcctctactgaagatgatgatttcagtggcgacctaccaccagagtttgaaaatatcatgatattcaatggtgttgaaaccgagagtgacattgctcctccagtgctcgaggaaaacaaggatgctgttgtatctgcaacaaaaactgcaaagtccctggatgggtttgccttaaaaacagggcaggaggaggagggtccggaagaggttgatgctactgaaaaagcaatggaagtggttgataatgttgtgaagtccctggatgaagaggtagaatcaaaggagatgcagaagcagcaaccgcatgattataatagcatgagcctaggggtggtaacgggtcatttaatttagcctagcaaatttacggatcgaatcaagttagggccggatcataaaataatacaattttgaactaataaaattaagggctttgttggttcgtgaagcaagtattagggccatgatccattaccactcctacatgagcctcaggaatcttaaagccacacacaagaaatatctcattgctgcaaaggaagaggaggtcaccgaagggaagaggcttcctctcgaggaggtggaagagaacgcatgcatcagccactgaacagaacaagcaggcgatttttttgtgtggatggcgtctgccacaaaaggattgaatcgaggagtgtgctctggttgtgaagtgataactaggctaccacatgttcattttcaaaagttttcgtgtgtgatcgtgatcaggggtgaaactgtggtttcagccaacaaacttgcagttcctattgcttctccccacttttttcctttatatatattttgtatcggttacagaacatggtttatccagtggtatgctgatgaaagatgctaagtttcgcttaatataatgtatatgaaggtcctgggtacctcaaattttgtccacattgaaccagtacgaatgacatcttccttgaaagttatagaaatgcttcaaagtt

SEQ ID NO: 51494 - DNA, 3623 bp, Zea Mays
ggaatctactactactctataagggtgtaaggagggcgtccaccatgcccccgcccgacgcccccttgcccccgtccatctcgccgcaaggcacgcggcgcgcctcgcgatgccccctcgcccccgtttgtctcgccgtgatgcgtgcggcgcgcctcgcgatgccctctcgcccatgcccctgctcgcctcttctccgccccatccccctgtgtctagcgcgctacccgcccctcccaacgtcgtcctctccgtcccatcctcccatcgtgcgacaaccgatccacgcctcgaggcccaggccgtgccacgccggtggggaagcgaaactcacttacaggacgcggatctccttccaaactcgaaggcgacgatccggcacaggggcaaccttccatggtaggcgagatccacggcccactcgcgatgcgcccccatgtcagccactcccgttcgtcacctcacgatccgatgaaggcgaagggcgcacctaaagcattgtggcaagccggtatctgccgcagcggcggtagaggtcttcgaggagcacaaaggtgagggcggaggaggcgtaggaaccgagggtaccaaagtcgattcaacagaatgagacagtggtttgcaaggatctgtgcacgaggttggtgttgcggtggagggagcaaacaacacaggtgtagctgcttgtggggtggggacaatgaggcagcaagactcaaggtccaggatgatgaacaacaacagcggcgtcgacgcaggaggccctggttcaggcatgggtctgggagtgccggatgtgccattggggtcaatagtaattcacgataatgcagggtgctgtcagcaagaacatggagagccttgccgtcttggccttccaatattttatgaatttggtgattggataaaggaacaatcttttccttttgcagattaagacaaaaggggtcacaatgacagcgctgttggctaaggcgacagcaacggctctgcttcagcatcctatgctgattgccggagagattgaaatcaaaggggttgagctgcaggagagttgtagtttgtcgttcttttccatggtaggcattttcattgggatcatacaattattctctgtcgatgtttacaagaaaatagtatctaaaaacaagatgcttctgttccatgagggtgtgattgagactgaaacggtgggtaccagagtgaaggagtcggaggcagttttagtagagaaagaggtcgaactgatcgatgagcctcagattcaagagagccctccagttcctgcattgttggatgatgaggtggattttgcttaatcgtcacttgctattagagaatccgacattcccgtgaaaaaggtgctgataatcgtgacaatcacttctgttcggccacagcaaccatattacttgaatcagctagcccatgttttgaaagttgtattggtacctcttctatggttagtggtggaatggcctgaacagtcctatgaaacagcaaaaactctgttacagtccactcaggtggaagaggttgtttgtagatgttttttgttttcatatctgaactgtaatagtaaggttacaataatttttcacatagctgatggaacttctgtttgtgtgaagccaacagatggtccctcctgctaattagaaaccaatttttttagactttttcagcctcctctactgctcatgttgctggcttgtaataggtgggctaggggttatctagagatgacaaggccctcaagttggctttccagcactggatcgaagcgatgagtacaaacgggcagtggggattggtgggttttactgcccattcttgctcttttcatggtacaattatcctgtttttttcctacagtgatgttttattttgtggcaccatctttcgaccataaacaaatacactcactttgatgaatgttgatatactttcagcattcaattgtagatagaattcttgctttcgtgtagatctaggtcatcgtgtcgccgtctttgtttggctggttgtagagcccccgctctaggtttgtttagctcctcggttcttctagctccggtatggtttcctttttgcgcatagtggcggcatctgatgcatagttcgacggtccctcgcgttgctccggtatgtcgtgttcctctcatatttcttcgtctattttttggcctattgtagaattgttttgtttgtttcccgttttctttatagagcacgtgggagagcgccgcagctgctgcggctgtggcggatgtggcggccatggcgtggcgacctgtggcaaatggcggcatgaagaagaagctgatttgaggagtcgtcgctggactgggagaagtacatgaaggacaataacaaaattctcggagaatttgagtgccttgacaaatcaccatttagatactttcttggggaactatatggtggcaattcactgggaagcacaattgcagtgggcaatgagaagaagcggcagcgggtgtacaacactatgtttcatgtcccatggagatgtgaacggggaaattcagagtcgtgttcgcctcaattcctgcacccatctttgcagctctatattgttcaacaaaagatttgggaactgggatagctgaagatgcctctactgaagatgatgatttcagtggcgacctaccaccagagtttgaaaatatcatgatattcaatggtgttgaaaccgagagtgacattgctcctccagtgctcgaggaaaacaaggatgctgttgtatctgcaacaaaaactgcaaagtccctggatgggtttgccttaaaaacagggcaggaggaggagggtccggaagaggttgatgctactgaaaaagcaatggaagtggttgataatgttgtgaagtccctggatgaagaggtagaatcaaaggagatgcagaagcagcaaccgcatgattataatagcatgagcctaggggtggtaacgggtcatttaatttagcctagcaaatttacggatcgaatcaagttagggccggatcataaaataatacaattttgaactaataaaattaagggctttgttggttcgtgaagcaagtattagggccatgatccattaccactcctacatgagcctcaggaatcttaaagccacacacaagaaatatctcattgctgcaaaggaagaggaggtcaccgaagggaagaggcttcctctcgaggaggtggaagagaacgcatgcatcagccactgaacagaacaagcaggcgatttttttgtgtggatggcgtctgccacaaaaggattgaatcgaggagtgtgctctggttgtgaagtgataactaggctaccacatgttcattttcaaaagttttcgtgtgtgatcgtgatcaggggtgaaactgtggtttcagccaacaaacttgcagttcctattgcttctccccacttttttcctttatatatattttgtatcggttacagaacatggtttatccagtggtatgctgatgaaagatgctaagtttcgcttaatataatgtatatgaaggtcctgggtacctcaaattttgtccacattgaaccagtacgaatgacatcttccttgaaagttatagaaatgcttcaaagtt

SEQ ID NO: 51495 - DNA, 3888 bp, Zea Mays
ggaatctactactactctataagggtgtaaggagggcgtccaccatgcccccgcccgacgcccccttgcccccgtccatctcgccgcaaggcacgcggcgcgcctcgcgatgccccctcgcccccgtttgtctcgccgtgatgcgtgcggcgcgcctcgcgatgccctctcgcccatgcccctgctcgcctcttctccgccccatccccctgtgtctagcgcgctacccgcccctcccaacgtcgtcctctccgtcccatcctcccatcgtgcgacaaccgatccacgcctcgaggcccaggccgtgccacgccggtggggaagcgaaactcacttacaggacgcggatctccttccaaactcgaaggcgacgatccggcacaggggcaaccttccatggtaggcgagatccacggcccactcgcgatgcgcccccatgtcagccactcccgttcgtcacctcacgatccgatgaaggcgaagggcgcacctaaagcattgtggcaagccggtatctgccgcagcggcggtagaggtcttcgaggagcacaaaggtgagggcggaggaggcgtaggaaccgagggtaccaaagtcgattcaacagaatgagacagtggtttgcaaggatctgtgcacgaggttggtgttgcggtggagggagcaaacaacacagctgcttgtggggtggggacaatgaggcagcaagactcaaggtccaggatgatgaacaacaacagcggcgtcgacgcaggaggccctggttcaggcatgggtctgggagtgccggatgtgccattggggtcaatagtaattcacgataatgcagggtgctgtcagcaagaacatggagagccttgccgtcttggccttccaatattttatgaatttggtgattggataaaggaacaatcttttccttttgcagattaagacaaaaggggtcacaatgacagcgctgttggctaaggcgacagcaacggctctgcttcagcatcctatggtgaacttgcagctgcagggatggaaagagcttcacatacaaaaatagtatcaacattgctatagcagtggccatagatggtgggttgattacatcggttcttcaagatgctggtaaggtcaaacactttaccgtgcacaatgaatgttgattttttatgatttatttaaatgagtggttacttgttggtttatgcgtcttgacatttattcattgtcaaggaaacagaaggagttagttgataaggcgctagcaaagcagttgcagccccatgagtacaactctgatatttttttgcctcatacacaaatatgaatatgtagcacattgttgtatatcttttctaatgctctgaataagatgtggtggtacagtgcagaataatatgttctgttttttattcaactattcaaatcttatttttattcggctattcaaatcatattttttttattagctgattgccggagagattgaaatcaaaggggttgagctgcaggagagttgtagtttgtcgttcttttccatgggtgtgattgagactgaaacggtgggtaccagagtgaaggagtcggaggcagttttagtagagaaagaggtcgaactgatcgatgagcctcagattcaagagagccctccagttcctgcattgttggatgatgagcaaccatattacttgaatcagctagcccatgttttgaaagttgtattggtacctcttctatggttagtggtggaatggcctgaacagtcctatgaaacagcaaaaactctgttacagtccactcaggtggaagaggttgtttgtagatgttttttgttttcatatctgaactgtaatagtaaggttacaataatttttcacatagctgatggaacttctgtttgtgtgaagccaacagatggtccctcctgctaattagaaaccaatttttttagactttttcagcctcctctactgctcatgttgctggcttgtaataggtgggctaggggttatctagagatgacaaggccctcaagttggctttccagcactggatcgaagcgatgagtacaaacgggcagtggggattggtgggttttactgcccattcttgctcttttcatggtacaattatcctgtttttttcctacagtgatgttttattttgtggcaccatctttcgaccataaacaaatacactcactttgatgaatgttgatatactttcagcattcaattgtagatagaattcttgctttcgtgtagatctaggtcatcgtgtcgccgtctttgtttggctggttgtagagcccccgctctaggtttgtttagctcctcggttcttctagctccggtatggtttcctttttgcgcatagtggcggcatctgatgcatagttcgacggtccctcgcgttgctccggtatgtcgtgttcctctcatatttcttcgtctattttttggcctattgtagaattgttttgtttgtttcccgttttctttatagagcacgtgggagagcgccgcagctgctgcggctgtggcggatgtggcggccatggcgtggcgacctgtggcaaatggcggcatgaagaagaagctgatttgaggagtcgtcgctggactgggagaagtacatgaaggacaataacaaaattctcggagaatttgagtgccttgacaaatcaccatttagatactttcttggggaactatatggtggcaattcactgggaagcacaattgcagtgggcaatgagaagaagcggcagcgggtgtacaacactatgtttcatgtcccatggagatgtgaacggggaaattcagagtcgtgttcgcctcaattcctgcacccatctttgcagctctatattgttcaacaaaagatttgggaactgggatagctgaagatgcctctactgaagatgatgatttcagtggcgacctaccaccagagtttgaaaatatcatgatattcaatggtgttgaaaccgagagtgacattgctcctccagtgctcgaggaaaacaaggatgctgttgtatctgcaacaaaaactgcaaagtccctggatgggtttgccttaaaaacagggcaggaggaggagggtccggaagaggttgatgctactgaaaaagcaatggaagtggttgataatgttgtgaagtccctggatgaagaggtagaatcaaaggagatgcagaagcagcaaccgcatgattataatagcatgagcctaggggtggtaacgggtcatttaatttagcctagcaaatttacggatcgaatcaagttagggccggatcataaaataatacaattttgaactaataaaattaagggctttgttggttcgtgaagcaagtattagggccatgatccattaccactcctacatgagcctcaggaatcttaaagccacacacaagaaatatctcattgctgcaaaggaagaggaggtcaccgaagggaagaggcttcctctcgaggaggtggaagagaacgcatgcatcagccactgaacagaacaagcaggcgatttttttgtgtggatggcgtctgccacaaaaggattgaatcgaggagtgtgctctggttgtgaagtgataactaggctaccacatgttcattttcaaaagttttcgtgtgtgatcgtgatcaggggtgaaactgtggtttcagccaacaaacttgcagttcctattgcttctccccacttttttcctttatatatattttgtatcggttacagaacatggtttatccagtggtatgctgatgaaagatgctaagtttcgcttaatataatgtatatgaaggtcctgggtacctcaaattttgtccacattgaaccagtacgaatgacatcttccttgaaagttatagaaatgcttcaaagtt

SEQ ID NO: 51496 - DNA, 3875 bp, Zea Mays
ggaatctactactactctataagggtgtaaggagggcgtccaccatgcccccgcccgacgcccccttgcccccgtccatctcgccgcaaggcacgcggcgcgcctcgcgatgccccctcgcccccgtttgtctcgccgtgatgcgtgcggcgcgcctcgcgatgccctctcgcccatgcccctgctcgcctcttctccgccccatccccctgtgtctagcgcgctacccgcccctcccaacgtcgtcctctccgtcccatcctcccatcgtgcgacaaccgatccacgcctcgaggcccaggccgtgccacgccggtggggaagcgaaactcacttacaggacgcggatctccttccaaactcgaaggcgacgatccggcacaggggcaaccttccatggtaggcgagatccacggcccactcgcgatgcgcccccatgtcagccactcccgttcgtcacctcacgatccgatgaaggcgaagggcgcacctaaagcattgtggcaagccggtatctgccgcagcggcggtagaggtcttcgaggagcacaaaggtgagggcggaggaggcgtaggaaccgagggtaccaaagtcgattcaacagaatgagacagtggtttgcaaggatctgtgcacgaggttggtgttgcggtggagggagcaaacaacacaggtgtagctgcttgtggggtggggacaatgaggcagcaagactcaaggtccaggatgatgaacaacaacagcggcgtcgacgcaggaggccctggttcaggcatgggtctgggagtgccggatgtgccattggggtcaatagtaattcacgataatgcagggtgctgtcagcaagaacatggagagccttgccgtcttggccttccaatattttatgaatttggtgattggataaaggaacaatcttttccttttgcagattaagacaaaaggggtcacaatgacagcgctgttggctaaggcgacagcaacggctctgcttcagcatcctatggtgaacttgcagctgcagggatggaaagagcttcacatacaaaaatagtatcaacattgctatagcagtggccatagatggtgggttgattacatcggttcttcaagatgctgaaggagttagttgataaggcgctagcaaagcagttgcagccccatgagtacaactctgatatttttttgcctcatacacaaatatgaatatgtagcacattgttgtatatcttttctaatgctctgaataagatgtggtggtacagtgcagaataatatgttctgttttttattcaactattcaaatcttatttttattcggctattcaaatcatattttttttattagctgattgccggagagattgaaatcaaaggggttgagctgcaggagagttgtagtttgtcgttcttttccatgggtgtgattgagactgaaacggtgggtaccagagtgaaggagtcggaggcagttttagtagagaaagaggtcgaactgatcgatgagcctcagattcaagagagccctccagttcctgcattgttggatgatgaggtggattttgcttaatcgtcacttgctattagagaatccgacattcccgtgaaaaaggtgctgataatcgtgacaatcacttctgttcggccacagcaaccatattacttgaatcagctagcccatgttttgaaagttgtattggtacctcttctatggttagtggtggaatggcctgaacagtcctatgaaacagcaaaaactctgttacagtccactcaggtggaagaggttgtttgtagatgttttttgttttcatatctgaactgtaatagtaaggttacaataatttttcacatagctgatggaacttctgtttgtgtgaagccaacagatggtccctcctgctaattagaaaccaatttttttagactttttcagcctcctctactgctcatgttgctggcttgtaataggtgggctaggggttatctagagatgacaaggccctcaagttggctttccagcactggatcgaagcgatgagtacaaacgggcagtggggattggtgggttttactgcccattcttgctcttttcatggtacaattatcctgtttttttcctacagtgatgttttattttgtggcaccatctttcgaccataaacaaatacactcactttgatgaatgttgatatactttcagcattcaattgtagatagaattcttgctttcgtgtagatctaggtcatcgtgtcgccgtctttgtttggctggttgtagagcccccgctctaggtttgtttagctcctcggttcttctagctccggtatggtttcctttttgcgcatagtggcggcatctgatgcatagttcgacggtccctcgcgttgctccggtatgtcgtgttcctctcatatttcttcgtctattttttggcctattgtagaattgttttgtttgtttcccgttttctttatagagcacgtgggagagcgccgcagctgctgcggctgtggcggatgtggcggccatggcgtggcgacctgtggcaaatggcggcatgaagaagaagctgatttgaggagtcgtcgctggactgggagaagtacatgaaggacaataacaaaattctcggagaatttgagtgccttgacaaatcaccatttagatactttcttggggaactatatggtggcaattcactgggaagcacaattgcagtgggcaatgagaagaagcggcagcgggtgtacaacactatgtttcatgtcccatggagatgtgaacggggaaattcagagtcgtgttcgcctcaattcctgcacccatctttgcagctctatattgttcaacaaaagatttgggaactgggatagctgaagatgcctctactgaagatgatgatttcagtggcgacctaccaccagagtttgaaaatatcatgatattcaatggtgttgaaaccgagagtgacattgctcctccagtgctcgaggaaaacaaggatgctgttgtatctgcaacaaaaactgcaaagtccctggatgggtttgccttaaaaacagggcaggaggaggagggtccggaagaggttgatgctactgaaaaagcaatggaagtggttgataatgttgtgaagtccctggatgaagaggtagaatcaaaggagatgcagaagcagcaaccgcatgattataatagcatgagcctaggggtggtaacgggtcatttaatttagcctagcaaatttacggatcgaatcaagttagggccggatcataaaataatacaattttgaactaataaaattaagggctttgttggttcgtgaagcaagtattagggccatgatccattaccactcctacatgagcctcaggaatcttaaagccacacacaagaaatatctcattgctgcaaaggaagaggaggtcaccgaagggaagaggcttcctctcgaggaggtggaagagaacgcatgcatcagccactgaacagaacaagcaggcgatttttttgtgtggatggcgtctgccacaaaaggattgaatcgaggagtgtgctctggttgtgaagtgataactaggctaccacatgttcattttcaaaagttttcgtgtgtgatcgtgatcaggggtgaaactgtggtttcagccaacaaacttgcagttcctattgcttctccccacttttttcctttatatatattttgtatcggttacagaacatggtttatccagtggtatgctgatgaaagatgctaagtttcgcttaatataatgtatatgaaggtcctgggtacctcaaattttgtccacattgaaccagtacgaatgacatcttccttgaaagttatagaaatgcttcaaagtt

SEQ ID NO: 51497 - DNA, 1945 bp, Zea Mays
cgacgaaagacgcggaggttggtggtgaaggaagaaagaaaacgaaaggcggcctcccactcgcagtcgcagtcgcaggttctagaccaccaaacccagcggctcccgctcatctcagttcggcttcggccttcgcattcctctacagatttcgcagttttgctgggggtaactacggaatggggggcggatccggatctttcctcaaggtcttggtcaacaacatggatgtcctcgcggggcctttggtttcacttgcgtatcctctgtatgcctctgttagagcaattgaaacaaaatctgctgtggatgatcagcaatggctcacgtactgggtgctgtactcatttatcactctattcgagctcacctttgctccggtactcgaatggcttcctttctggtcttatgcaaagctgttctttaattgctggttagtattgccacagttcaatggagctgcacatgtttatgagcattttgtgaggccaatgattgtaaatcagcaagttgtaaacatctggtatattccaaagaaggatgaatcaagtaggcctgatgatgtaatttcagctgcacagagtggacacttgatgactcgggctgggagagctatccaagtgcagtatgtgctcatggcaacagttatgtatcacgccgtggctttggatttacctaaatgggctatcaaagccattgacaaaattagacatggctttctttggaaaggacgaaaagatgtgctcggtggtcactgcttagttgcttggggcaaagtgacacgtacaaaggagcttggtggtcttggcatctctgatttacaaaaactgaattgggccctacgggtaagatggttgtggttggaaaaaacagacccctcgaagtcttgggctgatttgcctctccagagttccagcatgctgaaatctatcctctctacaactatgattacagaggtgggtgatggtcgtaacaccttattttggagggatagatggttgatgggacagaggattgaggacctagcccctcatattttcgccctcgtcccgactaggattgccaataggagaacggtggcagaaggactagtggagatggcttggatccgggacctgagaggcaccatcacttgagctgtcatctctgatcttttgacttttagtgaagttattgcagaattctcccttagtcatggagtgccagacaagcatatctggagatgcctcgtccggccaatactcttcaaagtcgacttatgatatgctattcctaggatccacttcttttggagcctttgagcgtgtttggaagtcttgggcaccttcaaagtgcagtttcttcctttggcttgccatgcacagtagatgttggaccgcagatcgtcttgctaaaagaggactaccccaccccattgcgtgtcccctttgcgaccaagaagaggaaacaatacaacatcttctcatctcttgcgtttttgcaagacagttctggtacctcttgctgcgcaggtccgggttgcctaatctttcaccggacaatgctctttgcagcttaaaagactggtggagcagggctgtggagaaggttccccgagatctccaatcaggcttcaattctctagtaattcttggcgcttggagcctttggcgtcatcgcaacgactgtgtgttcaatgggaggtcgccgagcctagcaagtgttctcaccctcgctggtgatgagcttaggatgtggtgtcttgccggagctaaaaggttgaacctgctttcagctgtagtgtttgtgtttgaccccgggtgataatcttgtgccttgttcagagtgtttgtgtgtggtggctgtgctgtgtcttgttgtgtcgtgtggattgagttgtgtgtgttgtgttgtaccttcttctatctattaatggaaagatacgcagatttcctgcgtgttcgat

SEQ ID NO: 51498 - DNA, 1956 bp, Zea Mays
cgacgaaagacgcggaggttggtggtgaaggaagaaagaaaacgaaaggcggcctcccactcgcagtcgcagtcgcaggttctagaccaccaaacccagcggctcccgctcatctcagttcggcttcggccttcgcattcctctacagatttcgcagttttgctgggggtaactacggaatggggggcggatccggatctttcctcaaggtcttggtcaacaacatggatgtcctcgcggggcctttggtttcacttgcgtatcctctgtatgcctctgttagagcaattgaaacaaaatctgctgtggatgatcagcaatggctcacgtactgggtgctgtactcatttatcactctattcgagctcacctttgctccggtactcgaatggcttcctttctggtcttatgcaaagctgttctttaattgctggttagtattgccacagttcaatggagctgcacatgtttatgagcattttgtgaggccaatgattgtaaatcagcaagttgtaaacatctggtatattccaaagaaggatgaatcaagtaggcctgatgatgtaatttcagctgcacagaggtacattgagcaaaatggatcaaaagcgtttgagaatcttgttaacaagtgcagtatgtgctcatggcaacagttatgtatcacgccgtggctttggatttacctaaatgggctatcaaagccattgacaaaattagacatggctttctttggaaaggacgaaaagatgtgctcggtggtcactgcttagttgcttggggcaaagtgacacgtacaaaggagcttggtggtcttggcatctctgatttacaaaaactgaattgggccctacgggtaagatggttgtggttggaaaaaacagacccctcgaagtcttgggctgatttgcctctccagagttccagcatgctgaaatctatcctctctacaactatgattacagaggtgggtgatggtcgtaacaccttattttggagggatagatggttgatgggacagaggattgaggacctagcccctcatattttcgccctcgtcccgactaggattgccaataggagaacggtggcagaaggactagtggagatggcttggatccgggacctgagaggcaccatcacttgagctgtcatctctgatcttttgacttttagtgaagttattgcagaattctcccttagtcatggagtgccagacaagcatatctggagatgcctcgtccggccaatactcttcaaagtcgacttatgatatgctattcctaggatccacttcttttggagcctttgagcgtgtttggaagtcttgggcaccttcaaagtgcagtttcttcctttggcttgccatgcacagtagatgttggaccgcagatcgtcttgctaaaagaggactaccccaccccattgcgtgtcccctttgcgaccaagaagaggaaacaatacaacatcttctcatctcttgcgtttttgcaagacagttctggtacctcttgctgcgcaggtccgggttgcctaatctttcaccggacaatgctctttgcagcttaaaagactggtggagcagggctgtggagaaggttccccgagatctccaatcaggcttcaattctctagtaattcttggcgcttggagcctttggcgtcatcgcaacgactgtgtgttcaatgggaggtcgccgagcctagcaagtgttctcaccctcgctggtgatgagcttaggatgtggtgtcttgccggagctaaaaggttgaacctgctttcagctgtagtgtttgtgtttgaccccgggtgataatcttgtgccttgttcagagtgtttgtgtgtggtggctgtgctgtgtcttgttgtgtcgtgtggattgagttgtgtgtgttgtgttgtaccttcttctatctattaatggaaagatacgcagatttcctgcgtgttcgat

SEQ ID NO: 51499 - DNA, 2708 bp, Zea Mays
cgacgaaagacgcggaggttggtggtgaaggaagaaagaaaacgaaaggcggcctcccactcgcagtcgcagtcgcaggttctagaccaccaaacccagcggctcccgctcatctcagttcggcttcggccttcgcattcctctacagatttcgcagttttgctgggggtaactacggaatggggggcggatccggatctttcctcaaggtcttggtcaacaacatggatgtcctcgcggggtacgcattcctgatctgattccccgacttcagattcttagctcttagagctgctcgtctctgcgttccccgtgcgactcgtgagcggtgctgctattccactcgagatgcggaggttgttcataccagtagcatcagtaaacaatttgcgtacttagggcgagtgatcgtgaacctacccaaatacctgatgcggagctgagcatggtcgatgaaatggtgaaatgccatgtagcatccgacattaggacttcggcaatttggccctagtcttgaaggagcgtgttaaacttccaaaaaggaacgaagaaggataaggggaaaaaaatgatatgtccatccacgaccaagattatgtgaaaaaaaaattcgttagcaagtaagatttgaccaaatgatggaactcatgatgctgacattctgttagtgacgctgatgttctttcctttttagattagtggatctttgatgatggtttaccgacccttttttttaaacataaggatggaattttaagctactagctccttatgattttacaacttttgcagaattactagcatcttccgttgcatatcagtatcataatcaggatagcttccccatgtagcacatggcaatataaaagcacgtgatatcctgagaatatggataacttgtggttgctaaatgttatagcatttaccttgtggtttttgtacatcactgaatgttcagctgcaagttgaagaatttttaatcctctattttattgtctctgcaggcctttggtttcacttgcgtatcctctgtatgcctctgttagagcaattgaaacaaaatctgctgtggatgatcagcaatggctcacgtactgggtgctgtactcatttatcactctattcgagctcacctttgctccggtactcgaatggcttcctttctggtcttatgcaaagctgttctttaattgctggttagtattgccacagttcaatggagctgcacatgtttatgagcattttgtgaggccaatgattgtaaatcagcaagttgtaaacatctggtatattccaaagaaggatgaatcaagtaggcctgatgatgtaatttcagctgcacagagtggacacttgatgactcgggctgggagagctatccaagtgcagtatgtgctcatggcaacagttatgtatcacgccgtggctttggatttacctaaatgggctatcaaagccattgacaaaattagacatggctttctttggaaaggacgaaaagatgtgctcggtggtcactgcttagttgcttggggcaaagtgacacgtacaaaggagcttggtggtcttggcatctctgatttacaaaaactgaattgggccctacgggtaagatggttgtggttggaaaaaacagacccctcgaagtcttgggctgatttgcctctccagagttccagcatgctgaaatctatcctctctacaactatgattacagaggtgggtgatggtcgtaacaccttattttggagggatagatggttgatgggacagaggattgaggacctagcccctcatattttcgccctcgtcccgactaggattgccaataggagaacggtggcagaaggactagtggagatggcttggatccgggacctgagaggcaccatcacttgagctgtcatctctgatcttttgacttttagtgaagttattgcagaattctcccttagtcatggagtgccagacaagcatatctggagatgcctcgtccggccaatactcttcaaagtcgacttatgatatgctattcctaggatccacttcttttggagcctttgagcgtgtttggaagtcttgggcaccttcaaagtgcagtttcttcctttggcttgccatgcacagtagatgttggaccgcagatcgtcttgctaaaagaggactaccccaccccattgcgtgtcccctttgcgaccaagaagaggaaacaatacaacatcttctcatctcttgcgtttttgcaagacagttctggtacctcttgctgcgcaggtccgggttgcctaatctttcaccggacaatgctctttgcagcttaaaagactggtggagcagggctgtggagaaggttccccgagatctccaatcaggcttcaattctctagtaattcttggcgcttggagcctttggcgtcatcgcaacgactgtgtgttcaatgggaggtcgccgagcctagcaagtgttctcaccctcgctggtgatgagcttaggatgtggtgtcttgccggagctaaaaggttgaacctgctttcagctgtagtgtttgtgtttgaccccgggtgataatcttgtgccttgttcagagtgtttgtgtgtggtggctgtgctgtgtcttgttgtgtcgtgtggattgagttgtgtgtgttgtgttgtaccttcttctatctattaatggaaagatacgcagatttcctgcgtgttcgat

SEQ ID NO: 51500 - DNA, 1361 bp, Zea Mays
aaagatttcagctggctgttaaggaagatgttatccgtaggatggatgtattgaatcctcagacttgcaggaccctgctagaaaagctaacgctcgatgggaaccttcatgttcgggtttttgaagaacctgtgccaatggctccgaccacactgcagggtatgttcaagcaacactctagtaaagagccatcaaaatgtgtaaagcgctacttcgcaaacccaatgagcacattacaactgtaactgcaagaagattttaactttgttctagatccagacttgtgagggcatcaagatttggaatgtttaaatgttaccgtccccagaactggtaaggccatctcgtggtaagaccatctccgccgtgtaaatagtcgtgcaaagtactattttgcacctgtttgcagagtaaaatttaaaatagagagtaagatagggagtggaatagagagtctgctggtctgctggagagctaaggcccttaactgaaccatcatcacttgtctgtttctgagccgtgcttgctctaaggccgtgctgattgtcgtgcttaggagcaggcatattatggttgtgcaaaacattgttttgcactgtataattattatttacaaagtggtgtttgaaatagggaatgtgatatgaggtgtgatagggaggctggagatagactaagactcattttcaggccgccgttgtctctgggttctgtcgtcgtaggttcatgcatgaaagatgtaccttaggttatgtccaacagcttacgaatcagttcgcacatgcgcattttgtgcgaccacatcccattatgtatacttccagcaaattgtcgcgtaaaatgtgtggtcgttcgtgtggccacacgttctcttctctgcaggagagggtgcgcactctcatgctcgagacactataaatgggcgttttttgttgcgcaaatgagcgccatggcgcatgcgctttcgcattcggccaccactggacataaccttagtctccagtaatttactcatctttcattttaaatctcactctataaatagtgcagttcataaaataatatttttacatggtcatatgcataatatggtgaccatagccttactagaggtagtatccgtagttgtttactcaaaaggagcatgatgaaagcatctacaccttaatttgattttgatagttaaagataacataattattatgactaagggtgttttatagaaacactattataatgtctgcgcattgcgatgtacatcaatcacatttgatgctatagtgcaatagttatacgacattcgagggagctgtgtcaagttagtgtgatggatgctccccataaaaaaattaaaattaaat

SEQ ID NO: 51501 - DNA, 1705 bp, Zea Mays
tcagctggctgttaaggtcaatgcatatgatggcgttcagattgtggactcattacattcgtcaaagtatcatatagctacacttgcagaatgtgatagttgctgctgtacagatcctccaacttctcaatttgttgataatgaaaacacaaaaaatctactgaaagagaagcataccaagcctattaattttcctggtccaataaaaatgcttggtgatgggcacacagtgacagtaattaatgttcaaagcaagttgagcccaccttacatgcacagcaaagatcctggggatgcggaaaggttatctactccaggagagaacaataaggagagtagtttctatcataattgtgaaaggcattgttatcagcctatattaccatggataaatggtgatggtagtactaatagcactctctatgaaggtttaagtcgccgagttattggttatgtcatgcactatccaggactatcggaggaagatgttatccgtaggatggatgtattgaatcctcagacttgcaggaccctgctagaaaagctaacgctcgatgggaaccttcatgttcgggtttttgaagaacctgtgccaatggctccgaccacactgcaggatccagacttgtgagggcatcaagatttggaatgtttaaatgttaccgtccccagaactggtaaggccatctcgtggtaagaccatctccgccgtgtaaatagtcgtgcaaagtactattttgcacctgtttgcagagtaaaatttaaaatagagagtaagatagggagtggaatagagagtctgctggtctgctggagagctaaggcccttaactgaaccatcatcacttgtctgtttctgagccgtgcttgctctaaggccgtgctgattgtcgtgcttaggagcaggcatattatggttgtgcaaaacattgttttgcactgtataattattatttacaaagtggtgtttgaaatagggaatgtgatatgaggtgtgatagggaggctggagatagactaagactcattttcaggccgccgttgtctctgggttctgtcgtcgtaggttcatgcatgaaagatgtaccttaggttatgtccaacagcttacgaatcagttcgcacatgcgcattttgtgcgaccacatcccattatgtatacttccagcaaattgtcgcgtaaaatgtgtggtcgttcgtgtggccacacgttctcttctctgcaggagagggtgcgcactctcatgctcgagacactataaatgggcgttttttgttgcgcaaatgagcgccatggcgcatgcgctttcgcattcggccaccactggacataaccttagtctccagtaatttactcatctttcattttaaatctcactctataaatagtgcagttcataaaataatatttttacatggtcatatgcataatatggtgaccatagccttactagaggtagtatccgtagttgtttactcaaaaggagcatgatgaaagcatctacaccttaatttgattttgatagttaaagataacataattattatgactaagggtgttttatagaaacactattataatgtctgcgcattgcgatgtacatcaatcacatttgatgctatagtgcaatagttatacgacattcgagggagctgtgtcaagttagtgtgatggatgctccccataaaaaaattaaaattaaat

SEQ ID NO: 51502 - DNA, 2747 bp, Zea Mays
gatgatcaatatatggagaagcttgaatacatatcattatgtgatagagattttgtttgcttatgtcatctgattgggatgataatttgtttttgtttatcttaaaattagtaactaatgtctaatacaacttctgattagattggcaaacatcttggactcaacaattcaaaaaaacttcataaatgagtatcatccatgctaaaaaaaattcaacctaacatgggaagcagaagttccagacaagacatcgtagtaccgaatttggacttcaaaaaacttctcactctacaaagctggtactgctctgcaaaattttgaggcactctcagaagactgtgatgattgttcggatttgtggtccctagtttcatctaaagatttggaatcacctagttcacagagcaaattactcttgcttgaagaagagaaccatgacaaaccaattggacatcatatccagaacaaccgtgatgcttctgctgcagtttcccagttagttgaagaagataaacttgcttcgaatcagaggaggcgtcggtgccgtccattatcttctgatgatcaacgccatagaaggattctacacatgttaaagaagaagaaatttgtactgaaggtggagttacataaatggttagaacggcttgaaaagaaggacgggaaaataatggataggaagacattgactcgcacgttgaataagcttcagcaagagggaagttgtaaatgtatcaaagtcagtgctccattggtgacaaattatgctcgcagtcgtctctttgatgtaatactgcattcttctgttagagacgtgtcaccagaacttgtggagcaatttaggaccagacaaaggaactttgacaccgaatctcgcgcaggtgcagcagctaaagtgaagcaaaatcaacatatgactgccatacctggtctgaggatttcacgcagagttaaagtttacaaaccattactattagaagctatgtatgcaaatggattcataggcgcaaagatgattcgagcaaagttatttcataaatttctgtgggcttatgtcaattctttgccaaattggtgcaatgcatttggttgtaccaaagcagggcagtatgataagagccttaatcaatcatgcctgttattttctatggaagcagctatgaaagaaatgccccttgaactctttctacaaattgttgggtcagcaaagaagattgataacatgataacgttgtgtaggcttggaaaaacactttcagaaatacctacagaggaatacaatcagatcttggatactcatgccaatggccgactctcacgtttagtaaatattttggacaagctcaagctagttcagcttgcaaaagaattcttagaagatgctggtgtatcgtcaaatgccatgtatacacattcgatggagctcaggccttacatcgaagaacccatgccaagaattcttccatcttcccaactgaacaatcatcggaaaattcggcatgattttgtactttcaaagaaagagtttgttgattcttattgggaaacactagagtgctgttatttaacagctggtttggctgacccgttaagtgccttccctggcagttctatcccggaggtttctcatcgtcgttcatggtgttcacttagagtcatgactactgaacaacgactggagttgcaacagcgtattatggatgttggtgagaaggggaaaattccttttaaagactgtgttagaatagcaagagaactgaatctttctgtagagcaggtacttcgcctttcatatgaaaggcaatctcggctccatgaacagcccagctttacttctaaacaaaagcagcaaagagttggttctggattgactcctgtgagaagaaagagacgtgccgatgggaccagcctgaagcttctgaaacgtacagtacaagcaagtggatctgctgaacaaatattggagcaacctattgttgatgaagaagtaccaatgatcagtcggtatgctatcttaagaaagagctgcatgagaagtaaaagattcttttggacatgtgaatctgatagaaaacttctgatggcatacattagagtgcgtgcagtacttggggcaagatattatcgtgtaccttggaagtctctctctgatcttccagctccaccacatacatgtcttagaaggatggcactactattgaaaacaaacggaaagataagaggagctgtcatgtgtttatgtaaccttcttggggaacggtatgttagatatcttgaaaaggaaaggagtttgaaaaggagaagattgtttccccagatttcaaacagaagtcaagaaaacagtttggattcagattgtgagcaattcaattgggatgactttgaagttccagagataaagagtgcacttaatgaagtccttgaattaattcaaacagaaaaaatagatcaggccaagagaattgggcctgttaatcaaaaaaacattaacaatgataatgatgtcacaaaggacacaatatgttctcaggaactgccaaataatcaggctatactaggtgaaaccaaaacgagtgcagtttcagaaagtgggttctgtgatcctgaaaaatcatgcagacattcaaatgcagaaagtgaaaacatggaagtcttctgcaaacctcaagaaaaaatcattaaggatcaccgaaataagattattgaaagaggcatatggaagtcttctgcaaacctcaagaaaaaat

SEQ ID NO: 51503 - DNA, 825 bp, Zea Mays
acaaaaggtattacacttgttgaggatgcgatcaacttccaagaatatgtcaagagtagaacatctatgcttgtgggtcttctcaagtgatagaaagccatcagcatgcaccatatcatatgttcttggatatgcaggggcttagtggttggtagtatggtgattctggatcatggccacatagctcaggcccaaattttctgtaaaacaacactgcacaatagtaagctctgatatacactttccagcacattgggcatgcagagtttcccagatttctaaagtaccgccaagtggaaagaccacggcagacaagtgttgctgaataacaaatcatgatgtgaagggtcattttgaagttcctagtggaaaacagacccatgagcaaaagctccttgccttgaacgttgaaccccagaattcattgatgatcaatatatggagaagcttgaatacatatcattatgtgatagagattttgtttgcttatgtcatctgattgggatgataatttgtttatcttaaaattagtaactaatgtctaatacaacttctgattagattggcaaacatcttggactcaacaattcaaaaaaacttcataaacgagtatcatccatgctaaaaaaattcaacctaacatgggaagcagaagttccagacaagacatcgcagtaccgaatttggacttcaaaaaacttctcactctacaaagctggtactgctctgcaaaattttgaggcactctcagaagactgtgatgattgttcggatttgtggtccctagtttcatctaaagatttggaatcacctagttcacagggc

SEQ ID NO: 51504 - DNA, 1348 bp, Zea Mays
gggcataccaccaactccacgcgaatcgcgcagaagaccactccgatatgccaaggacttgaatatgacttcacagcaaagaattgagattacaaagcctgaactacttgggagcaatgaagaggccaatgtagatgcttttcgagtagatggagcttttgatgttaactccaagaatgatatatctattcatgattatcttccagcaatgaaagccatatgtgataaacttgaagaagcaagtggaaaggtcgactgctctcacattttccctattaaagctatgctggctcttgttgtgtcagatataaaagttgatctcgactacaggatggcatatgggcacagagcatggagaaatgtggtgatacgtgaattgattccattcctcatactgagcaaagtattgcatagattaatagatgcacgacttgtggagatatttgatgtcgaagatgatgataaggttgtccgttgtttgcgtctactgaaaaattttgatccaaatgagtttcagccaaaaagtatagcttcaaattttaaatttgttaaaaaaggtcaggcaactgatcaaattttggaacttccattagagaactgtatatatgatatgatcagtagccaagggacaaaaggtattacacttgttgagatatgcaggggcttagtggttggtagtatggtgattctggatcatggccacatagctcaggcccaaattttctgtaaaacaacactgcacaatagtaagctctgatatacactttccagcacattgggcatgcagagtttcccagatttctaaagtaccgccaagtggaaagaccacggcagacaagtgttgctgaataacaaatcatgatgtgaagggtcattttgaagttcctagtggaaaacagacccatgagcaaaagctccttgccttgaacgttgaaccccagaattcattgatgatcaatatatggagaagcttgaatacatatcattatgtgatagagattttgtttgcttatgtcatctgattgggatgataatttgtttatcttaaaattagtaactaatgtctaatacaacttctgattagattggcaaacatcttggactcaacaattcaaaaaaacttcataaacgagtatcatccatgctaaaaaaattcaacctaacatgggaagcagaagttccagacaagacatcgcagtaccgaatttggacttcaaaaaacttctcactctacaaagctggtactgctctgcaaaattttgaggcactctcagaagactgtgatgattgttcggatttgtggtccctagtttcatctaaagatttggaatcacctagttcacagggc

SEQ ID NO: 51505 - DNA, 1381 bp, Zea Mays
gccacgccacgcacttggtccacacgtcgtattcggatgaagcatgagagagaagagcaagaaagacttcgtcacgtcaggtcgacggcgaaagacgcggaggttggtgaaggagtgaaggaagaaagagaacgaaaggcggcctctcactcgcagtcgcagtagcaggttctagaccaccaaacccagcggctcccgctcatctcagttcggcttcggccttcgcattcctctacagatttcgcagttttgctgggggtaactacggaatggggggcggatccggatctttcctcaaggtcttggtcaacaacatggatgtcctcgcggggcctttggtttcacttgcgtatcctctgtatgcctctgttagagcaattgaaacaaaatctgctgtggatgatcagcaatggctcacgtactgggtgctgtactcatttatcactctattcgagctcacctttgctccggtactcgaatggcttcctttctggtcttatgcaaagctgttcttcaattgctgctgcacagaggtacattgagcaaaatggatcaaaagcgtttgagaatcttgttaacaagtttaagagttcgaacccaaggcgctcaattctggaggaggtagaggttgaaaggagggccaggattcaactagaatctgaagcgagggaagtgaaccctttcttcaatccagaatatcagtactaggcaaccattttcccttcacttgccaggaatgtgctaggatcggtttggaggaagatgtctggatattaggattgcgttttgcacctactgaatcgatgatattgtgtagatggacaaccataattgttgtagatatgttgtggcgatggaactcatgtaatggtcatgtcgcgaatgtttcatgctgctggaaattatgtattcacactggactctagttatgtgcctcactagtttcttgaaggtagttgttgaactaggtactagtaacgggtgcgcgctttgcgcgcatggtaaacaatatgcaatattgtttttaagttaattattaatgcttgttataattcatatattgccagacgaataaagcaagaataaagcgagagagttttttttaagatgatacagagcatgaaagacagtatagagcacaacagatttatataaaataaaatagagttaagtgagttgtggccgaaggtaatatgtttgttgcgatatttaaagctaccttgttatatttatatgaaatgtctttagaagagttgaacagttatatataattatagaggacattctacaaacttaaaggttgctaataatctgagaaaatcttcggttcttggaagatctggtgtccaacttttctttgatgcgcaggggtccatatttg

SEQ ID NO: 51506 - DNA, 1855 bp, Zea Mays
gccacgccacgcacttggtccacacgtcgtattcggatgaagcatgagagagaagagcaagaaagacttcgtcacgtcaggtcgacggcgaaagacgcggaggttggtgaaggagtgaaggaagaaagagaacgaaaggcggcctctcactcgcagtcgcagtagcaggttctagaccaccaaacccagcggctcccgctcatctcagttcggcttcggccttcgcattcctctacagatttcgcagttttgctgggggtaactacggaatggggggcggatccggatctttcctcaaggtcttggtcaacaacatggatgtcctcgcggggcctttggtttcacttgcgtatcctctgtatgcctctgttagagcaattgaaacaaaatctgctgtggatgatcagcaatggctcacgtactgggtgctgtactcatttatcactctattcgagctcacctttgctccggtactcgaatggtaaaacaacaaactttcagcacaagtgggcatttcaccagctttagttccatgtgcagtttggaacttaccataatggtcatatgtggtatattttttagggctataaacaatagtaccttaatttctttgctagtgaccttaaatggtttagggcctgtttgaatgcactagagctaatggttagtttgctaaaaaattgctagtggaattagctggctaacgaatagctaactattagctaatttactaaacgtagctaatagctgaactattagctagattgtttggttgtctttagttatttttagcagctaactattgcactttgcaggcttcctttctggtcttatgcaaagctgttcttcaattgctggttagtattgccacagttcaatggagctgcacatgtatatgagcattttgtgaggccaatgattgtaaatcagcaagttgtaaacatctggtatattccaaagaaggatgaatcaagtagacctgatgatgtaatttcagctgcacagaggtacattgagcaaaatggatcaaaagcgtttgagaatcttgttaacaagtttaagagttcgaacccaaggcgctcaattctggaggaggtagaggttgaaaggagggccaggattcaactagaatctgaagcgagggaagtgaaccctttcttcaatccagaatatcagtactaggcaaccattttcccttcacttgccaggaatgtgctaggatcggtttggaggaagatgtctggatattaggattgcgttttgcacctactgaatcgatgatattgtgtagatggacaaccataattgttgtagatatgttgtggcgatggaactcatgtaatggtcatgtcgcgaatgtttcatgctgctggaaattatgtattcacactggactctagttatgtgcctcactagtttcttgaaggtagttgttgaactaggtactagtaacgggtgcgcgctttgcgcgcatggtaaacaatatgcaatattgtttttaagttaattattaatgcttgttataattcatatattgccagacgaataaagcaagaataaagcgagagagttttttttaagatgatacagagcatgaaagacagtatagagcacaacagatttatataaaataaaatagagttaagtgagttgtggccgaaggtaatatgtttgttgcgatatttaaagctaccttgttatatttatatgaaatgtctttagaagagttgaacagttatatataattatagaggacattctacaaacttaaaggttgctaataatctgagaaaatcttcggttcttggaagatctggtgtccaacttttctttgatgcgcaggggtccatatttg

SEQ ID NO: 51507 - DNA, 1052 bp, Zea Mays
gccacgccacgcacttggtccacacgtcgtattcggatgaagcatgagagagaagagcaagaaagacttcgtcacgtcaggtcgacggcgaaagacgcggagatttcgcagttttgctgggggtaactacggaatggggggcggatccggatctttcctcaaggtcttggtcaacaacatggatgtcctcgcggggcctttggtttcacttgcgtatcctctgtatgcctctgttagagcaattgaaacaaaatctgctgtggatgatcagcaatggctcacgtactgggtgctgtactcatttatcactctattcgagctcacctttgctccggtactcgaatggcttcctttctggtcttatgcaaagctgttcttcaattgctgaaggatgaatcaagtagacctgatgatgtaatttcagctgcacagaggtacattgagcaaaatggatcaaaagcgtttgagaatcttgttaacaagtttaagagttcgaacccaaggcgctcaattctggaggaggtagaggttgaaaggagggccaggattcaactagaatctgaagcgagggaagtgaaccctttcttcaatccagaatatcagtactaggcaaccattttcccttcacttgccaggaatgtgctaggatcggtttggaggaagatgtctggatattaggattgcgttttgcacctactgaatcgatgatattgtgtagatggacaaccataattgttgtagatatgttgtggcgatggaactcatgtaatggtcatgtcgcgaatgtttcatgctgctggaaattatgtattcacactggactctagttatgtgcctcactagtttcttgaaggtagttgttgaactaggtatttcttcgtctcttgtctgatataggtgtaaaccatgtggcactgccatgggaggttgactgtccgaatgctacgcttttattaaagctgccagaagcactgaccagtgcactcgactcaagtttggatgaggctgtccgagcagtctgcctaccgtctaccgagcctcacgctcagtag

SEQ ID NO: 51508 - DNA, 1178 bp, Zea Mays
gtggaaaaaaaaatccgttagcaagcctttggtttcacttgcgtatcctctgtatgcctctgttagagcaattgaaacaaaatctgctgtggatgatcagcaatggctcacgtactgggtgctgtactcatttatcactctattcgagctcacctttgctccggtactcgaatggtaaaacaacaaactttcagcacaagtgggcatttcaccagctttagttccatgtgcagtttggaacttaccataatggtcatatgtggtatattttttagggctataaacaatagtaccttaatttctttgctagtgaccttaaatggtttagggcctgtttgaatgcactagagctaatggttagtttgctaaaaaattgctagtggaattagctggctaacgaatagctaactattagctaatttactaaacgtagctaatagctgaactattagctagattgtttggttgtctttagttatttttagcagctaactattgcactttgcaggcttcctttctggtcttatgcaaagctgttcttcaattgctgctgcacagaggtacattgagcaaaatggatcaaaagcgtttgagaatcttgttaacaagtttaagagttcgaacccaaggcgctcaattctggaggaggtagaggttgaaaggagggccaggattcaactagaatctgaagcgagggaagtgaaccctttcttcaatccagaatatcagtactaggcaaccattttcccttcacttgccaggaatgtgctaggatcggtttggaggaagatgtctggatattaggattgcgttttgcacctactgaatcgatgatattgtgtagatggacaaccataattgttgtagatatgttgtggcgatggaactcatgtaatggtcatgtcgcgaatgtttcatgctgctggaaattatgtattcacactggactctagttatgtgcctcactagtttcttgaaggtagttgttgaactaggtatttcttcgtctcttgtctgatataggtgtaaaccatgtggcactgccatgggaggttgactgtccgaatgctacgcttttattaaagctgccagaagcactgaccagtgcactcgactcaagtttggatgaggctgtccgagcagtctgcctaccgtctaccgagcctcacgctcagtag

SEQ ID NO: 51509 - DNA, 579 bp, Zea Mays
atcataaataataagtgtttcttacttgaaaatgaaatattttgagcatggtaccttgttcctcctaggttttttccttgtattttgtttttaaaacattgttatgtattgtgaatcgtattcatctcagctccatccacttatgcaggtagcggctcctccaaaactgtccgcagaaaatatatcatcagtgcaccatataaaccaaaaaaagggcacatcaggaagctcgataacgtcattgatgtcctcaggagcagcttctgtgtcagccggagctttcgttttctcttcaagccttacttcggtaacaggagcgtatggcaaagactcaacggcaagctgcaaaggaaggcgatgtgagaactaaggtagactttaaactagcaagacataaacagaactgtctacgtctcacttcaaattctggagcttttaagtgtgattgctcaaaatcattgacattgtcatgttcatgccactaaaaagaggccagataaaaacatttttggagcatttcaagtgcttatgtgaataaataaaatgaatcagaatagctgaggatcatgggagagagac

SEQ ID NO: 51510 - DNA, 345 bp, Zea Mays
aaagactcaacggcaagctgcaaaggaaggcgatgtgagaactaagacctgctttgtgccaagataaaggttgccaaagtttgacttgcatctccaggtcgcagcgacaaagaaaggtgggcgatgcagtggcgacgcgggagcacaaccaccaggtatgtatggtattgatttggggacaatagtgggactggagcttgacgtcgatatcgtggcggcgaacacaacgacaaagaaggtgaacgctgcttctgtctcattttttaggacattgagttgtccaaagaaataaatgattcattcaggcaatcatctcgagctaggacaaggcttccctccagcatt

SEQ ID NO: 51511 - DNA, 831 bp, Zea Mays
gaagttgacatatcacattagcaatgaactatcagggcagtgatcatgattttgtacactactttggtgtatcatcgcctaataaagtatccacaaactcatgagccttttttccggttccagctgcagaccccaaagcagaacctgtagttctagcaaataagtctaaatggtcaccagagcaggggcaacacaggatctgacgcccattctatgttgctgaagtcgaagcacatgtgctcacaatcaaaaagcatggaacaagaaggctggaattaactaagaggagaaaatttgaatgtgcatgagcaatgtaggctactggcagttttggtgactgcaacagccagcaatggtctaatgccatcaagggggtgtcaagcaaggcgttcatggtatttagtccttattgtttatgtggtcgtagattgctgtgggtaacactgatcgcttctatgccgctgcaagcaaaccggtgtgtgaggaggttctgtcatgcctaccaaatttgtaagaagactcttctgcctgtggcccaacttctagatccagtggtgccaaacctcaatcaacattgttcaggatgttgtcagccatattcagcaatagcagcaacccacgactaatttggctgcccaaaaacatcaggtggcacgagtagggaagatacaaacaacgtacgtggcctggttagctatgagcattctaaagtcatcgtatatgtgagacaccatggattgcatttgcaagtgaacaaaaaactctagaatttgatggttcttgcatctcaatccttctatctaatgacaaaattgatttgttttagaaata

SEQ ID NO: 51512 - DNA, 1561 bp, Zea Mays
gtccactgaactgtggattacatgcgagtatgcgactcaagtcaaaaatcaccacccgctcccactcccagccatgcctctcatcttcttctccgccgcagcccccctcgtcgccgtctccctgctgcccctccccacccactgctgcctccgcctcaccgccacccgcgcggccgccacgagcacaaccgccaccccgggtcccgctcccgcgagcaccttcgccgtcgaggactacctcatcgccagctgccacctcaccccaccgcaggcgctcaaggcgtccaagagcctggcgcacctcaagtccgcatccaacgcggacgcggtgctcgccttccttgcggacctcgggctctccccaaaggaggtggccgccgttgtggcgtccaatccgcgtgtcctctgcgctcgcatcgaccgttccctggctcctatctccacggagctccgcgcgctcggcctctccccgtcccagatcgcgcgcctcgcgcagatcgccggccgctacttcctctgccgcagcttcgtctccaaggtacggttctggctcccgctcttcggctcccccgagcggctcctccaggccagcgactggaactactggctcctcagctccgacctcgagaaggtggtggagcccaacgtggccttcctcaggaagtgcggcctcagcgcagtcgacatcgccaagctgctcgtggccgcgccgcggctcgtcaccatgcctccggagtatgtccaggacgcggtgcggcgcgccacgcagctcggcgtggcgccgggctcccagatgtttcgccacgcgctctccaccgcgggatgtatcgggcaggagaaggtcgactccaaggtcgccgtcctcaaggagacgctcgggtggtcgcaggaggaggtgagcctggccatcagtaaggcgccgcggatcctggttgcgtccgaggagaggctgcgccggaacgcggagttcctgctcaacgaggtcgggctgccgccgcagtacatcgcccgccgttcggtgcttctcatgtacagcctcgagaggcggatagtgccccggcacctcgtgctgatggttctcaaagagaaggggttggttgagcaggacaggtgcttcttcaacgtggtggcaccaacagaagagaaattcttggagaaattcgttgctccctacgaggaatccatccctggtcttgccgatgcttatgagtctgcttgtatggggaaagtgacccggggcctatgactggaatgtcgaggagaatttcgaagccttcgtcatctcctcggtggccaactccatgtatccatagtggtagtgtcagagacggatgccgcggatgaaatatccaacctgacgcgcgaaccagcaaatcaaggcgatagagaacgagcccagaacctcaatgtttggcggatatacttcgtcctccaaattttaccggaccctttacaggagcttgctagacgcataaagtagctgaagaactgctatatataacgtacagaacgttttaccgagcgttgctggaggcagcctaattccggcctactgtatacc

SEQ ID NO: 51513 - DNA, 1268 bp, Zea Mays
gcgagtatgcgactcaagtcaaaaatcaccacccgctcccactcccagccatgcctctcatcttcttctccgccgcagcccccctcgtcgccgtctccctgctgcccctccccacccactgctgcctccgcctcaccgccacccgcgcggccgccacgagcacaaccgccaccccgggtcccgctcccgcgagcaccttcgccgtcgaggactacctcatcgccagctgccacctcaccccaccgcaggcgctcaaggcgtccaagagcctggcgcacctcaagtccgcatccaacgcggacgcggtgctcgccttccttgcggacctcgggctctccccaaaggaggtggccgccgttgtggcgtccaatccgcgtgtcctctgcgctcgcatcgaccgttccctggctcctatctccacggagctccgcgcgctcggcctctccccgtcccagatcgcgcgcctcgcgcagatcgccggccgctacttcctctgccgcagcttcgtctccaaggtacggttctggctcccgctcttcggctcccccgagcggctcctccaggccagcgactggaactactggctcctcagctccgacctcgagaaggtggtggagcccaacgtggccttcctcaggaagtgcggcctcagcgcagtcgacatcgccaagctgctcgtggccgcgccgcggctcgtcaccatgcctccggagtatgtccaggacgcggtgcggcgcgccacgcagctcggcgtggcgccgggctcccagatgtttcgccacgcgctctccaccgcgggatgtatcgggcaggagaaggtcgactccaaggtcgccgtcctcaaggagacgctcgggtggtcgcaggaggaggtgagcctggccatcagtaaggcgccgcggatcctggttgcgtccgaggagaggctgcgccggaacgcggagttcctgctcaacgaggtcgggctgccgccgcagtacatcgcccgccgttcggtgcttctcatgtacagcctcgagaggcggatagtgccccggcacctcgtgctgatggttctcaaagagaaggggttggttgagcaggacaggtgcttcttcaacgtggtggcaccaacagaagagaaattcttggagaaattcgttgctccctacgaggaatccatccctggtcttgccgatgcttatgagtctgcttgtatggggaaagtgacccggggcctatgactggaatgtcgaggagaatttcgaagagtacagtttaaaacagag

SEQ ID NO: 51514 - DNA, 2195 bp, Zea Mays
gtaaaactatattgaagtattatcttaatgttttatggtctagagagatgtccacttgctagttgctacgacacccaacgctgaacattctcctcaatcaaatttggaaccagtacagggtctttacaagaaaacgaccgataccgtctccgcctttccttccttttgcgctagcttccacagcatcaccaccgccgccccagctcgcttccctccccgctacacggacacggccgctcagcgctcaccaccgcttccatgctcctcgcctcgtctcccgctcgcgagacgtagctccagatcctctcccccacccacggcagcaccgcattaccctcagatccacccccgcgagcctcatttcagatccacccatgcgcctcccggtccttttcgccctgcagctggtcgccttggcggcggcagcttcggcggccgaggccgcggcgacgttctcctcgaggatggtgcaccgtctgtccgacgaggcccggctggaagcgggcccgcgcatggggttgtggccgcagcgcggaagcgggggctactaccgcgcgctgctgaggagcgatctccagcggcagaagcggcggctcgcgggcaagaaccagctcctctcgctctcaaagggcggcagcaccttctcccccggcaacgacttaggctggttatactacgcttgggtggatgttgggacgcctactacctcctttttggttgcattggatactggaagtgacctgttctgggtaccctgtgactgtattcagtgtgcccctttgtctagctaccgtggaaatctgtgattgatcggcaggtgctccgtcgtaaatggagcatctattatgcaggatagagatcttggaatatacaagcctgccgaatcaacaacaagtcggcatcttccttgcagccacgagctatgtcaaccgggttcaggctgcacaaacccaaagcaaccttgcacatacaatattgactacttttcagaaaatactaccagctctggtttgctaattgaggattccctacacttgaactccagggagggccatgcaccagtaaatgcttcagttattattggctgtggtcgaaagcaaagtggtgactatctggatggcattgcaccggatggactccttggccttggaatggcagacatttcagttcccagtttccttgcaagagctggactagttcggaattccttctcgatgtgcttcaaggaagatagttctgggagaattttctttggagatcaaggagtgtcctctcaacaatccacaccgtttgttcctctgtatggcaaacttcaaacttatgctgttaatgtcgacaaatcttgtattggacataaatgtcttgagggttctagcttccaggctttagtcgatagtggaacatcatttacttctcttcctcctgatgtttacaaggctttcacaacggagtttgacaaacaaattaatgcttcaagggtgccttacgaagacagtacctggaaatattgttacagtgctagtcctcttgagatgcctgatgtgccaaccataatcctggcattcgctgcaaacaagagcttccaggctgttaatcctatcttgccatttaatgacgaacagggagcgcttgccaggttctgcttagctgtactgccatcaacggaacctattggaattattggccagaatttcctggttggataccacgttgtcttcgacagagagagcatgaagttgggctggtaccgctctgaatgtcgcgacgttgacaacagcacgaccgtgccgctgggcccatcgcagcacggcagttcagaggacccgttgccgtcgaacgagcagcagacttccccgcccgtgacgcctgcaacgacaggcacggctcctccctccagtgcaacgacgaaccgacagatgctctttgctagctcttacccgttgctgtttctgacaatgtccactgtgttcttcatctcatgagcaactgataatctgatatgctggtaatcgatagccctctgtatattgtatgtgctttatatgtggtgccttttgctctatttttttttgaggaaacagtagggaactaaggccgatccctactgaaatagaattaaaccaaaacaaacaaaagtacagaacggtacagcacaggttcaggagacaaaaaaaggagactaaggggaagtgttt

SEQ ID NO: 51515 - DNA, 2181 bp, Zea Mays
gtaaaactatattgaagtattatcttaatgttttatggtctagagagatgtccacttgctagttgctacgacacccaacgctgaacattctcctcaatcaaatttggaaccagtacagggtctttacaagaaaacgaccgataccgtctccgcctttccttccttttgcgctagcttccacagcatcaccaccgccgccccagctcgcttccctccccgctacacggacacggccgctcagcgctcaccaccgcttccatgctcctcgcctcgtctcccgctcgcgagacgtagctccagatcctctcccccacccacggcagcaccgcattaccctcagatccacccccgcgagcctcatttcagatccacccatgcgcctcccggtccttttcgccctgcagctggtcgccttggcggcggcagcttcggcggccgaggccgcggcgacgttctcctcgaggatggtgcaccgtctgtccgacgaggcccggctggaagcgggcccgcgcatggggttgtggccgcagcgcggaagcgggggctactaccgcgcgctgctgaggagcgatctccagcggcagaagcggcggctcgcgggcaagaaccagctcctctcgctctcaaagggcggcagcaccttctcccccggcaacgacttaggctggttatactacgcttgggtggatgttgggacgcctactacctcctttttggttgcattggatactggaagtgacctgttctgggtaccctgtgactgtattcagtgtgcccctttgtctagctaccgtggaaatctggtgctccgtcgtaaatggagcatctattatgcaggatagagatcttggaatatacaagcctgccgaatcaacaacaagtcggcatcttccttgcagccacgagctatgtcaaccgggttcaggctgcacaaacccaaagcaaccttgcacatacaatattgactacttttcagaaaatactaccagctctggtttgctaattgaggattccctacacttgaactccagggagggccatgcaccagtaaatgcttcagttattattggctgtggtcgaaagcaaagtggtgactatctggatggcattgcaccggatggactccttggccttggaatggcagacatttcagttcccagtttccttgcaagagctggactagttcggaattccttctcgatgtgcttcaaggaagatagttctgggagaattttctttggagatcaaggagtgtcctctcaacaatccacaccgtttgttcctctgtatggcaaacttcaaacttatgctgttaatgtcgacaaatcttgtattggacataaatgtcttgagggttctagcttccaggctttagtcgatagtggaacatcatttacttctcttcctcctgatgtttacaaggctttcacaacggagtttgacaaacaaattaatgcttcaagggtgccttacgaagacagtacctggaaatattgttacagtgctagtcctcttgagatgcctgatgtgccaaccataatcctggcattcgctgcaaacaagagcttccaggctgttaatcctatcttgccatttaatgacgaacagggagcgcttgccaggttctgcttagctgtactgccatcaacggaacctattggaattattggccagaatttcctggttggataccacgttgtcttcgacagagagagcatgaagttgggctggtaccgctctgaatgtcgcgacgttgacaacagcacgaccgtgccgctgggcccatcgcagcacggcagttcagaggacccgttgccgtcgaacgagcagcagacttccccgcccgtgacgcctgcaacgacaggcacggctcctccctccagtgcaacgacgaaccgacagatgctctttgctagctcttacccgttgctgtttctgacaatgtccactgtgttcttcatctcatgagcaactgataatctgatatgctggtaatcgatagccctctgtatattgtatgtgctttatatgtggtgccttttgctctatttttttttgaggaaacagtagggaactaaggccgatccctactgaaatagaattaaaccaaaacaaacaaaagtacagaacggtacagcacaggttcaggagacaaaaaaaggagactaaggggaagtgttt

SEQ ID NO: 51516 - DNA, 668 bp, Zea Mays
gctgaatttacctttttttttctcgtttgaataagttagagagcatcggaaattctgaggaaacactcgaggcttccaacacaaccgggatcacgccatgaagctcatctcgaactcatcctcgccgaccatcacgaagtgcgagccctgatcgatcaccttcctgccatcctccgtcgcccggctgaagtgcttgcaggggctcacctcgaactccacgtgcgccgtctgcgtcgccctcaggtgcaggctctggaacccgatcagctggctggccggccggccgctgccgtccgtcgcgttgggccagcgcatgaacaccagcaccgagtgcttcccgtccatgggcccgtggttctgcacccgcaccaccgccgggaacttgagccggtcgcacgtctccgacccgatcgcctccacgtcgtagctcgccatgccgcccgccgttgcctccaccgccttaaggccggcgacgttgctcgtgggaggcggcttcgtggcgaagcggtgggagtacttggagtagctgaggccgtagccgaagttgaacactgtcgggccgcggtagaaccggtacgtccggccggggtagcccgtggccgggtcggcgcgcatccgcatgtccgtcataggcactctcgtgaaatcttggggataccatgtcacgg

SEQ ID NO: 51517 - DNA, 99 bp, Zea Mays
gcgccgtcacctgagagaagagagagagggggagtcgttttgcatttcgcttcaccagtcgtcccaaaccaaaacctggcatggcattggcagccacca

SEQ ID NO: 51518 - DNA, 906 bp, Zea Mays
aaaaccatgcttttagtgcctcttgttagtgcgtaccgctatgatggcccagaggtgaacacatctttggctcattctgaagccaaaatacttcatgagaagatccataagaaggcttacagtgatgaggagatcattagaattctcaccacacggagcaaagctcagctacttgcaacattcaatagctacaaggatcagttcactcatgcaatcaacaaggatctgaaagctgaccccaaggatgagtttctttcaacactgcgggcgatcatccggtgcttcacctgccctgacagatacttcgagaaagtcattcgactggctcttggaggcatgggcactgatgaggatgacctcaccagggtcgtaactactcgcgccgaggtcgacctgaagctgataaaggaggcttatcagaagagaaacagtgtgccgctggagcgtgctgtggccaaagatacaactagagattatgaggatattatgcttgccctccttggggcggagtgaggaggcgtgcctcaactcgatctcatctgctcctacttgtttgatggggccaaaaaactgcatcgacgtggtatccacatggccgtggttttgaataataataaatttgtaacacgtagcctgcattagcagcgcgttttaaataaaggaacttcctgatatacttgttatcgtttgactgcgttttcacagaagctgttttgttcgttatggttatcctttcctgatgactgatgggaacatacaaactggatgctgttttgacgttaggcacagctctcttctttttccttgccttttctggttatttacaacagtcgagagcagagcagccagagttcatggtgtactgtattaaactcatgacgagtgaaatattccggtgtgcttgac

SEQ ID NO: 51519 - DNA, 468 bp, Zea Mays
cgctgtccggagcgcctggtggcctgggtgatgtgcggggagctggagcgagcgggcagctgcagctgcgccggcacagggctgcaggtcgtgtcaagagaagagactcgggacggcacggaatggggtcgatcgctcgccacggcagtttgatgtgcgcgcgcgtatatatacaaacgagcttgggcgtggcctgtggcaactggaatcgtgtcgtgtcatgcattatacggcgccagtgacagtgatgccggcgtcgcgcttaagctagctcgctcgctcgctcgctcagcagatgggtcgtctcgtctcaccgatactagcaacaaccaattgttcggttattgatattacatgtgtattggagtgtattgggtgagatttgaaatggattttgacttgttatggatttaaaccggctcaatcccaccaaatacatgtggattatcaccaaaacgaacaagccct

SEQ ID NO: 51520 - DNA, 2603 bp, Zea Mays
gcccccacgcagcactccgcgggccggggccgcgcggccgcgaacgtcgccacggtcatggtcgccatgacggagccgcgcgacccgccgaccggctgcgccctgttcggcatctacaacggcatgttccgccgccgccgctccgcgtccatgacctccctccacaggatcaacggggccgaggccgaggccgaggccgcggcgccgccgaaccagaagcccgccgcgcaccgcgactcctccctcgcgcgccgccccagcgccatgcccgtgccggcggcggcgcagaacggcaggagcaggccggccgccaaggcagcgcccgccgcggagccggcggcggagtacagcggcatggccgcggagctggacaggatgatcctcgaccaccagagggtcaagggcaccgcgcagctggtgcgcgccacctcgggcaacatgatgctgcaccgcaacctcggcaacctgaacgcgggcggcagggcggcgaacgagcggaaggcgccccacgggtacgcgtcctccggcatggggaacatcgtcagggagccccggccggcacctgcagcggggggccagctgtgccgggcgctgtcgcaccgcacggaccccgagaagctcaaggagatgggcaacgaggagtaccgccaggggcactacgcggaggcggtggcgctctacgaccaggccatcatcatggacgccagccgcccggcgtactggagcaacaaggcggccgcgctcgccgcgctcggacgcctcatcgaggccgtcgccgactgcaaggaggccgtccggatcgatccttcgtacgatcgcgcgcaccaccggcttgccggcttgtacctcaggtaccgcgtacatctcgccgattttcagatcagagagaggcacagtctacagatttctgccatccattgccttgcccctccgtcgtgtcactgctcgtccaattctgcttcaactcttcgtcaccagttgtgcggagaacctgacaaagccatctaccacatgaagcaatcctccaacgaatccgcgggcgcagacgtttcccgtgcgcaatcggtgaagagccgcatcgccaggagcaacgacgcgcgcaggctcaagaactggatcacggtgctccaggaagcgcaggccgccgtggccgacggcgccgactgtgctccgcaggtgatggcgttgcaagccgaggcgttgctgaggctgcaacggcacgacgaagccgactcgcttctcagcggcgccggcgcgccaaggttcggggtcgacgagtcgaccaagttcttcggcaccttcggccacgcctacttcctcatcgtgcgagctcaggtcgacatggctgctggaaggttcgaggacgcggtggcgacggcgcagacggcgtttcagctggacccaagcaaccgggaggtctcggtcgttcagaggagggccaaggcggcggccgcggcgcggctgcgtggcaacgacctcttcaaggccgccaagttcgcggaggcgtgcgccgcgtacggcgagggcctcgacagggagcccggcaacgccgtgctgctctgcaaccgcgcggcgtgccacgccaagctcgggcggcacgagaaggccgtcgaggactgcagcgccgcgctcgacgtgcgcccctcgtacagcaaggcgcggctcaggagggcggactgcaacgtcaagctggagaggtgggaagcgtccttgagagattaccaggtgctggtccaagaactgccggagaatgaggacgtgaagaaggctctctctgaggtcgaagccaagctcaagggccaaaggcatggggccgcagcagccagatctcagcactgacgtcatgttttctttactctgtcggctaccagagaaatcaaccgcgactgcttaagacttaagaggacaagattttcgaaagaacaattctgcatgcgccgatgaacaatttgttataccaaatctgtatgttttttttgtccaccatatacaccaatttgaaaaggaggtcaagagatggaactgtacataatacttgctccagtgtgatgtatagttagttgaatgcgtttggttccttgcgaaaagaaagctgatgtatttggttgcaggggtgccggtgacggatcccagagatttgtaaggtttcagtttggctctgaaaatgacaactaccgactgaagactctgctctagaaatgaatgatcatctcgaatctaaattatgtgatttgttcctttgagcaaggcctcttttgctgcagctgcagccattctcctgctgttcccatcttacaacttcagatgtaaaactttgatcgatgacttaattattttcttttgaagaaaaccctccaaagaattcagggaatttcagctgttcacctaaaaagaaaaggaaattaggctcaaaacttaacaagtgcactatttattagaagaaattctgcaaaataaaaactgagcatgacaacctaaacaactacaattcagtggtaaacctgaaggacaatcagacggctaggtgaatgagagcaaattaaaaattctttctaatagccattattgaactaatcctaaaaaatccaaaatctccaaacaag

SEQ ID NO: 51521 - DNA, 1505 bp, Zea Mays
ctgtcgccgtttcttcttcttcctgcttatatattgaccacagcatgctactccaaggccacggcatgctcggtgccgaaggatgccttggtacccgaggttcttcaggcgttcttccgactggaggccgcaggaccgtcccagtcccagcgctccaactccaagatgaccgcaacaacaagggggaagacatgttcttctccgactggcctgagctggccagcttcgacgatctcgaggctagcctgagaaatttcgatcctacgtttgagattgggagcagttattttgatgacatgctatggccctcaaattgctcaccgggagctcagctagcacggaacggctactctgacgatattgatttctcaatcgatcaaaaagacagcaacagcactccgaaggtaaatacgacaaaaaccaagcaacagtccaggagaaacggagctagtggtggtagcagtggtacagcctcgaaccacgaagcacatgccagctcctcttccggtctttcggacgccgaactcttcctccacccgttcgatgatactacagcactagcgagccaaacgtgggaggaggacctacaggccattctttgttcgattccggaaacgcgagcagtcgtcccagcggcgtcaaccgccatgtgcgccgatggctcgtccacctgttgctcggggccagacatcgttgccgctcaccacgttcctcgctcggcgacggcgacgactaaagacgccgcctttagtgggtctccggacacgatcctggaggagatggctgagaacccgctggacatgtacttccctccactgccaacaacatccggacagtccggaacgatgatgatgagcgacaccacttgggcgccggaacatcggttccgagaagagttcgcgggcagctgcgctctggggtgcgcggagctacggttctgctcggaggacgtggcctccgcaggagtatttcataagcagcctggctcggcgacggcggtcgtcctggatgccgtgccagtgaaggatctttcgtttcagaagcttcagcatggcatgaaccagcttgatctggccaccagaggacgcatacgggattccctgtaccggttggccaacaggcttgaacaaacgcattgcgttgccagaacaagcggaagaatgggttcaaataggttcgaatcggacgggtggggcgaaacgcagacgacgagccccatggatcggttagtcgcgcagctccttctgcagaaaccctctcgccggaagactaccccgccgcaccgcgtgacgtagttttcctccaccggaggcggagaccctagtcgccgcttgcatcaatgcaaggactatacctcgttcctgaattctgtcctgcttctgctctgaaagcctgtaatacaagaaaaagaatcatatttagcatcggaatataacatggccacttatttagcaccggaaaagcaattcttttgatataaaggcaattcttttgatatagacaac

SEQ ID NO: 51522 - DNA, 1317 bp, Zea Mays
cccatccatccctttcgtctgaacgccgccggcagctgctgttctcggccagccctccttgccggcgacccgaggcttgctggcaagcgtcgaacagatgaatcaagcgtagggccttcgccaccatgtcataaaatcagttaactgttttcccacttagtctacttgcttcatctcgattttccatatttctgagatcacttaagaaaagacaatctgttgcacacatcaatacatgccgatattcttcatgaaaagcatttgcaataaaattttagttgaggaggaagaacaatatatgagagacagagagagatcggtgtgagttggaaacggggaggcttagacaatgaagcgtctatgggatgaagatggctcacgctttaacaacttccaaaatcttcaccaattttcatcgttatgctttctatatacttcagctgatttcttcccaggacgaaaaagcaaaagaaacttctacaagcaagatgcagtatgattttggcatgacaggaatcataagattccattagatggatactcagatacaggggctacctggttcatttttttgatgatgtgcaacttcaaactggtatgcccctctcctagatccatctaaatcgtcgatggcgaccaacagcagcagccccacccccaccccgctcctcgcctcagcgtttttcccctcctcgacatgctctaccttccatggtcggtacagctgattgtgctctctctgacctcgctctcctaggggaggagccgggagcgagagggggatctccactcatcatcctgacactcgctccaaacactcaatgtcggattctccgtgctcctgcaccaccctcccctcggcagcgttcctcctccgcccacccacccacccagtggaatgcgaagagatccacccgagagccggtggattggtttcttcctctattggtaagtcattcctggtcggtctttgattggacggattagttttggttcctttgtcgccaggcgaaccgaatcttgctcctcggactttccagcactatatcctacacgtgctgctctatttaagtaccttaagatgaccacaatatttttatggaatactgagccctttctctgcttttaagaattggttatcttcgtgtgtcattagtggttttgagtccaaccttgaagtaactgtcgcttcaaaatatccatctagcattttgtgaaagcactcactctgttcaacaagcatcaaattggaaaactggcacgtcatattacagcagtaatttcattatttgatacaagaatctccctcaaatttgc

SEQ ID NO: 51523 - DNA, 1976 bp, Zea Mays
ctttcgtctgaacgccgccggcagctgctgttctcggccagccctccttgccggcgacccgaggcttgctggcaagcgtcgaacagatgaatcaagcgtagggccttcgccaccatgtcataaaatcagttaactgttttcccacttagtctacttgcttcatctcgattttccatatttctgagatcacttaagaaaagacaatctgttgcacacatcaatacatgccgatattcttcatgaaaagcatttgcaataaaattttagttgaggaggaagaacaatatatgagagacagagagagatcggtgtgagttggaaacggggaggcttagacaatgaagcgtctatgggatgaagatggctcacgctttaacaacttccaaaatcttcaccaattttcatcgttatgctttctatatacttcagtaagcagctcctaaactgccagtaatatctcattgcaagttaatacattttttctttcctgcattcctcacagccccaacattcttaaataagcacaaagatcatgttgcacgcaccttcaactatatttaggttctattttactatgtcccatagacattgcatttcaacaggaccctctccaatatattccaactccaactctatccaaatatttacaatcaaaattatacttacaagaaaacaatgtcaaccatcttcatcgcatttgttacaaaagaagcaagtactgacgcatttgttacagaagaagatagtcgtttccccttttgcatttgcttttttgttaatttatgactattgtccgctctatttatagttcaatcatagatgatagttacgcgctggttttgccctggaagacaaaaaacgaatttaaggggaaagctaatgtactgccaacaactgaatttggatgcccgcttatcaggtttcatttggacattttgttagctgtgtgaattctgaagtggtaagaaaaacagacaagacccgaggataagcaatagttagttaaaaaagaaaaaacagcaaattattgaaagtacacctccttgaaccaatatttgttttgtttacagttgatccaagtttctatatcaatgccaggctgatttcttcccaggacgaaaaagcaaaagaaacttctacaagcaagatgcagtatgattttggcatgacaggaatcataagattccattagatggatactcagatacaggggctacctggttcatttttttgatgatgtgcaacttcaaactggtatgcccctctcctagatccatctaaatcgtcgatggcgaccaacagcagcagccccacccccaccccgctcctcgcctcagcgtttttcccctcctcgacatgctctaccttccatggtcggtacagctgattgtgctctctctgacctcgctctcctaggggaggagccgggagcgagagggggatctccactcatcatcctgacactcgctccaaacactcaatgtcggattctccgtgctcctgcaccaccctcccctcggcagcgttcctcctccgcccacccacccacccagtggaatgcgaagagatccacccgagagccggtggattggtttcttcctctattggtaagtcattcctggtcggtctttgattggacggattagttttggttcctttgtcgccaggcgaaccgaatcttgctcctcggactttccagcactatatcctacacgtgctgctctatttaagtaccttaagatgaccacaatatttttatggaatactgagccctttctctgcttttaagaattggttatcttcgtgtgtcattagtggttttgagtccaaccttgaagtaactgtcgcttcaaaatatccatctagcattttgtgaaagcactcactctgttcaacaagcatcaaattggaaaactggcacgtcatattacagcagtaatttcattatttgatacaagaatctccctcaaatttgc

SEQ ID NO: 51524 - DNA, 2313 bp, Zea Mays
caaaagttgaagcggaactgcagttctgtctgagtcctgatcctgactcccgaggctctcctccaaaaccccctccttaaaccctagcttccgtacgcctccgcgctcccccatggcctcctcgtcgcaatcgggcggcgccggaggcggcgggacggttgcttccaatccccgcgtctggattgtcgcgagcatcgccgtcgcgggcgtcctcgtcctcgcggaggtcgcgcgccgccgccgccggtggctgcggggcatgtccggcacggcacccgacgctggatccttctgcgaccgctttgagcttcaccctccggcgcagccgcctcctcccgcggctcgccacattctctcgggtctgaccttcgccgctagtgacaacttcgagatcgagggctacgtagccgggtttgggaacccagactggaagaaaactcatgagacggcgaggcacactgctgtggctgtcacaatgctgcggaaacagggggccacctgcgttggaaggacaatcatggatgaactaggctttggtgtcactggagaaaatttgcaccatggaacaccagccaaccctgtttcttcttcactcgtccctggtggatcatgcagtggctctgctgtggcagttgctgcacaacttattgactttgcaattggcactgatacaattggtgatgtaagaatcccagcttctttctgtggtttactttgttttaggccttcctatggtgttatatctactcttgggaccatagcaaattcacaaagtctcgacacaatcggatggtttgcacgagatccatgtattcttcatcgtgttggtgaagttcttttaccagccgctgtaggtggacttaagcaaacaaggcaatttgtttttgccgatgactgctttcagctgctaaaggtctctaatcagaaaactgtgcatgccataaaaaatgctgtccaggcattacgtggatatcagccacctaaacacatcaatattggccaatatatttattccaatgtacctagcctgaaggagttttgcgaaccagctacaaagttagaagaaggaacatcagccctgaaagcaatctccacagtgatgttgttattacagagatatgagtttaaagcaaaccacgaggagtgggttaacactgttaaacctaagcttggccttgatatctctactcgtgtgctacaagccgtgaattttgcacgggaaaacatcaaatctttgtacgcaataagaaatgaattgcgggttgcactcaagaatcttctaaaggatactggaattttagttctaccaaccacagctggatatcctctgaagagaaactctaaagaaagactatcatctggatttgaggatagaatgtacaaatttgtaggcgttgctgcactttctggatgttgtgaggtcactattcccatggaaaatctggatcatcatgtatctctttcatttgtagcagcacatggatcagacaagtttctactccgtaatatcttggatacatattctctcatccaggaccaagtagttttggcatccaagttggaaactgcaccagtaaccaatgttgatgttgatgtcaatgcatcagagcttctaaaagaaaagggaaatagcgctttcaaaagaagacagtggatcaaggcaattgagttttactcagaggccatcagtttgagtgacacaaatgcaacatattactgcaacagagcagcagcttatctggaactgggccgttaagcaggccgaagcagattgtgaccgggccttactgttggatagaaagaatgttaaagcatatctacggcgtggttttgcaagggaagtaactttgaattacaaagaagcacttcaagatttcaggcatgctttggcattggagccacagaataaaacagctcttgcagcggaaaggaggctgcagaaactcctgaagtgatgtggggagcagcagcacatccgacttgtaaattattttgaagacttgcctggttgaaggcaattttgatcggcagcatgtgaaaggaagatgcgatctgctggataagagtcattaaactattttttgtttgccatcattcgaaaatttgtatctcacgacgattgtcagcaagttttgatatagcttcttgctatgaccgtctattaagggaaaatcttgtatatgcattgtatactacttcgatctgaaggccgagaacgcgagaacccatgcgagcgcttggctctgctggagtgtatgattgtgtagtgcaggatctaatttgggaggcgttgagacgccccttattctccta

SEQ ID NO: 51525 - DNA, 1689 bp, Zea Mays
ctaccatctactgattataaacccccgcttgtccatgcactgatacaattggtgatgtaagaatcccagcttctttctgtggtttactttgttttaggccttcctatggtgttatatctactcttgggaccatagcaaattcacaaagtctcgacacaatcggatggtttgcacgagatccatgtattcttcatcgtgttggtgaagttcttttaccagccgctgtaggtggacttaagcaaacaaggcaatttgtttttgccgatgactgctttcagctgctaaaggtctctaatcagaaaactgtgcatgccataaaaaatgctgtccaggcattacgtggatatcagccacctaaacacatcaatattggccaatatatttattccaatgtacctagcctgaaggagttttgcgaaccagctacaaagttagaagaaggaacatcagccctgaaagcaatctccacagtgatgttgttattacagagatatgagtttaaagcaaaccacgaggagtgggttaacactgttaaacctaagcttggccttgatatctctactcgtgtgctacaagccgtgaattttgcacgggaaaacatcaaatctttgtacgcaataagaaatgaattgcgggttgcactcaagaatcttctaaaggatactggaattttagttctaccaaccacagctggatatcctctgaagagaaactctaaagaaagactatcatctggatttgaggatagaatgtacaaatttgtaggcgttgctgcactttctggatgttgtgaggtcactattcccatggaaaatctggatcatcatgtatctctttcatttgtagcagcacatggatcagacaagtttctactccgtaatatcttggatacatattctctcatccaggaccaagtagttttggcatccaagttggaaactgcaccagtaaccaatgttgatgttgatgtcaatgcatcagagcttctaaaagaaaagggaaatagcgctttcaaaagaagacagtggatcaaggcaattgagttttactcagaggccatcagtttgagtgacacaaatgcaacatattactgcaacagagcagcagcttatctggaactgggccgttttaagcaggccgaagcagattgtgaccgggccttactgttggatagaaagaatgttaaagcatatctacggcgtggttttgcaagggaagtaactttgaattacaaagaagcacttcaagatttcaggcatgctttggcattggagccacagaataaaacagctcttgcagcggaaaggaggctgcagaaactcctgaagtgatgtggggagcagcagcacatccgacttgtaaattattttgaagacttgcctggttgaaggcaattttgatcggcagcatgtgaaaggaagatgcgatctgctggataagagtcattaaactattttttgtttgccatcattcgaaaatttgtatctcacgacgattgtcagcaagttttgatatagcttcttgctatgaccgtctattaagggaaaatcttgtatatgcattgtatactacttcgatctgaaggccgagaacgcgagaacccatgcgagcgcttggctctgctggagtgtatgattgtgtagtgcaggatctaatttgggaggcgttgagacgccccttattctccta

SEQ ID NO: 51526 - DNA, 1480 bp, Zea Mays
gccgaatccgtgcgaccctaaaggatggtttgcacgagatccatgtattcttcatcgtgttggtgaagttcttttaccagccgctgtaggtggacttaagcaaacaaggcaatttgtttttgccgatgactgctttcagctgctaaaggtctctaatcagaaaactgtgcatgccataaaaaatgctgtccaggcattacgtggatatcagccacctaaacacatcaatattggccaatatatttattccaatgtacctagcctgaaggagttttgcgaaccagctacaaagttagaagaaggaacatcagccctgaaagcaatctccacagtgatgttgttattacagagatatgagtttaaagcaaaccacgaggagtgggttaacactgttaaacctaagcttggccttgatatctctactcgtgtgctacaagccgtgaattttgcacgggaaaacatcaaatctttgtacgcaataagaaatgaattgcgggttgcactcaagaatcttctaaaggatactggaattttagttctaccaaccacagctggatatcctctgaagagaaactctaaagaaagactatcatctggatttgaggatagaatgtacaaatttgtaggcgttgctgcactttctggatgttgtgaggtcactattcccatggaaaatctggatcatcatgtatctctttcatttgtagcagcacatggatcagacaagtttctactccgtaatatcttggatacatattctctcatccaggaccaagtagttttggcatccaagttggaaactgcaccagtaaccaatgttgatgttgatgtcaatgcatcagagcttctaaaagaaaagggaaatagcgctttcaaaagaagacagtggatcaaggcaattgagttttactcagaggccatcagtttgagtgacacaaatgcaacatattactgcaacagagcagcagcttatctggaactgggccgttttaagcaggccgaagcagattgtgaccgggccttactgttggatagaaagatttcaggcatgctttggcattggagccacagaataaaacagctcttgcagcggaaaggaggctgcagaaactcctgaagtgatgtggggagcagcagcacatccgacttgtaaattattttgaagacttgcctggttgaaggcaattttgatcggcagcatgtgaaaggaagatgcgatctgctggataagagtcattaaactattttttgtttgccatcattcgaaaatttgtatctcacgacgattgtcagcaagttttgatatagcttcttgctatgaccgtctattaagggaaaatcttgtatatgcattgtatactacttcgatctgaaggccgagaacgcgagaacccatgcgagcgcttggctctgctggagtgtatgattgtgtagtgcaggatctaatttgggaggcgttgagacgccccttattctccta

SEQ ID NO: 51527 - DNA, 1280 bp, Zea Mays
gtgatggaggactgcttcctgcaagactagggccaccatctaagtgtttgaagcacccatatcgggatactggaattttagttctaccaaccacagctggatatcctctgaagagaaactctaaagaaagactatcatctggatttgaggatagaatgtacaaatttgtaggcgttgctgcactttctggatgttgtgaggtcactattcccatggaaaatctggatcatcatgtatctctttcatttgtagcagcacatggatcagacaagtttctactccgtaatatcttggatacatattctctcatccaggaccaagtagttttggcatccaagttggaaactgcaccagtaaccaatgttgatgttgatgtcaatgcatcagagcttctaaaagaaaagggaaatagcgctttcaaaagaagacagtggatcaaggcaattgagttttactcagaggccatcagtttgagtgacacaaatgcaacatattactgcaacagagcagcagcttatctggaactgggccgttttaagcaggccgaagcagattgtgaccgggccttactgttggatagaaaggtaatagatttttgtagatgcaatattcctgtgctgctacgggtgacatgtctgaagcattgtctaccctaagagaggagttccaaaggtttattggatagtcctggatggttctgacatcattaccatcttgtgctgttatggcaacatcaaatccttactgtgaataccgtttgttgcttcagaatgttaaagcatatctacggcgtggttttgcaagggaagtaactttgaattacaaagaagcacttcaagatttcaggcatgctttggcattggagccacagaataaaacagctcttgcagcggaaaggaggctgcagaaactcctgaagtgatgtggggagcagcagcacatccgacttgtaaattattttgaagacttgcctggttgaaggcaattttgatcggcagcatgtgaaaggaagatgcgatctgctggataagagtcattaaactattttttgtttgccatcattcgaaaatttgtatctcacgacgattgtcagcaagttttgatatagcttcttgctatgaccgtctattaagggaaaatcttgtatatgcattgtatactacttcgatctgaaggccgagaacgcgagaacccatgcgagcgcttggctctgctggagtgtatgattgtgtagtgcaggatctaatttgggaggcgttgagacgccccttattctccta

SEQ ID NO: 51528 - DNA, 3522 bp, Zea Mays
cgtcgactcccgtctcccgtccgcatagtgccggccctaggctacccttgaactccacccaattcgccgctccctctcgccgaactcgacgtaaccccaatggaggagggcagcaaggcgcaactgccgcccccacttcacactgaagccatggaccagctgcccccagtcctaatggaccaagacgagggtcgggaagctgcggaaaccatggaggaggaagaagccgccgccgcagacatctccgacgccgcggatcccatggacgatggggaggcggcaggagattccgcggcagccgcggaacccatggaggacgacgcgcccacgtcctccccgactccctccgcgccgtcggccaccgcggccgttgacgactccaccatcgctcggaagcgccgccgccgtaagaagcagttcccgggtatgatccccacggccggcgtccgcgtcctgcgcggctcctcctcctcatcctcccacaccgcggctcatctgtccggcgtcccccgccgccgggggcggccccccacctcctcctccctccgcctcgcccgggagctggattctgaggccctcatcgctctcgctgcggggttccccgcggactccctctccgaggatgagatcgtggccgccgtgctcccacgcattggcggcgccgagcagtctaactaccttgtcgttcgcaatcacattgtagcgctctggcgttccaatcccctctcccccgttgccgctaacgccgcgctcgcatctattcgcgccgagcacgctccccttgttgccgcggcgcattccttcttgtctgagcacgcatacattaatttcggtcttgcccccgccgtcctctcgcttcccccacagcctcctccctcttctcctcccccatccgtccttattgttggcgctggccttgccggtctagctgctgcacggcacctgattgcgcttggattcaaggtggccgtcattgaaggccggctccgccccgggggccgtgtgtttaccaagacaatgcgttcttctgctgtagagtatcccgacactgttgctgctgctgaccttggaggcagcgttctcaccggtatcaatggtaatccccttggtgtcattgctcggcagcttggattcccactccacaaggtgcgggataaatgcccactgtatcttccagatggccgcccagttgaccctgacatggatgctcgtgttgaggctgcctttaaccagcttctggacaaggtttgccagttgagacaggtgattgcagatggtgtaccacatggtgttgatttgtcattgggcatggcacttgaagcattccgggcagcgcatggtgttgcagctgagcatgaagaaaggatgcttctggactggcatttggcaaacctggagtatgctaatgctgccccacttgctgatctctccatggccttctgggaccaggatgatccatatgaaatgggcggagaccactgctttattcctggtggaaattctcagtttgtccgtgcatttagtgatggaatcccggtattttacgggcagaatgtgaaaaggatacgatatgggcgtgatggtgtgatggtgcacactgataaacaggcattttgtggtgatatggtcctgtgtacggttcctcttggggtgctaaagaagggtgacataaagtttgtgcctgagctgccagctcagaaaaaagaggccatccagagattgggttttggtctgcttaacaaggttgtgatgttgttcccttatgatttctgggatggcaggattgatacatttggtcacttgacagaagattctaggcagcgtggtgagttcttcctgttctacagttattcttctgtctcaggagggccattgctcattgctcttgttgcgggggaatctgcagtcaagtttgagcaggcttcacctatggaaaatgttgagaaggtactggaaacacttaggaaaatcttttcacccaagggtattgaagttccaaatccgttgcaagcaatatgtactcgatggggcacagacaggtttacttatggatcatactcatatgtggctattggggcttctggtgatgactacgacattttggccgaaagtgtgcatgatagagttttctttgctggagaggcaacaaataggcggtacccagctacaatgcatggagccctgcttagtgggtatagggaggctgctaacatcttaagggcagctagaaggagagcaaaaaatgtgtactcacctgagaaaatggatattaatgttgatgtaaaagtgggtgttaatggtgaactaaaagacactgttagagatagctgcattgatttggatgatctattccgttctcctgatgctgcttttggcgggttctcagctctccatgacccatctacctctgaaccagactcagtttctttgctgcgtgttggaattggtgctagaaagttaggtgctggttcacttttcctctatggattaataatgagaaagcatgtagctgtgttggctgcaattgagggtgatgaacaacggttgagtataatgtatcgagattttgggacaaaactggtgggattggatagtttgggtgatgctggggaaagccttatctcccggataaaggctgctaggaagtaataccaagtctggaatgttttactcagtctctcagctgtaatggttttcagcctgagtgctgagttttatgctcagcatagttactgacctctgtaatccattcatttgattaattgcttcatatctctcgactctcatcaatgcgcaagtcctcccatgttaatctaaactgctgataaaacagcggagtaatgaaaaatcatatcaccacatcaaacaatttgggattctgattagcgcttcttgtttgtaacaggtacatagtaactttattgtcgacacatcagttagtggttcatgttagttttctttattctttagagggtgattttaaataaatcatcatttttaattcttcttttgtggtcgagctgtatgaaatgtatattcttcttagtgtctatttagaaaggtatgttgctgtaggtatttcccaattcagttgaagtttgaatctgacctcctatccatacaagtcatttgtttggtcagttagatctttaatccttctatctagcagtcaatatctgtggcctaacacaacgtcttgtgaaattacatagtattagcaacacatgtacacagcttgtgaggaagcacttccacttctccaagtcttgggagataaataaacaagcaacatgattactttcagcaccatgtttataccaaagttagcaccattttatgatattttagtccaacaattattggaaccttctatttatttagcaaagcatgatttacgtgactcttatactatcaatccccgttacaagatcgagcacctttctgctcaacgtagatggtcacgaccatctacttcgatttcagggtcttgacattatttgttttgttaactttaagtttcag

SEQ ID NO: 51529 - DNA, 2939 bp, Zea Mays
cccgtctcccgtccgcatagtgccggccctaggctacccttgaactccacccaattcgccgctccctctcgccgaactcgacgtaaccccaatggaggagggcagcaaggcgcaactgccgcccccacttcacactgaagccatggaccagctgcccccagtcctaatggaccaagacgagggtcgggaagctgcggaaaccatggaggaggaagaagccgccgccgcagacatctccgacgccgcggatcccatggacgatggggaggcggcaggagattccgcggcagccgcggaacccatggaggacgacgcgcccacgtcctccccgactccctccgcgccgtcggccaccgcggccgttgacgactccaccatcgctcggaagcgccgccgccgtaagaagcagttcccgggtatgatccccacggccggcgtccgcgtcctgcgcggctcctcctcctcatcctcccacaccgcggctcatctgtccggcgtcccccgccgccgggggcggccccccacctcctcctccctccgcctcgcccgggagctggattctgaggccctcatcgctctcgctgcggggttccccgcggactccctctccgaggatgagatcgtggccgccgtgctcccacgcattggcggcgccgagcagtctaactaccttgtcgttcgcaatcacattgtagcgctctggcgttccaatcccctctcccccgttgccgctaacgccgcgctcgcatctattcgcgccgagcacgctccccttgttgccgcggcgcattccttcttgtctgagcacgcatacattaatttcggtcttgcccccgccgtcctctcgcttcccccacagcctcctccctcttctcctcccccatccgtccttattgttggcgctggccttgccggtctagctgctgcacggcacctgattgcgcttggattcaaggtggccgtcattgaaggccggctccgccccgggggccgtgtgtttaccaagacaatgcgttcttctgctgtagagtatcccgacactgttgctgctgctgaccttggaggcagcgttctcaccggtatcaatggtaatccccttggtgtcattgctcggcagcttggattcccactccacaaggtgcgggataaatgcccactgtatcttccagatggccgcccagttgaccctgacatggatgctcgtgttgaggctgcctttaaccagcttctggacaaggtttgccagttgagacaggtgattgcagatggtgtaccacatggtgttgatttgtcattgggcatggcacttgaagcattccgggcagcgcatggtgttgcagctgagcatgaagaaaggatgcttctggactggcatttggcaaacctggagtatgctaatgctgccccacttgctgatctctccatggccttctgggaccaggatgatccatatgaaatgggcggagaccactgctttattcctggtggaaattctcagtttgtccgtgcatttagtgatggaatcccggtattttacgggcagaatgtgaaaaggatacgatatgggcgtgatggtgtgatggtgcacactgataaacaggcattttgtggtgatatggtcctgtgtacggttcctcttggggtgctaaagaagggtgacataaagtttgtgcctgagctgccagctcagaaaaaagaggccatccagagattgggttttggtctgcttaacaaggttgtgatgttgttcccttatgatttctgggatggcaggattgatacatttggtcacttgacagaagattctaggcagcgtggtgagttcttcctgttctacagttattcttctgtctcaggagggccattgctcattgctcttgttgcgggggaatctgcagtcaagtttgagcaggcttcacctatggaaaatgttgagaaggtactggaaacacttaggaaaatcttttcacccaagggtattgaagttccaaatccgttgcaagcaatatgtactcgatggggcacagacaggtttacttatggatcatactcatatgtggctattggggcttctggtgatgactacgacattttggccgaaagtgtgcatgatagagttttctttgctggagaggcaacaaataggcggtacccagctacaatgcatggagccctgcttagtgggtatagggaggctgctaacatcttaagggcagctagaaggagagcaaaaaatgtgtactcacctgagaaaatggatattaatgttgatgtaaaagtgggtgttaatggtgaactaaaagacactgttagagatagctgcattgatttggatgatctattccgttctcctgatgctgcttttggcgggttctcagctctccatgacccatctacctctgaaccagactcagtttctttgctgcgtgttggaattggtgctagaaagttaggtgctggttcacttttcctctatggattaataatgagaaagcatgtagctgtgttggctgcaattgagggtgatgaacaacggttgagtataatgtatcgagattttgggacaaaactggtgggattggatagtttgggtgatgctggggaaagccttatctcccggataaaggctgctaggaagtaataccaagtctggaatgttttactcagtctctcagctgtaatggttttcagcctgagtgctgagttttatgctcagcatagttactgacctctgtaatccattcatttgattaattgcttcatatctctcgactctcatcaatgcgcaagtcctcccatgttaatctaaactgctgataaaacagcggagtaatgaaaaatcatatcaccacatcaaacaatttgggattctgattagcgcttcttgtttgtaacagctgtatctatgggactcatcctcggggaattgggtaaatggc

SEQ ID NO: 51530 - DNA, 3802 bp, Zea Mays
aaacaatctttttcgctttgttggcttgctgcagagttggttgcctgcgttcatctcttagttccatttgattttactgatattgcaaatgtgtgatccgtgccaatccattggcatggatcacttaggtgataggtactggtacccacctgattatccataccaacaggcattgtacaattctcaagtgctacaacattactaccctcagatgtatggtccagcctctccttcaggaccagcctaccaatacatgggctatatgcctggtggcccaagtccaaggactggattctcgccgatgcagcaaccaatgcgacaacccttctttcagcagccaacgacacagatggatggttctttcccatcagtcccttcgcttccacctaatttcagactccagctgccccctcgtgcagtctcaagggaatctgatgatgcatctggctcccagtcagcccagccagtttcttcaactcctgctacagccacaaacaacgaggaagattcgaggcctgtagtgtctgattcagatccaaacacaccaaattgacttagtgagaatcctggcaacacgatgtgacttcaatctggtgcaggctattggtagtctgtaacagagtcttcatgatactctcacatcttgactgaaaaagttcccaaagatttgttctttcattatttctgattctttttttttttgaattcttgcattgcatttcttcaccgaatccattgtacggacgactgaatttcaagttcaaacttcaggaattcgctagcatataagttccgtggcatgttagcgttcaaagtactgcagtgctgttagttcgtatctcaaatatgcagtacagtttttcattgaggaaccacccagttttattgcaaccagaacaaatttttcccttcagtcgagagaaggctccaatttctactgctgttttattactcacagaagaacaaaacgatttgcagttcggtctgtagcatggcaggcgaaaatacgaactacatactgacaagtgacaagcaagcttgaattctgaaatggacatgttcatgtcacaccataatttctaatgtgaaactgaccgtcacgaaacaaagaaattcagtacttatacttacataatactactctgttctcgaatatttgaatatttgtcaccagttagtttattttaaaactaaaacgcgataaataaaaaagaatagagggagtacaaattttctagtgacattacactttggtttccatatgctcgttagtgttcaaactattagcttgcggctgtaggaacatttgcttggagcacgaactcgaccaaacgctcgaggtcccgccgccttctgctgccgccacggcattctccttccgcactgttgctttcgccttcatgccttggcctttctcaccgtccatggcttcttttatgagccgtgccaccttgtcaatctccagtacaatgtcctagttggtgatcaaccgtagtggcacagaacaatggcatgagtggctgatcaaccgtagtggcacagaaaggtgtggagcgtgggctctggaaggacccaagccgacatacgttcagggccgtgagcccggatgggatgagcggcagctgcaaaattgacgggccgaaaaacaggtgggctcgtgccgcagattcccggcactaagattgtagaagcccatgtaaatcggcccaataacttaatgtttgtttggtagaactagtaatgtagcagtagtagtaactcggacgccaaactttgcacaacaattccttccagtttgtgcaaggaccgattttcacggtctcgacaaacgtgtccccacagaacaaacaatcaaacattcattccctcacaagaaaaacggacagatctcatctccaatcatagcaacccgcttccatgaaaatcattacgtgccaatgaaagtttttgaatataagtataggaggtgtggaccagtaagtactgttttttttttctcgcattctcgtcctcattcataataataaagttggaaacctgcatcgtcgtcgtccccaccagagctgagcccgacaagagcaacacgcccattcagctgcctccaaagcgcccctcccagtcccatacggacgggtgggcgcgggggagacacctcactaaacaaaacacatggggaggcatcagagccgtacaaaggcggccatggccacaataactccgcagcagcggcagtgtcagcttaaaaatcgcatcatcaccaggctctcccggtggcggtggtgccacacgtcacgcaaggttccaacgcagacgcatccagcccgccggtgggtcggcggcactgcgatccagcggtagattcgggctaccagagccgtccgtcaggcgagtcacatgcctgccttcgatctgttaattaagacgtactaccagaccactgggcaagacttggagtggtactagctaggatttactgctcacaaccactctttagtagtctttagtttttacacaccgacacgcgagtaaaatttgtttgagcagggagccaaaaaaatggctacgggcctacggctacgcgagttgcaatggctgcaacggcaagctcgaactagtagagacagtagcgctaataaataagcttgtgatgaagcaagccgccatgggttccgaagaacacacgacagacgcgagacggagaacctggctggctggctggtctccagtagtgagtctctcccgccgaccggagtccggagcggagtgcatgcgcgcaccggggttggcacggcgccgaagcaaaagcagcagcgcgtcaggggtcgtacaggcggccgtcgcagcggcatttccaccccagcggcttgtagttggagtagcgcgagaagccggccgccaccgccaccgtgtcgtcgtcgacgtcggtggcgcgggcgccgcggccgagcccgggcacggtggtcacctggacgggcatgcaggggttgcaggcgctgcaccggttgcggcagctcggcggcgtcgaccccagccgcgacttgtcctccgccaggttctgctgctgcgcctcacggagacgagacacccgacgcgctgtcagtctcagtctgtctcaggactcaggaggagggggggacgagtcgtacgtacggtacgtacctgagaaggggaaaacgtcgcggtgcggacgctgctcgcagcgccgagaaggaagcagagggacacggccgcgatgagcgctcggcgaggtgagctcacggccatgagaccatctcttcttacagccaggaatgaagaagggtggatggatggatggatgtttggggcggatcgatcgagggcaatgggaagcttgctggttgctagaccgagaggttactgaagaaacagaaataagctagctagctagcttctgtctcgtgtataggttcttcttccagaatctaaaacctagtctaaaagctatggctatggaggagatgagcagtgacggtggcgcaggagcacaagcgaagcaagcagggccgcagttgcctggcctatgacgaggaaggttgcaaaggggatcggagcagaggaaggagacgacgatgacatgggcatatatatgtacaaacgtggggggacgacggacgccacggcaaggcaaggactgtgaggaccggttgagtggtgaccaccaccttgtaacctatcactgctttgctttggtaaacacacagcagtggcgttctactgcgcccgccatcatcactcgttctcagggatcgagatcgaggagtgaaatgcaaggagaagatcg

SEQ ID NO: 51531 - DNA, 3922 bp, Zea Mays
actatagtcgctttacaagctaattctctgagatcaagttttggaattcgtaaggggtggtatttgtttaatttaatcctagtgtgacaaagtatgctttcatgtttatttggaggtccccctacctgacgttttgtttgttgatgattagtgcttctgatgtgatctttccagctggtcagatgtttttaggttgtgtgaggtgcacaagcattgaacagaaagcaacttttcccagtgaactagcaatactacgtactggtacccacctgattatccataccaacaggcattgtacaattctcaagtgctacaacattactaccctcagatgtatggtccagcctctccttcaggaccagcctaccaatacatgggctatatgcctggtggcccaagtccaaggactggattctcgccgatgcagcaaccaatgcgacaacccttctttcagcagccaacgacacagatggatggttctttcccatcagtcccttcgcttccacctaatttcagactccagctgccccctcgtgcagtctcaagggaatctgatgatgcatctggctcccagtcagcccagccagtttcttcaactcctgctacagccacaaacaacgaggaagattcgaggcctgtagtgtctgattcagatccaaacacaccaaattgacttagtgagaatcctggcaacacgatgtgacttcaatctggtgcaggctattggtagtctgtaacagagtcttcatgatactctcacatcttgactgaaaaagttcccaaagatttgttctttcattatttctgattctttttttttttgaattcttgcattgcatttcttcaccgaatccattgtacggacgactgaatttcaagttcaaacttcaggaattcgctagcatataagttccgtggcatgttagcgttcaaagtactgcagtgctgttagttcgtatctcaaatatgcagtacagtttttcattgaggaaccacccagttttattgcaaccagaacaaatttttcccttcagtcgagagaaggctccaatttctactgctgttttattactcacagaagaacaaaacgatttgcagttcggtctgtagcatggcaggcgaaaatacgaactacatactgacaagtgacaagcaagcttgaattctgaaatggacatgttcatgtcacaccataatttctaatgtgaaactgaccgtcacgaaacaaagaaattcagtacttatacttacataatactactctgttctcgaatatttgaatatttgtcaccagttagtttattttaaaactaaaacgcgataaataaaaaagaatagagggagtacaaattttctagtgacattacactttggtttccatatgctcgttagtgttcaaactattagcttgcggctgtaggaacatttgcttggagcacgaactcgaccaaacgctcgaggtcccgccgccttctgctgccgccacggcattctccttccgcactgttgctttcgccttcatgccttggcctttctcaccgtccatggcttcttttatgagccgtgccaccttgtcaatctccagtacaatgtcctagttggtgatcaaccgtagtggcacagaacaatggcatgagtggctgatcaaccgtagtggcacagaaaggtgtggagcgtgggctctggaaggacccaagccgacatacgttcagggccgtgagcccggatgggatgagcggcagctgcaaaattgacgggccgaaaaacaggtgggctcgtgccgcagattcccggcactaagattgtagaagcccatgtaaatcggcccaataacttaatgtttgtttggtagaactagtaatgtagcagtagtagtaactcggacgccaaactttgcacaacaattccttccagtttgtgcaaggaccgattttcacggtctcgacaaacgtgtccccacagaacaaacaatcaaacattcattccctcacaagaaaaacggacagatctcatctccaatcatagcaacccgcttccatgaaaatcattacgtgccaatgaaagtttttgaatataagtataggaggtgtggaccagtaagtactgttttttttttctcgcattctcgtcctcattcataataataaagttggaaacctgcatcgtcgtcgtccccaccagagctgagcccgacaagagcaacacgcccattcagctgcctccaaagcgcccctcccagtcccatacggacgggtgggcgcgggggagacacctcactaaacaaaacacatggggaggcatcagagccgtacaaaggcggccatggccacaataactccgcagcagcggcagtgtcagcttaaaaatcgcatcatcaccaggctctcccggtggcggtggtgccacacgtcacgcaaggttccaacgcagacgcatccagcccgccggtgggtcggcggcactgcgatccagcggtagattcgggctaccagagccgtccgtcaggcgagtcacatgcctgccttcgatctgttaattaagacgtactaccagaccactgggcaagacttggagtggtactagctaggatttactgctcacaaccactctttagtagtctttagtttttacacaccgacacgcgagtaaaatttgtttgagcagggagccaaaaaaatggctacgggcctacggctacgcgagttgcaatggctgcaacggcaagctcgaactagtagagacagtagcgctaataaataagcttgtgatgaagcaagccgccatgggttccgaagaacacacgacagacgcgagacggagaacctggctggctggctggtctccagtagtgagtctctcccgccgaccggagtccggagcggagtgcatgcgcgcaccggggttggcacggcgccgaagcaaaagcagcagcgcgtcaggggtcgtacaggcggccgtcgcagcggcatttccaccccagcggcttgtagttggagtagcgcgagaagccggccgccaccgccaccgtgtcgtcgtcgacgtcggtggcgcgggcgccgcggccgagcccgggcacggtggtcacctggacgggcatgcaggggttgcaggcgctgcaccggttgcggcagctcggcggcgtcgaccccagccgcgacttgtcctccgccaggttctgctgctgcgcctcacggagacgagacacccgacgcgctgtcagtctcagtctgtctcaggactcaggaggagggggggacgagtcgtacgtacggtacgtacctgagaaggggaaaacgtcgcggtgcggacgctgctcgcagcgccgagaaggaagcagagggacacggccgcgatgagcgctcggcgaggtgagctcacggccatgagaccatctcttcttacagccaggaatgaagaagggtggatggatggatggatgtttggggcggatcgatcgagggcaatgggaagcttgctggttgctagaccgagaggttactgaagaaacagaaataagctagctagctagcttctgtctcgtgtataggttcttcttccagaatctaaaacctagtctaaaagctatggctatggaggagatgagcagtgacggtggcgcaggagcacaagcgaagcaagcagggccgcagttgcctggcctatgacgaggaaggttgcaaaggggatcggagcagaggaaggagacgacgatgacatgggcatatatatgtacaaacgtggggggacgacggacgccacggcaaggcaaggactgtgaggaccggttgagtggtgaccaccaccttgtaacctatcactgctttgctttggtaaacacacagcagtggcgttctactgcgcccgccatcatcactcgttctcagggatcgagatcgaggagtgaaatgcaaggagaagatcg

SEQ ID NO: 51532 - DNA, 1062 bp, Zea Mays
tccacactccactgtctctcacactcacacagtctcacaaaggctcgtgggctcgtggcctggcctctataaacccccgcccagccggtcacccccaccccatcgcaaatcctcgctcgggcaagaagagccaactgaaaagtattcatccaagaacaccaccccacccgctccaagcacaagtttcgtcttgaagagagccgccaccaccaatggcttgttacaacactgcatctttagcggcgactctgctggcgttcgcgctgacgtttcaggcgcctgacggagagggacctgctcaggctcgccgccaggggagccccgagccgcgccatcaacctggtgctcacggccgccgacgtggccgtggacgggttctgcgagtcccggtgcggcacgcacggcgcgtccccgcggtcccgctccggccggttcgcgtacgcgtgggtcggcaacccggcgtcgcagtgccccgggcagtgcgcgtggccgttccaccagcccgtgtacggcccgcaggcggcgccgctcaccccgcccaacggcgacgttggggtcgacggcatggtcatctcgctggcgtccatgctcgtcggcacggtcaccaacccgttcggcaacgggttctactaccaggagggctcggccgacgcgccgctggaggccgccacggcgtgcgccggcgtgtacggcaagggcgcgtaccccggctacgcgggctcgctgctggtagaccaggccagcggggccagcttcaatgccaacggggcccacgggaggaagtacctggtcccggcgctcgtcgacctggacacgtcgtcgtgcgccaccttggtttagatttcgctggtcgtaatcagtgttttgtggtggcgggtgctgtgcgtggagagtgttccacgcggctgacgattctagtagtgtagtgacctgtgaccatggtggattctttcatctgttcaatgaaaaaaaagaaatattttcacgcacacacgtcggtcgattttgccaacaatatactctgttcccccaaagattttgccaggtttgagcatgagcaag

SEQ ID NO: 51533 - DNA, 2452 bp, Zea Mays
ggcagctgcatccacagcgcgcccctcgttttttttttcccttctcgaggacgaggacacacgcacacacggaagaagccactagctctccgcagtccgctctcgcctctcggccttctccttgtgccgccgaacaccctcacaagagtcggcctctcgatttctcagtccagcctcagcagtccccttccctccctccatcaggtgttgcctcccgcagatccaaatcggaattcggtccttcgtccccaaaccaccaatccggttgcattctttgggtttgctcacagcgcacacaaagccattttactgctgggaatggtggctggcactattagcgtctccggctcttgagtgatctccaagggaagtgaagtgatgggggagtgcgaggacggcaaggagtacaggtgctgggaggagctgctgccggacgcgctgggcctcatcttccgcaacctgccgctgcaggaggtgctcaccgtcctgccgcgggtgtgcaagtcctgggggcgggtggtggccggcccctactgctggcaggagatcgacatcgaggagtggagccagcagcagggcaagccggagcagatcgcccgcatggtcgagctactcgtgggccgcagcgccggctcgtgccgccggatcagcgtctccggcctgccctgcgatccgcgcttctccttcatcggagacaagtaattctgaaacctgagcgatgcttcttgctgtttttgatcgattcctgtggcaagtgaatttttttctgcaattttttttttttgcgtggagtgttagattagaattatacgctcattctaagcctcgccgtcaggtttaagccgtgatgggggtgtttgcttgcagatctgctgagaacgtgagtgtctgttcagaatttctgacgtgcaaatccaggtccatttgtttgtctatgctggcttggagaccattctgatttttctgattagcagggctagaagtgggcctagttaaactttgatgagatttggtctggatctttggagcaaataaaaacctgctatcgcagagattatgaatctaaactgctgttttttttttgtctcagtacgtagaaccaaaatggtagatatgccccgagcttgcagcatgattagtcttgaatctgacttgtaggacatgtattcactgagaagttgatcagttgatgtgtattattgttctgaattatttgcattacgatcgaactataggattagatattcattgtccacgcgcaatacgaattattggaagtacacacacaagtactggcaccggcacgcgcacatgcatacagtgatcaggcggtcacaattacacaccggcttgatcctgcttcctcttttgctgaaaactggctagcgcacgagctctccggaccttggagatccccaggagcgagatcagcgactccatggtggaatccgtggcgccgcggctgccgaacgtcactttcctcgacatcagcagctgcacgaagatgggggcccgcggcctggaggcgttcggcaagcactgcaagtccctggcggggctgcggcgggtgatgcacccgatcgacctggcggacagggcgtgccagcacgacgaggcgcacgccatcgcgtgcagcatgcccaggctgcggcacctggagatggggtacatgctggtggcgacggaggcggtggcggagatcctggggcggtgccgcgagctcaggttcctggacctgcgcggctgctgggcggtggacgacaagctcctgccgcgcgaccgccacccggggctgcgcgtcctgggaccccgcgtcgacgactgctacgagaacagctactgggaggagtgctccgacgactactcggacgactcctccatctactcgtgggagctcatggacgacgtcgacgacgactacgactacgccgccggcagcgacgacgacgacgacgaggccgtctgggacgacgacggccagggcctggagaacctggaggtcaggttctacggcggtggcttcggcgagaccttcgccggcttcgactggccgccgtcgccgtgacatgacacctgctgcctgcgcttgcgttgcttgcgtgggtgggtgagcctttgtgtgttgtccccaagctttggaagcttgctgtgctgctgtagtactgtgcctgcgacatcactcgatcttcctctacctcgcagatatgccatatgtgaagcgaactgctagtggtgcaatctaaaatgtagacgctggtgtttacatgaagcaatccccatcagcatgcaccggtgagattccaccggtgccaatccccatccatcctacctactactagtcatagagagcggggcagggtacccctgtctcctgatggcttctttaatgtcatgcgagcaaacatggcagtgcaagggtctcctgagctgtatagtgtcagcaatatcaacg

SEQ ID NO: 51534 - DNA, 1671 bp, Zea Mays
atccacagcgcgcccctcgttttttttttcccttctcgaggacgaggacacacgcacacacggaagaagccactagctctccgcagtccgctctcgcctctcggccttctccttgtgccgccgaacaccctcacaagagtcggcctctcgatttctcagtccagcctcagcagtccccttccctccctccatcaggtgttgcctcccgcagatccaaatcggaattcggtccttcgtccccaaaccaccaatccgtcctttggaatgctacagggaagtgaagtgatgggggagtgcgaggacggcaaggagtacaggtgctgggaggagctgctgccggacgcgctgggcctcatcttccgcaacctgccgctgcaggaggtgctcaccgtcctgccgcgggtgtgcaagtcctgggggcgggtggtggccggcccctactgctggcaggagatcgacatcgaggagtggagccagcagcagggcaagccggagcagatcgcccgcatggtcgagctactcgtgggccgcagcgccggctcgtgccgccggatcagcgtctccggcctgccctgcgatccgcgcttctccttcatcggagacaacgcacgagctctccggaccttggagatccccaggagcgagatcagcgactccatggtggaatccgtggcgccgcggctgccgaacgtcactttcctcgacatcagcagctgcacgaagatgggggcccgcggcctggaggcgttcggcaagcactgcaagtccctggcggggctgcggcgggtgatgcacccgatcgacctggcggacagggcgtgccagcacgacgaggcgcacgccatcgcgtgcagcatgcccaggctgcggcacctggagatggggtacatgctggtggcgacggaggcggtggcggagatcctggggcggtgccgcgagctcaggttcctggacctgcgcggctgctgggcggtggacgacaagctcctgccgcgcgaccgccacccggggctgcgcgtcctgggaccccgcgtcgacgactgctacgagaacagctactgggaggagtgctccgacgactactcggacgactcctccatctactcgtgggagctcatggacgacgtcgacgacgactacgactacgccgccggcagcgacgacgacgacgacgaggccgtctgggacgacgacggccagggcctggagaacctggaggtcaggttctacggcggtggcttcggcgagaccttcgccggcttcgactggccgccgtcgccgtgacatgacacctgctgcctgcgcttgcgttgcttgcgtgggtgggtgagcctttgtgtgttgtccccaagctttggaagcttgctgtgctgctgtagtactgtgcctgcgacatcactcgatcttcctctacctcgcagatatgccatatgtgaagcgaactgctagtggtgcaatctaaaatgtagacgctggtgtttacatgaagcaatccccatcagcatgcaccggtgagattccaccggtgccaatccccatccatcctacctactactagtcatagagagcggggcagggtacccctgtctcctgatggcttctttaatgtcatgcgagcaaacatggcagtgcaagggtctcctgagctgtatagtgtcagcaatatcaacg

SEQ ID NO: 51535 - DNA, 1768 bp, Zea Mays
cagcgcgcccctcgttttttttttcccttctcgaggacgaggacacacgcacacacggaagaagccactagctctccgcagtccgctctcgcctctcggccttctccttgtgccgccgaacaccctcacaagagtcggcctctcgatttctcagtccagcctcagcagtccccttccctccctccatcaggtgttgcctcccgcagatccaaatcggaattcggtccttcgtccccaaaccaccaatccggttgcattctttgggtttgctcacagcgcacacaaagccattttactgctgggaatggtggctggcactattagcgtctccggctcttgagtgatctccaagtcctttggaatgctacagggaagtgaagtgatgggggagtgcgaggacggcaaggagtacaggtgctgggaggagctgctgccggacgcgctgggcctcatcttccgcaacctgccgctgcaggaggtgctcaccgtcctgccgcgggtgtgcaagtcctgggggcgggtggtggccggcccctactgctggcaggagatcgacatcgaggagtggagccagcagcagggcaagccggagcagatcgcccgcatggtcgagctactcgtgggccgcagcgccggctcgtgccgccggatcagcgtctccggcctgccctgcgatccgcgcttctccttcatcggagacaacgcacgagctctccggaccttggagatccccaggagcgagatcagcgactccatggtggaatccgtggcgccgcggctgccgaacgtcactttcctcgacatcagcagctgcacgaagatgggggcccgcggcctggaggcgttcggcaagcactgcaagtccctggcggggctgcggcgggtgatgcacccgatcgacctggcggacagggcgtgccagcacgacgaggcgcacgccatcgcgtgcagcatgcccaggctgcggcacctggagatggggtacatgctggtggcgacggaggcggtggcggagatcctggggcggtgccgcgagctcaggttcctggacctgcgcggctgctgggcggtggacgacaagctcctgccgcgcgaccgccacccggggctgcgcgtcctgggaccccgcgtcgacgactgctacgagaacagctactgggaggagtgctccgacgactactcggacgactcctccatctactcgtgggagctcatggacgacgtcgacgacgactacgactacgccgccggcagcgacgacgacgacgacgaggccgtctgggacgacgacggccagggcctggagaacctggaggtcaggttctacggcggtggcttcggcgagaccttcgccggcttcgactggccgccgtcgccgtgacatgacacctgctgcctgcgcttgcgttgcttgcgtgggtgggtgagcctttgtgtgttgtccccaagctttggaagcttgctgtgctgctgtagtactgtgcctgcgacatcactcgatcttcctctacctcgcagatatgccatatgtgaagcgaactgctagtggtgcaatctaaaatgtagacgctggtgtttacatgaagcaatccccatcagcatgcaccggtgagattccaccggtgccaatccccatccatcctacctactactagtcatagagagcggggcagggtacccctgtctcctgatggcttctttaatgtcatgcgagcaaacatggcagtgcaagggtctcctgagctgtatagtgtcagcaatatcaacg

SEQ ID NO: 51536 - DNA, 1744 bp, Zea Mays
ggacacacgcacacacggaagaagccactagctctccgcagtccgctctcgcctctcggccttctccttgtgccgccgaacaccctcacaagagtcggcctctcgatttctcagtccagcctcagcagtccccttccctccctccatcaggtgttgcctcccgcagatccaaatcggaattcggtccttcgtccccaaaccaccaatccgctatcaatcctcctctcgcgtgcttcttggataggttgcattctttgggtttgctcacagcgcacacaaagccattttactgctgggaatggtggctggcactattagcgtctccggctcttgagtgatctccaagggaagtgaagtgatgggggagtgcgaggacggcaaggagtacaggtgctgggaggagctgctgccggacgcgctgggcctcatcttccgcaacctgccgctgcaggaggtgctcaccgtcctgccgcgggtgtgcaagtcctgggggcgggtggtggccggcccctactgctggcaggagatcgacatcgaggagtggagccagcagcagggcaagccggagcagatcgcccgcatggtcgagctactcgtgggccgcagcgccggctcgtgccgccggatcagcgtctccggcctgccctgcgatccgcgcttctccttcatcggagacaacgcacgagctctccggaccttggagatccccaggagcgagatcagcgactccatggtggaatccgtggcgccgcggctgccgaacgtcactttcctcgacatcagcagctgcacgaagatgggggcccgcggcctggaggcgttcggcaagcactgcaagtccctggcggggctgcggcgggtgatgcacccgatcgacctggcggacagggcgtgccagcacgacgaggcgcacgccatcgcgtgcagcatgcccaggctgcggcacctggagatggggtacatgctggtggcgacggaggcggtggcggagatcctggggcggtgccgcgagctcaggttcctggacctgcgcggctgctgggcggtggacgacaagctcctgccgcgcgaccgccacccggggctgcgcgtcctgggaccccgcgtcgacgactgctacgagaacagctactgggaggagtgctccgacgactactcggacgactcctccatctactcgtgggagctcatggacgacgtcgacgacgactacgactacgccgccggcagcgacgacgacgacgacgaggccgtctgggacgacgacggccagggcctggagaacctggaggtcaggttctacggcggtggcttcggcgagaccttcgccggcttcgactggccgccgtcgccgtgacatgacacctgctgcctgcgcttgcgttgcttgcgtgggtgggtgagcctttgtgtgttgtccccaagctttggaagcttgctgtgctgctgtagtactgtgcctgcgacatcactcgatcttcctctacctcgcagatatgccatatgtgaagcgaactgctagtggtgcaatctaaaatgtagacgctggtgtttacatgaagcaatccccatcagcatgcaccggtgagattccaccggtgccaatccccatccatcctacctactactagtcatagagagcggggcagggtacccctgtctcctgatggcttctttaatgtcatgcgagcaaacatggcagtgcaagggtctcctgagctgtatagtgtcagcaatatcaacg

SEQ ID NO: 51537 - DNA, 2699 bp, Zea Mays
ggacacacgcacacacggaagaagccactagctctccgcagtccgctctcgcctctcggccttctccttgtgccgccgaacaccctcacaagagtcggcctctcgatttctcagtccagcctcagcagtccccttccctccctccatcaggtgttgcctcccgcagatccaaatcggaattcggtccttcgtccccaaaccaccaatccggtaaatatatatgcgctccctcactccctccccccagagtttcttgcgccgttctctctcgcgcaaattattatgccgggaaagattatattcttcccctttagctttgagcccgaaaggccgaagctttcgcgttcttccccacagatatctggagccgtagcttctgtttggtatggccgtgggttgaaataaatagtagtgtgcgggacgcccaccaattggcacgctgcgctttccatccctgcagctgcaagatgccttctttttagatctgtgctgccgtgccttcctcttcatggttgcattctttgggtttgctcacagcgcacacaaagccattttactgctgggaatggtggctggcactattagcgtctccggctcttgagtgatctccaagggaagtgaagtgatgggggagtgcgaggacggcaaggagtacaggtgctgggaggagctgctgccggacgcgctgggcctcatcttccgcaacctgccgctgcaggaggtgctcaccgtcctgccgcgggtgtgcaagtcctgggggcgggtggtggccggcccctactgctggcaggagatcgacatcgaggagtggagccagcagcagggcaagccggagcagatcgcccgcatggtcgagctactcgtgggccgcagcgccggctcgtgccgccggatcagcgtctccggcctgccctgcgatccgcgcttctccttcatcggagacaagtaattctgaaacctgagcgatgcttcttgctgtttttgatcgattcctgtggcaagtgaatttttttctgcaattttttttttttgcgtggagtgttagattagaattatacgctcattctaagcctcgccgtcaggtttaagccgtgatgggggtgtttgcttgcagatctgctgagaacgtgagtgtctgttcagaatttctgacgtgcaaatccaggtccatttgtttgtctatgctggcttggagaccattctgatttttctgattagcagggctagaagtgggcctagttaaactttgatgagatttggtctggatctttggagcaaataaaaacctgctatcgcagagattatgaatctaaactgctgttttttttttgtctcagtacgtagaaccaaaatggtagatatgccccgagcttgcagcatgattagtcttgaatctgacttgtaggacatgtattcactgagaagttgatcagttgatgtgtattattgttctgaattatttgcattacgatcgaactataggattagatattcattgtccacgcgcaatacgaattattggaagtacacacacaagtactggcaccggcacgcgcacatgcatacagtgatcaggcggtcacaattacacaccggcttgatcctgcttcctcttttgctgaaaactggctagcgcacgagctctccggaccttggagatccccaggagcgagatcagcgactccatggtggaatccgtggcgccgcggctgccgaacgtcactttcctcgacatcagcagctgcacgaagatgggggcccgcggcctggaggcgttcggcaagcactgcaagtccctggcggggctgcggcgggtgatgcacccgatcgacctggcggacagggcgtgccagcacgacgaggcgcacgccatcgcgtgcagcatgcccaggctgcggcacctggagatggggtacatgctggtggcgacggaggcggtggcggagatcctggggcggtgccgcgagctcaggttcctggacctgcgcggctgctgggcggtggacgacaagctcctgccgcgcgaccgccacccggggctgcgcgtcctgggaccccgcgtcgacgactgctacgagaacagctactgggaggagtgctccgacgactactcggacgactcctccatctactcgtgggagctcatggacgacgtcgacgacgactacgactacgccgccggcagcgacgacgacgacgacgaggccgtctgggacgacgacggccagggcctggagaacctggaggtcaggttctacggcggtggcttcggcgagaccttcgccggcttcgactggccgccgtcgccgtgacatgacacctgctgcctgcgcttgcgttgcttgcgtgggtgggtgagcctttgtgtgttgtccccaagctttggaagcttgctgtgctgctgtagtactgtgcctgcgacatcactcgatcttcctctacctcgcagatatgccatatgtgaagcgaactgctagtggtgcaatctaaaatgtagacgctggtgtttacatgaagcaatccccatcagcatgcaccggtgagattccaccggtgccaatccccatccatcctacctactactagtcatagagagcggggcagggtacccctgtctcctgatggcttctttaatgtcatgcgagcaaacatggcagtgcaagggtctcctgagctgtatagtgtcagcaatatcaacg

SEQ ID NO: 51538 - DNA, 2743 bp, Zea Mays
cggaaggaaaaatgctggaaaaaattctgtccctcttcatatagggcaacacatattaactgctagattttgagggtgtctaatcttatgctgaatgtatcgttgtagttttctcattttctagtagggtggcaactcattgtgaatttagatcatttgtataatcatagtcatggtttgctgggatcttcagtcacaatttttattggatgcactagtgtttcttctgaagtctgaacatttgcattgatgttgatatttctaaacaaagcctatttttatgacttacagggctgtagttcctactatccagggctatgaggacgcaggagacttcactgttaaagaaaggctgaaaactagcattcatatgaacctacttttttattcaattgtgggagccattggccttattggtctcatactactcttaatcatgcataaagcttgggatggtggtattgtgggatttgcaatggcatgctcaaatacctttggattggtgactggtgcttttcttcttggttttgggttaagcgaaattccaagaaacatttggaaaaatgcagactggtctcaccgccaaaaagtactttctcatagagttgccaagatggctgtaaagcttgataatgcccatcaagagtattcaaatgcaattgttgttgctcaagctacatcaaatcaaatgtcaaaacgtgacattttgaggccttacatggatattattgataacatgttgtctcaaatgctgcgggaggatccagcctttaaaccttctggtggtagattaggtgaaaatgatatggactatgataccgatgataaatcgatggccacacttcgtcgccaactcaggagggctcatgaggagtactataggtgcaaaagtgagtatatgacttgtgtcatggaagccctcaaactagaggacacaataaaaaattatgaacgccgtgatgctaatggatggaaatatgtatcaagttttagtgaaagtcgctcgggcacacttggatcaattttggacactatcgagttcatttggtgctgtatactgagaaagcagcttcaaaaagcatttgctgttatccttggctgcatgtcagctgctatactgctggctgaagctactttacttccaagtggtgttgatctatctctcttttctattcttataaaagctgtaggaaaacaagaggttttagttcaggttgctgcttttgtccccttgatgtatatgtgcatttgcacatattattcattattcaagattggcatgttgatgttctattctctgactccaagacaaaccagctctgtcagcttgcttatgatctgttcaatggttgcaagatatgcacctcctatttcttataactttctgaatctcatccgccttggtggcaatgctaaaactacatttgagaagagaatggggaacattgatgatgcagttcctttctttggcagaggcttcaacaagatctatccactgattatggttgtttatacactattggttgctagtaatttctttgttcgtgtgattgactttttgggaagatggaaaaggttcaagttccaacgtgaagaagagaatatagatggtttagatccatctggaatgattattctacaaaaagagagatcttggatcgaacaagggtgcaaagtgggcgagcaggttattccattggcaaggaatttcaatggtgtgaacgctgatattgaatcacaaaatgtgccattggttgaaaacactgtggagatgaaagtaggggcaacttcttccagaaatgacgggagagctggccagttgaagtatgcaaacaacagggagactatcgccagcaaatacacttctattagagaacagaaccggcagtcagggaaggtagtgagaaaggaaatttcaccgaactctatatctttgctcgaagaaagaaattcagagcaggggtccaatgctggtgtaccaccaactggtgtgtctgcaacatgggcctcgatgaagattggttttcaaaatttcaaagcaaatatgggttctaagaagtttcttcctttgcgccaagatccaggatttgttccaaatttgaatgtctcttcaccagaatctcttgatgacatattccaaaggttgaaacggcggcctgcaaatgtgcctgtggattaccttgacgatgacgatgatgacaacataggagatacagatcttcatttccaagatcaatgaaataggttgtgatattcttttaggtttagaatatgcatacacagaaaaactaaaagaattggtagcaatagatgttcaaaggaagatacaggatgtatagatctgatgatggtttggtgtgcttcctggaagctcatgacgcctgtccatctggaaaactgcaaaatgtaagtacgatatgatgacagcctttacagaaaggtttggaattctcccgccgaaaagggttgggactaatctactacgtaccactatattcaggtaaccttgttggtttctctcaccttttttttggaactgtattggagatgctgatatgtgatggaagccaaaaattgtaaatgtgtacctacaataccatatgaaaattaacgtgcttgagttgtaaccagtaaaaacatactattgaatctatacttgatcgggaggatacaacccaaagtgtttgtgtgtgacgtcagacatgtatttgatggtataacttgtggacacttattgtctgat

SEQ ID NO: 51539 - DNA, 2384 bp, Zea Mays
cttacagggctgtagttcctactatccagggctatgaggacgcaggagacttcactgttaaagaaaggctgaaaactagcattcatatgaacctacttttttattcaattgtgggagccattggccttattggtctcatactactcttaatcatgcataaagcttgggatggtggtattgtgggatttgcaatggcatgctcaaatacctttggattggtgactggtgcttttcttcttggttttgggttaagcgaaattccaagaaacatttggaaaaatgcagactggtctcaccgccaaaaagttgctcaagctacatcaaatcaaatgtcaaaacgtgacattttgaggccttacatggatattattgataacatgttgtctcaaatgctgcgggaggatccagcctttaaaccttctggtggtagattaggtgaaaatgatatggactatgataccgatgataaatcgatggccacacttcgtcgccaactcaggagggctcatgaggagtactataggtgcaaaagtgagtatatgacttgtgtcatggaagccctcaaactagaggacacaataaaaaattatgaacgccgtgatgctaatggatggaaatatgtatcaagttttagtgaaagtcgctcgggcacacttggatcaattttggacactatcgagttcatttggtgctgtatactgagaaagcagcttcaaaaagcatttgctgttatccttggctgcatgtcagctgctatactgctggctgaagctactttacttccaagtggtgttgatctatctctcttttctattcttataaaagctgtaggaaaacaagaggttttagttcaggttgctgcttttgtccccttgatgtatatgtgcatttgcacatattattcattattcaagattggcatgttgatgttctattctctgactccaagacaaaccagctctgtcagcttgcttatgatctgttcaatggttgcaagatatgcacctcctatttcttataactttctgaatctcatccgccttggtggcaatgctaaaactacatttgagaagagaatggggaacattgatgatgcagttcctttctttggcagaggcttcaacaagatctatccactgattatggttgtttatacactattggttgctagtaatttctttgttcgtgtgattgactttttgggaagatggaaaaggttcaagttccaacgtgaagaagagaatatagatggtttagatccatctggaatgattattctacaaaaagagagatcttggatcgaacaagggtgcaaagtgggcgagcaggttattccattggcaaggaatttcaatggtgtgaacgctgatattgaatcacaaaatgtgccattggttgaaaacactgtggagatgaaagtaggggcaacttcttccagaaatgacgggagagctggccagttgaagtatgcaaacaacagggagactatcgccagcaaatacacttctattagagaacagaaccggcagtcagggaaggtagtgagaaaggaaatttcaccgaactctatatctttgctcgaagaaagaaattcagagcaggggtccaatgctggtgtaccaccaactggtgtgtctgcaacatgggcctcgatgaagattggttttcaaaatttcaaagcaaatatgggttctaagaagtttcttcctttgcgccaagatccaggatttgttccaaatttgaatgtctcttcaccagaatctcttgatgacatattccaaaggttgaaacggcggcctgcaaatgtgcctgtggattaccttgacgatgacgatgatgacaacataggagatacagatcttcatttccaagatcaatgaaataggttgtgatattcttttaggtttagaatatgcatacacagaaaaactaaaagaattggtagcaatagatgttcaaaggaagatacaggatgtatagatctgatgatggtttggtgtgcttcctggaagctcatgacgcctgtccatctggaaaactgcaaaatgtaagtacgatatgatgacagcctttacagaaaggtttggaattctcccgccgaaaagggttgggactaatctactacgtaccactatattcaggtaaccttgttggtttctctcaccttttttttggaactgtattggagatgctgatatgtgatggaagccaaaaattgtaaatgtgtacctacaataccatatgaaaattaacgtgcttgagttgtaaccagtaaaaacatactattgaatctatacttgatcgggaggatacaacccaaagtgtttgtgtgtgacgtcagacatgtatttgatggtataacttgtggacacttattgtctgat

SEQ ID NO: 51540 - DNA, 1223 bp, Zea Mays
atggctgtaaagcttgataatgcccatcaagagtattcaaatgcaattgttgttgctcaagctacatcaaatcaaatgtcaaaacgtgacattttgaggccttacatggatattattgataacatgttgtctcaaatgctgcgggaggatccagcctttaaaccttctggtggtagattaggtgaaaatgatatggactatgataccgatgataaatcgatggccacacttcgtcgccaactcaggagggctcatgaggagtactataggtgcaaaagtgagtatatgacttgtgtcatggaagccctcaaactagaggacacaataaaaaattatgaacgccgtgatgctaatggatggaaatatgtatcaagttttagtgaaagtcgctcgggcacacttggatcaattttggacactatcgagttcatttggtgctgtatactgagaaagcagcttcaaaaagcatttgctgttatccttggctgcatgtcagctgctatactgctggctgaagctactttacttccaagtggtgttgatctatctctcttttctattcttataaaagctgtaggaaaacaagaggttttagttcaggttgctgcttttgtccccttgatgtatatgtgcatttgcacatattattcattattcaagattggcatgttgatgttctattctctgactccaagacaaaccagctctgtcagcttgcttatgatctgttcaatggttgcaagatatgcacctcctatttcttataactttctgaatctcatccgccttggtggcaatgctaaaactacatttgagaagagaatggggaacattgatgatgcagttcctttctttggcagaggcttcaacaagatctatccactgattatggttgtttatacactattggttgctagtaatttctttgttcgtgtgattgactttttgggaagatggaaaaggttcaagttccaacgtgaagaagagaatatagatggtttagatccatctggaatgattattctacaaaaagagagatcttggatcgaacaagggtgcaaagtgggcgagcaggttattccattggcaaggaatttcaatggtgtgaacgctgatattgaatcacaaaatgtgccattggtgcgtagaatggttccttcatttacatgggagattaaacttcggttgttctctttcagtctttttgaaaccctctcttctcc

SEQ ID NO: 51541 - DNA, 1954 bp, Zea Mays
atggctgtaaagcttgataatgcccatcaagagtattcaaatgcaattgttgttgctcaagctacatcaaatcaaatgtcaaaacgtgacattttgaggccttacatggatattattgataacatgttgtctcaaatgctgcgggaggatccagcctttaaaccttctggtggtagattaggtgaaaatgatatggactatgataccgatgataaatcgatggccacacttcgtcgccaactcaggagggctcatgaggagtactataggtgcaaaagtgagtatatgacttgtgtcatggaagccctcaaactagaggacacaataaaaaattatgaacgccgtgatgctaatggatggaaatatgtatcaagttttagtgaaagtcgctcgggcacacttggatcaattttggacactatcggttgctgcttttgtccccttgatgtatatgtgcatttgcacatattattcattattcaagattggcatgttgatgttctattctctgactccaagacaaaccagctctgtcagcttgcttatgatctgttcaatggttgcaagatatgcacctcctatttcttataactttctgaatctcatccgccttggtggcaatgctaaaactacatttgagaagagaatggggaacattgatgatgcagttcctttctttggcagaggcttcaacaagatctatccactgattatggttgtttatacactattggttgctagtaatttctttgttcgtgtgattgactttttgggaagatggaaaaggttcaagttccaacgtgaagaagagaatatagatggtttagatccatctggaatgattattctacaaaaagagagatcttggatcgaacaagggtgcaaagtgggcgagcaggttattccattggcaaggaatttcaatggtgtgaacgctgatattgaatcacaaaatgtgccattggttgaaaacactgtggagatgaaagtaggggcaacttcttccagaaatgacgggagagctggccagttgaagtatgcaaacaacagggagactatcgccagcaaatacacttctattagagaacagaaccggcagtcagggaaggtagtgagaaaggaaatttcaccgaactctatatctttgctcgaagaaagaaattcagagcaggggtccaatgctggtgtaccaccaactggtgtgtctgcaacatgggcctcgatgaagattggttttcaaaatttcaaagcaaatatgggttctaagaagtttcttcctttgcgccaagatccaggatttgttccaaatttgaatgtctcttcaccagaatctcttgatgacatattccaaaggttgaaacggcggcctgcaaatgtgcctgtggattaccttgacgatgacgatgatgacaacataggagatacagatcttcatttccaagatcaatgaaataggttgtgatattcttttaggtttagaatatgcatacacagaaaaactaaaagaattggtagcaatagatgttcaaaggaagatacaggatgtatagatctgatgatggtttggtgtgcttcctggaagctcatgacgcctgtccatctggaaaactgcaaaatgtaagtacgatatgatgacagcctttacagaaaggtttggaattctcccgccgaaaagggttgggactaatctactacgtaccactatattcaggtaaccttgttggtttctctcaccttttttttggaactgtattggagatgctgatatgtgatggaagccaaaaattgtaaatgtgtacctacaataccatatgaaaattaacgtgcttgagttgtaaccagtaaaaacatactattgaatctatacttgatcgggaggatacaacccaaagtgtttgtgtgtgacgtcagacatgtatttgatggtataacttgtggacacttattgtctgat

SEQ ID NO: 51542 - DNA, 1911 bp, Zea Mays
atggctgtaaagcttgataatgcccatcaagagtattcaaatgcaattgttgttgctcaagctacatcaaatcaaatgtcaaaacgtgacattttgaggccttacatggatattattgataacatgttgtctcaaatgctgcgggaggatccagcctttaaaccttctggtggtagattaggtgaaaatgatatggactatgataccgatgataaatcgatggccacacttcgtcgccaactcaggagggctcatgaggagtactataggtgcaaaagtgagtatatgacttgtgtcatggaagccctcaaactagaggacacaataaaaaattatgaacgccgtgatgctaatggatggaaatatgtatcaagttttagtgaaagtcgctcgggcacacttggatcaattttggacactatcgagttcatttggtgctgtatactgagaaagcagcttcaaaaagcatttgctgttatccttggctgcatgtcagctgctatactgctggctgaagctactttacttccaagtggtgttgatctatctctcttttctattcttataaaagctgtaggaaaacaagaggttttagttcagagaatggggaacattgatgatgcagttcctttctttggcagaggcttcaacaagatctatccactgattatggttgtttatacactattggttgctagtaatttctttgttcgtgtgattgactttttgggaagatggaaaaggttcaagttccaacgtgaagaagagaatatagatggtttagatccatctggaatgattattctacaaaaagagagatcttggatcgaacaagggtgcaaagtgggcgagcaggttattccattggcaaggaatttcaatggtgtgaacgctgatattgaatcacaaaatgtgccattggttgaaaacactgtggagatgaaagtaggggcaacttcttccagaaatgacgggagagctggccagttgaagtatgcaaacaacagggagactatcgccagcaaatacacttctattagagaacagaaccggcagtcagggaaggtagtgagaaaggaaatttcaccgaactctatatctttgctcgaagaaagaaattcagagcaggggtccaatgctggtgtaccaccaactggtgtgtctgcaacatgggcctcgatgaagattggttttcaaaatttcaaagcaaatatgggttctaagaagtttcttcctttgcgccaagatccaggatttgttccaaatttgaatgtctcttcaccagaatctcttgatgacatattccaaaggttgaaacggcggcctgcaaatgtgcctgtggattaccttgacgatgacgatgatgacaacataggagatacagatcttcatttccaagatcaatgaaataggttgtgatattcttttaggtttagaatatgcatacacagaaaaactaaaagaattggtagcaatagatgttcaaaggaagatacaggatgtatagatctgatgatggtttggtgtgcttcctggaagctcatgacgcctgtccatctggaaaactgcaaaatgtaagtacgatatgatgacagcctttacagaaaggtttggaattctcccgccgaaaagggttgggactaatctactacgtaccactatattcaggtaaccttgttggtttctctcaccttttttttggaactgtattggagatgctgatatgtgatggaagccaaaaattgtaaatgtgtacctacaataccatatgaaaattaacgtgcttgagttgtaaccagtaaaaacatactattgaatctatacttgatcgggaggatacaacccaaagtgtttgtgtgtgacgtcagacatgtatttgatggtataacttgtggacacttattgtctgat

SEQ ID NO: 51543 - DNA, 2130 bp, Zea Mays
atggctgtaaagcttgataatgcccatcaagagtattcaaatgcaattgttgttgctcaagctacatcaaatcaaatgtcaaaacgtgacattttgaggccttacatggatattattgataacatgttgtctcaaatgctgcgggaggatccagcctttaaaccttctggtggtagattaggtgaaaatgatatggactatgataccgatgataaatcgatggccacacttcgtcgccaactcaggagggctcatgaggagtactataggtgcaaaagtgagtatatgacttgtgtcatggaagccctcaaactagaggacacaataaaaaattatgaacgccgtgatgctaatggatgtgctgcatttgtcaaacaagttatgccaagtgatctgactcgaggatacattgttacattcccagagttcatttggtgctgtatactgagaaagcagcttcaaaaagcatttgctgttatccttggctgcatgtcagctgctatactgctggctgaagctactttacttccaagtggtgttgatctatctctcttttctattcttataaaagctgtaggaaaacaagaggttttagttcaggttgctgcttttgtccccttgatgtatatgtgcatttgcacatattattcattattcaagattggcatgttgatgttctattctctgactccaagacaaaccagctctgtcagcttgcttatgatctgttcaatggttgcaagatatgcacctcctatttcttataactttctgaatctcatccgccttggtggcaatgctaaaactacatttgagaagagaatggggaacattgatgatgcagttcctttctttggcagaggcttcaacaagatctatccactgattatggttgtttatacactattggttgctagtaatttctttgttcgtgtgattgactttttgggaagatggaaaaggttcaagttccaacgtgaagaagagaatatagatggtttagatccatctggaatgattattctacaaaaagagagatcttggatcgaacaagggtgcaaagtgggcgagcaggttattccattggcaaggaatttcaatggtgtgaacgctgatattgaatcacaaaatgtgccattggttgaaaacactgtggagatgaaagtaggggcaacttcttccagaaatgacgggagagctggccagttgaagtatgcaaacaacagggagactatcgccagcaaatacacttctattagagaacagaaccggcagtcagggaaggtagtgagaaaggaaatttcaccgaactctatatctttgctcgaagaaagaaattcagagcaggggtccaatgctggtgtaccaccaactggtgtgtctgcaacatgggcctcgatgaagattggttttcaaaatttcaaagcaaatatgggttctaagaagtttcttcctttgcgccaagatccaggatttgttccaaatttgaatgtctcttcaccagaatctcttgatgacatattccaaaggttgaaacggcggcctgcaaatgtgcctgtggattaccttgacgatgacgatgatgacaacataggagatacagatcttcatttccaagatcaatgaaataggttgtgatattcttttaggtttagaatatgcatacacagaaaaactaaaagaattggtagcaatagatgttcaaaggaagatacaggatgtatagatctgatgatggtttggtgtgcttcctggaagctcatgacgcctgtccatctggaaaactgcaaaatgtaagtacgatatgatgacagcctttacagaaaggtttggaattctcccgccgaaaagggttgggactaatctactacgtaccactatattcaggtaaccttgttggtttctctcaccttttttttggaactgtattggagatgctgatatgtgatggaagccaaaaattgtaaatgtgtacctacaataccatatgaaaattaacgtgcttgagttgtaaccagtaaaaacatactattgaatctatacttgatcgggaggatacaacccaaagtgtttgtgtgtgacgtcagacatgtatttgatggtataacttgtggacacttattgtctgat

SEQ ID NO: 51544 - DNA, 1025 bp, Zea Mays
atggttccttcatttacatgggagattaaacttcggttgaaaacactgtggagatgaaagtaggggcaacttcttccagaaatgacgggagagctggccagttgaagtatgcaaacaacagggagactatcgccagcaaatacacttctattagagaacagaaccggcagtcagggaaggtagtgagaaaggaaatttcaccgaactctatatctttgctcgaagaaagaaattcagagcaggggtccaatgctggtgtaccaccaactggtgtgtctgcaacatgggcctcgatgaagattggttttcaaaatttcaaagcaaatatgggttctaagaagtttcttcctttgcgccaagatccaggatttgttccaaatttgaatgtctcttcaccagaatctcttgatgacatattccaaaggttgaaacggcggcctgcaaatgtgcctgtggattaccttgacgatgacgatgatgacaacataggagatacagatcttcatttccaagatcaatgaaataggttgtgatattcttttaggtttagaatatgcatacacagaaaaactaaaagaattggtagcaatagatgttcaaaggaagatacaggatgtatagatctgatgatggtttggtgtgcttcctggaagctcatgacgcctgtccatctggaaaactgcaaaatgtaagtacgatatgatgacagcctttacagaaaggtttggaattctcccgccgaaaagggttgggactaatctactacgtaccactatattcaggtaaccttgttggtttctctcaccttttttttggaactgtattggagatgctgatatgtgatggaagccaaaaattgtaaatgtgtacctacaataccatatgaaaattaacgtgcttgagttgtaaccagtaaaaacatactattgaatctatacttgatcgggaggatacaacccaaagtgtttgtgtgtgacgtcagacatgtatttgatggtataacttgtggacacttattgtctgat

SEQ ID NO: 51545 - DNA, 1008 bp, Zea Mays
ttcgtttgtgctggattggttgaaaacactgtggagatgaaagtaggggcaacttcttccagaaatgacgggagagctggccagttgaagtatgcaaacaacagggagactatcgccagcaaatacacttctattagagaacagaaccggcagtcagggaaggtagtgagaaaggaaatttcaccgaactctatatctttgctcgaagaaagaaattcagagcaggggtccaatgctggtgtaccaccaactggtgtgtctgcaacatgggcctcgatgaagattggttttcaaaatttcaaagcaaatatgggttctaagaagtttcttcctttgcgccaagatccaggatttgttccaaatttgaatgtctcttcaccagaatctcttgatgacatattccaaaggttgaaacggcggcctgcaaatgtgcctgtggattaccttgacgatgacgatgatgacaacataggagatacagatcttcatttccaagatcaatgaaataggttgtgatattcttttaggtttagaatatgcatacacagaaaaactaaaagaattggtagcaatagatgttcaaaggaagatacaggatgtatagatctgatgatggtttggtgtgcttcctggaagctcatgacgcctgtccatctggaaaactgcaaaatgtaagtacgatatgatgacagcctttacagaaaggtttggaattctcccgccgaaaagggttgggactaatctactacgtaccactatattcaggtaaccttgttggtttctctcaccttttttttggaactgtattggagatgctgatatgtgatggaagccaaaaattgtaaatgtgtacctacaataccatatgaaaattaacgtgcttgagttgtaaccagtaaaaacatactattgaatctatacttgatcgggaggatacaacccaaagtgtttgtgtgtgacgtcagacatgtatttgatggtataacttgtggacacttattgtctgat

SEQ ID NO: 51546 - DNA, 1034 bp, Zea Mays
gctaatccgtggcataaatggttggttttaataagattgcacaggttgaaaacactgtggagatgaaagtaggggcaacttcttccagaaatgacgggagagctggccagttgaagtatgcaaacaacagggagactatcgccagcaaatacacttctattagagaacagaaccggcagtcagggaaggtagtgagaaaggaaatttcaccgaactctatatctttgctcgaagaaagaaattcagagcaggggtccaatgctggtgtaccaccaactggtgtgtctgcaacatgggcctcgatgaagattggttttcaaaatttcaaagcaaatatgggttctaagaagtttcttcctttgcgccaagatccaggatttgttccaaatttgaatgtctcttcaccagaatctcttgatgacatattccaaaggttgaaacggcggcctgcaaatgtgcctgtggattaccttgacgatgacgatgatgacaacataggagatacagatcttcatttccaagatcaatgaaataggttgtgatattcttttaggtttagaatatgcatacacagaaaaactaaaagaattggtagcaatagatgttcaaaggaagatacaggatgtatagatctgatgatggtttggtgtgcttcctggaagctcatgacgcctgtccatctggaaaactgcaaaatgtaagtacgatatgatgacagcctttacagaaaggtttggaattctcccgccgaaaagggttgggactaatctactacgtaccactatattcaggtaaccttgttggtttctctcaccttttttttggaactgtattggagatgctgatatgtgatggaagccaaaaattgtaaatgtgtacctacaataccatatgaaaattaacgtgcttgagttgtaaccagtaaaaacatactattgaatctatacttgatcgggaggatacaacccaaagtgtttgtgtgtgacgtcagacatgtatttgatggtataacttgtggacacttattgtctgat

SEQ ID NO: 51547 - DNA, 3857 bp, Zea Mays
gccatccctactccaccccaacctaagcagtaggcagtaggcatcaagcgtcttgcgtggctgcgtccaagtccaagcgccatccggccaccagcgcaggtaccgagccaccgaggtaggagccggccaccgggcagatcccaggctgccagccaccggcgtccagcactccggctgctagctaccggccacccgcagcgcaggccacaccaacgggcagcaaccgcatggtgccatagctgtcgacgaacaccagcaaccagacggccagatcccagtaattcgatttattatatcttcgtcgaggatagtgacacgtcacgtcagtgtccggccatcgcttgagagagtccaacccaaggatggttcaggctacggaagggcaatgcactgcttcttagactattgaagaatttataggatgatgtgcaggagcagagcgtgggcagtaaatgcaaagaaaaaaacacagttgcagaaattgctagcaatagactatacaagatagagccaaattgagcaaaaaaaaagaccattcccatttggatcaccattccctaaccacagcaaaatgaagttggaaaattgagtagttgagtgccgtgtatgcacatgagcagggctaatactttataagaaatgtgctggttcttgatactcctccaaccagttgtagaagaattctggtttggctgaagtagttttacatccgaaagatggactttgtacagatatattctctgtcaacaatatgtatatccaggcggagatgaacttggagggaagcagatttacagtttggtgatattatatattatcaattgcagtttattaatgttgcgcttcttctctattatcaaactattcacacaagacttcatgtgtgcgtgtgtgaaagattttattagtgtaaggtctttagggacagttcacattgaagttctggtgcctacataaattgtaaaccatacatgttgacatgggtacacatctcatggctatatacaactttgacatgaggtttatcttaagattgtgtgttccaataaaagctattactatttcttgcatgtgcatgtctttaggatatccatttttctttatagatttatttatttacatcgcttactgcttactagcctattttttctagcaatttctgcaagtcggcccatcgcgttgaactaaaccatctctaatttcctacaacttcaactccaacaacagaggtaccacaatggacttcttaagaagaataggaaccgtgtacataagcttttttgctctaacaaaataagagtggttgttgcaacaatggcattcagaatgggtcttgataagagtgacgttgaacgggtggttgattgtatcttgccagaaagcgtagaagaatacatacattgaagttcacgaatatgctatgagaaaattctttgccagatattttcttgtgaaaattcagttggatgcatttgctccttggttaaagagtcgacttcagacaagttagatataaaagaggaggcggagctgcgatgccaccaggtggagccgtgcctgctcgctcaggcgtcatgacggagccgaacgcgaggagccgagtgttttatccccgccgaagcccatccccatttgataccagcgagcgcagacatcgccggggacgccatcatcctcggctgcctccaagaccggcccaccgttctgcctgcactcccactcccaaaccccatgatgaacctccctttccggctccgccatctccgacgccttctcgctgccccgcccttaccaaccctcgccgccacacactcccatagcccaccctccttccgaccgctgcaccccacccgaatccagccgctgcggttccatctacccaaccccccagtgcggcggctctcctccgagcacgcaatcctccccacccacctccaggacgagcgcttcgccacgctctcggataggatctatgatgccgtgattaagacggggacggaatccaacgagggcaccgaggccgcgctcgacgcgttgggcgctgagctgactacccctctcgtcgccgacgtgctgcaccgcctccgctacgaggagaagctggcgttccggttcttcgcctgggcgtcccaacaggacggatacagccacgaaccgacgacttacaacgacatcatcgacattctctccggcacgcggtacaagagccgccagttcggtgtcctctgcaacgtgctcgatcacatgaagcgccatggctcgaggtcggtgccggttgagggccttctggagatcctgcgcgcctacacggagaagcatctcacgcacatgagaaagctggccaagaagcggcgggttcggatgcgtacgccgccagagactgacgcgctcaacgttctgctggacgcgttctgcaagtgtgggatggtcaaggaagcagaggcagtgtttggccgcgtgaagaggaagttgctgggtaatgcagagacgtacagtaccctgttcttcgggtggtgccgggcgagggaccccaagaaggccatgaaggtgctcgaggaaatgattcagatgaagcacaccccagagagtttcacctacgttgcagccatcgaatcattttgcagcgctggattggtgtcagaggcaagggaactgtttgagttcatgaggactgaggggttgacggtgtcatcgcccacagccaaaacatattcgattatgattgttgcattagcaaaggctgaccggatggaggagtgttttgaactgctttcagacatgagaacttgtggttgtatgcctgacgtgacgacttataaagatttgattgaagggatgtgcttggtgggtagactggatgctgcttatcgtgtgttggacgagatggggagggctggatttcctcctgacattgtcacgtataattgctttcttaatgtgctttgtagtcttcgaaatgctgatgatgcacttgaactctgtgagaggatgatagaggcacactgtgagcccagtgttcatacctataatatgctgatgatgatgttcttcgagatgggagaggcacatagagcattagatatatggcttgagatggacaaaagaggatgtcaacgtgctatcgatacctacgagataatgatctatggtctctttgattgtggagaaacagaatatgcaactgctcttctagatgaggttataaaccgtgacatgaaactttcatacaagaagtttgatgctataatgctgaggttatcagctgtaggcaaccttggtgcgatacatcggttgtcagagcatatgaggaaattttacaatgttgcgatgtcgagacgatttgcaatcactcagaagaagaagagcataggcctgagaaggaaatgagtgccgtggctattgctgctgttgtttcttgttagttgttactgaggatattcaggagcttattcaaaggtagttaatgtatgccagcacgtattgttggaacagattacagtggaagaagcactgcattttttttaatgtaaaaaataggagtgttgcataaccccattcatttgttgaattgaaccggtgctgtgaatatcattgcatttgcattgtagaagaaacatgtacaaggtaacccctcaaccgcacccattcattgttgcaacgtgcacgaaacaccaatccgctggcgccacaaatattagctgcagccctattttgtttgaatcctatgaagagggcctcttttgtccttgttcatgtggggcgcctttcttccttatgctcagatgaaacatgtagctgtgtaagcctgtataactggatttcttgccattaaacctgtgacccccaccactttcctc

SEQ ID NO: 51548 - DNA, 4088 bp, Zea Mays
gccatccctactccaccccaacctaagcagtaggcagtaggcatcaagcgtcttgcgtggctgcgtccaagtccaagcgccatccggccaccagcgcaggtaccgagccaccgaggtaggagccggccaccgggcagatcccaggctgccagccaccggcgtccagcactccggctgctagctaccggccacccgcagcgcaggccacaccaacgggcagcaaccgcatggtgccatagctgtcgacgaacaccagcaaccagacggccagatcccagagtccaacccaaggatggttcaggctacggaagggcaatgcactgcttcttagactattgaagaatttataggatgatgtgcaggagcaggcagctactatgcaattttctatttattgtactcttgccacgaactgctcgtaattctctttcagtttgttgcagagcgtgggcagtaaatgcaaagaaaaaaacacagttgcagaaattgctagcaatagactatacaagatagagccaaattgagcaaaaaaaaagaccattcccatttggatcaccattccctaaccacagcaaaatgaagttggaaaattgagtagttgagtgccgtgtatgcacatgagcagggctaatactttataagaaatgtgctggttcttgatactcctccaaccagttgtagaagaattctggtttggctgaagtagttttacatccgaaagatggactttgtacagatatattctctgtcaacaatatgtatatccaggcggagatgaacttggagggaagcagatttacagtttggtgatattatatattatcaattgcagtttattaatgttgcgcttcttctctattatcaaactattcacacaagacttcatgtgtgcgtgtgtgaaagattttattagtgtaaggtctttagggacagttcacattgaagttctggtgcctacataaattgtaaaccatacatgttgacatgggtacacatctcatggctatatacaactttgacatgaggtttatcttaagattgtgtgttccaataaaagctattactatttcttgcatgtgcatgtctttaggatatccatttttctttatagatttatttatttacatcgcttactgcttactagcctattttttctagcaatttctgcaagtcggcccatcgcgttgaactaaaccatctctaatttcctacaacttcaactccaacaacagaggtaccacaatggacttcttaagaagaataggaaccgtgtacataagcttttttgctctaacaaaataagagtggttgttgcaacaatggcattcagaatgggtcttgataagagtgacgttgaacgggtggttgattgtatcttgccagaaagcgtagaagaatacatacatgtatattccatgcagattccccccaccctcccattttcttctcttttctagacatcttactatgctctttctaggaaactggccgtgctgattcaacaacattctataaaagtcgaagtcttttgcacaaatgaatcttatcttcttgtcctttttttcttgtaatttacatttccaacctgctctaagtttcctacataatgacttcaataaaccctttttacagtgaagttcacgaatatgctatgagaaaattctttgccagatattttcttgtgaaaattcagttggatgcatttgctccttggttaaagagtcgacttcagacaagttagatataaaagaggaggcggagctgcgatgccaccaggtggagccgtgcctgctcgctcaggcgtcatgacggagccgaacgcgaggagccgagtgttttatccccgccgaagcccatccccatttgataccagcgagcgcagacatcgccggggacgccatcatcctcggctgcctccaagaccggcccaccgttctgcctgcactcccactcccaaaccccatgatgaacctccctttccggctccgccatctccgacgccttctcgctgccccgcccttaccaaccctcgccgccacacactcccatagcccaccctccttccgaccgctgcaccccacccgaatccagccgctgcggttccatctacccaaccccccagtgcggcggctctcctccgagcacgcaatcctccccacccacctccaggacgagcgcttcgccacgctctcggataggatctatgatgccgtgattaagacggggacggaatccaacgagggcaccgaggccgcgctcgacgcgttgggcgctgagctgactacccctctcgtcgccgacgtgctgcaccgcctccgctacgaggagaagctggcgttccggttcttcgcctgggcgtcccaacaggacggatacagccacgaaccgacgacttacaacgacatcatcgacattctctccggcacgcggtacaagagccgccagttcggtgtcctctgcaacgtgctcgatcacatgaagcgccatggctcgaggtcggtgccggttgagggccttctggagatcctgcgcgcctacacggagaagcatctcacgcacatgagaaagctggccaagaagcggcgggttcggatgcgtacgccgccagagactgacgcgctcaacgttctgctggacgcgttctgcaagtgtgggatggtcaaggaagcagaggcagtgtttggccgcgtgaagaggaagttgctgggtaatgcagagacgtacagtaccctgttcttcgggtggtgccgggcgagggaccccaagaaggccatgaaggtgctcgaggaaatgattcagatgaagcacaccccagagagtttcacctacgttgcagccatcgaatcattttgcagcgctggattggtgtcagaggcaagggaactgtttgagttcatgaggactgaggggttgacggtgtcatcgcccacagccaaaacatattcgattatgattgttgcattagcaaaggctgaccggatggaggagtgttttgaactgctttcagacatgagaacttgtggttgtatgcctgacgtgacgacttataaagatttgattgaagggatgtgcttggtgggtagactggatgctgcttatcgtgtgttggacgagatggggagggctggatttcctcctgacattgtcacgtataattgctttcttaatgtgctttgtagtcttcgaaatgctgatgatgcacttgaactctgtgagaggatgatagaggcacactgtgagcccagtgttcatacctataatatgctgatgatgatgttcttcgagatgggagaggcacatagagcattagatatatggcttgagatggacaaaagaggatgtcaacgtgctatcgatacctacgagataatgatctatggtctctttgattgtggagaaacagaatatgcaactgctcttctagatgaggttataaaccgtgacatgaaactttcatacaagaagtttgatgctataatgctgaggttatcagctgtaggcaaccttggtgcgatacatcggttgtcagagcatatgaggaaattttacaatgttgcgatgtcgagacgatttgcaatcactcagaagaagaagagcataggcctgagaaggaaatgagtgccgtggctattgctgctgttgtttcttgttagttgttactgaggatattcaggagcttattcaaaggtagttaatgtatgccagcacgtattgttggaacagattacagtggaagaagcactgcattttttttaatgtaaaaaataggagtgttgcataaccccattcatttgttgaattgaaccggtgctgtgaatatcattgcatttgcattgtagaagaaacatgtacaaggtaacccctcaaccgcacccattcattgttgcaacgtgcacgaaacaccaatccgctggcgccacaaatattagctgcagccctattttgtttgaatcctatgaagagggcctcttttgtccttgttcatgtggggcgcctttcttccttatgctcagatgaaacatgtagctgtgtaagcctgtataactggatttcttgccattaaacctgtgacccccaccactttcctc

SEQ ID NO: 51549 - DNA, 4148 bp, Zea Mays
gccatccctactccaccccaacctaagcagtaggcagtaggcatcaagcgtcttgcgtggctgcgtccaagtccaagcgccatccggccaccagcgcaggtaccgagccaccgaggtaggagccggccaccgggcagatcccaggctgccagccaccggcgtccagcactccggctgctagctaccggccacccgcagcgcaggccacaccaacgggcagcaaccgcatggtgccatagctgtcgacgaacaccagcaaccagacggccagatcccagtaattcgatttattatatcttcgtcgaggatagtgacacgtcacgtcagtgtccggccatcgcttgagagagtccaacccaaggatggttcaggctacggaagggcaatgcactgcttcttagactattgaagaatttataggatgatgtgcaggagcagagcgtgggcagtaaatgcaaagaaaaaaacacagttgcagaaattgctagcaatagactatacaagatagagccaaattgagcaaaaaaaaagaccattcccatttggatcaccattccctaaccacagcaaaatgaagttggaaaattgagtagttgagtgccgtgtatgcacatgagcagggctaatactttataagaaatgtgctggttcttgatactcctccaaccagttgtagaagaattctggtttggctgaagtagttttacatccgaaagatggactttgtacagatatattctctgtcaacaatatgtatatccaggcggagatgaacttggagggaagcagatttacagtttggtgatattatatattatcaattgcagtttattaatgttgcgcttcttctctattatcaaactattcacacaagacttcatgtgtgcgtgtgtgaaagattttattagtgtaaggtctttagggacagttcacattgaagttctggtgcctacataaattgtaaaccatacatgttgacatgggtacacatctcatggctatatacaactttgacatgaggtttatcttaagattgtgtgttccaataaaagctattactatttcttgcatgtgcatgtctttaggatatccatttttctttatagatttatttatttacatcgcttactgcttactagcctattttttctagcaatttctgcaagtcggcccatcgcgttgaactaaaccatctctaatttcctacaacttcaactccaacaacagaatggccccacacacttaatgaaaacatctctaatttctagcaaattcgactccgaggacaataaaggtaccacaatggacttcttaagaagaataggaaccgtgtacataagcttttttgctctaacaaaataagagtggttgttgcaacaatggcattcagaatgggtcttgataagagtgacgttgaacgggtggttgattgtatcttgccagaaagcgtagaagaatacatacatgtatattccatgcagattccccccaccctcccattttcttctcttttctagacatcttactatgctctttctaggaaactggccgtgctgattcaacaacattctataaaagtcgaagtcttttgcacaaatgaatcttatcttcttgtcctttttttcttgtaatttacatttccaacctgctctaagtttcctacataatgacttcaataaaccctttttacagtgaagttcacgaatatgctatgagaaaattctttgccagatattttcttgtgaaaattcagttggatgcatttgctccttggttaaagagtcgacttcagacaagttagatataaaagaggaggcggagctgcgatgccaccaggtggagccgtgcctgctcgctcaggcgtcatgacggagccgaacgcgaggagccgagtgttttatccccgccgaagcccatccccatttgataccagcgagcgcagacatcgccggggacgccatcatcctcggctgcctccaagaccggcccaccgttctgcctgcactcccactcccaaaccccatgatgaacctccctttccggctccgccatctccgacgccttctcgctgccccgcccttaccaaccctcgccgccacacactcccatagcccaccctccttccgaccgctgcaccccacccgaatccagccgctgcggttccatctacccaaccccccagtgcggcggctctcctccgagcacgcaatcctccccacccacctccaggacgagcgcttcgccacgctctcggataggatctatgatgccgtgattaagacggggacggaatccaacgagggcaccgaggccgcgctcgacgcgttgggcgctgagctgactacccctctcgtcgccgacgtgctgcaccgcctccgctacgaggagaagctggcgttccggttcttcgcctgggcgtcccaacaggacggatacagccacgaaccgacgacttacaacgacatcatcgacattctctccggcacgcggtacaagagccgccagttcggtgtcctctgcaacgtgctcgatcacatgaagcgccatggctcgaggtcggtgccggttgagggccttctggagatcctgcgcgcctacacggagaagcatctcacgcacatgagaaagctggccaagaagcggcgggttcggatgcgtacgccgccagagactgacgcgctcaacgttctgctggacgcgttctgcaagtgtgggatggtcaaggaagcagaggcagtgtttggccgcgtgaagaggaagttgctgggtaatgcagagacgtacagtaccctgttcttcgggtggtgccgggcgagggaccccaagaaggccatgaaggtgctcgaggaaatgattcagatgaagcacaccccagagagtttcacctacgttgcagccatcgaatcattttgcagcgctggattggtgtcagaggcaagggaactgtttgagttcatgaggactgaggggttgacggtgtcatcgcccacagccaaaacatattcgattatgattgttgcattagcaaaggctgaccggatggaggagtgttttgaactgctttcagacatgagaacttgtggttgtatgcctgacgtgacgacttataaagatttgattgaagggatgtgcttggtgggtagactggatgctgcttatcgtgtgttggacgagatggggagggctggatttcctcctgacattgtcacgtataattgctttcttaatgtgctttgtagtcttcgaaatgctgatgatgcacttgaactctgtgagaggatgatagaggcacactgtgagcccagtgttcatacctataatatgctgatgatgatgttcttcgagatgggagaggcacatagagcattagatatatggcttgagatggacaaaagaggatgtcaacgtgctatcgatacctacgagataatgatctatggtctctttgattgtggagaaacagaatatgcaactgctcttctagatgaggttataaaccgtgacatgaaactttcatacaagaagtttgatgctataatgctgaggttatcagctgtaggcaaccttggtgcgatacatcggttgtcagagcatatgaggaaattttacaatgttgcgatgtcgagacgatttgcaatcactcagaagaagaagagcataggcctgagaaggaaatgagtgccgtggctattgctgctgttgtttcttgttagttgttactgaggatattcaggagcttattcaaaggtagttaatgtatgccagcacgtattgttggaacagattacagtggaagaagcactgcattttttttaatgtaaaaaataggagtgttgcataaccccattcatttgttgaattgaaccggtgctgtgaatatcattgcatttgcattgtagaagaaacatgtacaaggtaacccctcaaccgcacccattcattgttgcaacgtgcacgaaacaccaatccgctggcgccacaaatattagctgcagccctattttgtttgaatcctatgaagagggcctcttttgtccttgttcatgtggggcgcctttcttccttatgctcagatgaaacatgtagctgtgtaagcctgtataactggatttcttgccattaaacctgtgacccccaccactttcctc

SEQ ID NO: 51550 - DNA, 4019 bp, Zea Mays
gccatccctactccaccccaacctaagcagtaggcagtaggcatcaagcgtcttgcgtggctgcgtccaagtccaagcgccatccggccaccagcgcaggtaccgagccaccgaggtaggagccggccaccgggcagatcccaggctgccagccaccggcgtccagcactccggctgctagctaccggccacccgcagcgcaggccacaccaacgggcagcaaccgcatggtgccatagctgtcgacgaacaccagcaaccagacggccagatcccagtaattcgatttattatatcttcgtcgaggatagtgacacgtcacgtcagtgtccggccatcgcttgagagagtccaacccaaggatggttcaggctacggaagggcaatgcactgcttcttagactattgaagaatttataggatgatgtgcaggagcagtttgttgcagagcgtgggcagtaaatgcaaagaaaaaaacacagttgcagaaattgctagcaatagactatacaagatagagccaaattgagcaaaaaaaaagaccattcccatttggatcaccattccctaaccacagcaaaatgaagttggaaaattgagtagttgagtgccgtgtatgcacatgagcagggctaatactttataagaaatgtgctggttcttgatactcctccaaccagttgtagaagaattctggtttggctgaagtagttttacatccgaaagatggactttgtacagatatattctctgtcaacaatatgtatatccaggcggagatgaacttggagggaagcagatttacagtttggtgatattatatattatcaattgcagtttattaatgttgcgcttcttctctattatcaaactattcacacaagacttcatgtgtgcgtgtgtgaaagattttattagtgtaaggtctttagggacagttcacattgaagttctggtgcctacataaattgtaaaccatacatgttgacatgggtacacatctcatggctatatacaactttgacatgaggtttatcttaagattgtgtgttccaataaaagctattactatttcttgcatgtgcatgtctttaggatatccatttttctttatagatttatttatttacatcgcttactgcttactagcctattttttctagcaatttctgcaagtcggcccatcgcgttgaactaaaccatctctaatttcctacaacttcaactccaacaacagaggtaccacaatggacttcttaagaagaataggaaccgtgtacataagcttttttgctctaacaaaataagagtggttgttgcaacaatggcattcagaatgggtcttgataagagtgacgttgaacgggtggttgattgtatcttgccagaaagcgtagaagaatacatacatgaaactggccgtgctgattcaacaacattctataaaagtcgaagtcttttgcacaaatgaatcttatcttcttgtcctttttttcttgtaatttacatttccaacctgctctaagtttcctacataatgacttcaataaaccctttttacagtgaagttcacgaatatgctatgagaaaattctttgccagatattttcttgtgaaaattcagttggatgcatttgctccttggttaaagagtcgacttcagacaagttagatataaaagaggaggcggagctgcgatgccaccaggtggagccgtgcctgctcgctcaggcgtcatgacggagccgaacgcgaggagccgagtgttttatccccgccgaagcccatccccatttgataccagcgagcgcagacatcgccggggacgccatcatcctcggctgcctccaagaccggcccaccgttctgcctgcactcccactcccaaaccccatgatgaacctccctttccggctccgccatctccgacgccttctcgctgccccgcccttaccaaccctcgccgccacacactcccatagcccaccctccttccgaccgctgcaccccacccgaatccagccgctgcggttccatctacccaaccccccagtgcggcggctctcctccgagcacgcaatcctccccacccacctccaggacgagcgcttcgccacgctctcggataggatctatgatgccgtgattaagacggggacggaatccaacgagggcaccgaggccgcgctcgacgcgttgggcgctgagctgactacccctctcgtcgccgacgtgctgcaccgcctccgctacgaggagaagctggcgttccggttcttcgcctgggcgtcccaacaggacggatacagccacgaaccgacgacttacaacgacatcatcgacattctctccggcacgcggtacaagagccgccagttcggtgtcctctgcaacgtgctcgatcacatgaagcgccatggctcgaggtcggtgccggttgagggccttctggagatcctgcgcgcctacacggagaagcatctcacgcacatgagaaagctggccaagaagcggcgggttcggatgcgtacgccgccagagactgacgcgctcaacgttctgctggacgcgttctgcaagtgtgggatggtcaaggaagcagaggcagtgtttggccgcgtgaagaggaagttgctgggtaatgcagagacgtacagtaccctgttcttcgggtggtgccgggcgagggaccccaagaaggccatgaaggtgctcgaggaaatgattcagatgaagcacaccccagagagtttcacctacgttgcagccatcgaatcattttgcagcgctggattggtgtcagaggcaagggaactgtttgagttcatgaggactgaggggttgacggtgtcatcgcccacagccaaaacatattcgattatgattgttgcattagcaaaggctgaccggatggaggagtgttttgaactgctttcagacatgagaacttgtggttgtatgcctgacgtgacgacttataaagatttgattgaagggatgtgcttggtgggtagactggatgctgcttatcgtgtgttggacgagatggggagggctggatttcctcctgacattgtcacgtataattgctttcttaatgtgctttgtagtcttcgaaatgctgatgatgcacttgaactctgtgagaggatgatagaggcacactgtgagcccagtgttcatacctataatatgctgatgatgatgttcttcgagatgggagaggcacatagagcattagatatatggcttgagatggacaaaagaggatgtcaacgtgctatcgatacctacgagataatgatctatggtctctttgattgtggagaaacagaatatgcaactgctcttctagatgaggttataaaccgtgacatgaaactttcatacaagaagtttgatgctataatgctgaggttatcagctgtaggcaaccttggtgcgatacatcggttgtcagagcatatgaggaaattttacaatgttgcgatgtcgagacgatttgcaatcactcagaagaagaagagcataggcctgagaaggaaatgagtgccgtggctattgctgctgttgtttcttgttagttgttactgaggatattcaggagcttattcaaaggtagttaatgtatgccagcacgtattgttggaacagattacagtggaagaagcactgcattttttttaatgtaaaaaataggagtgttgcataaccccattcatttgttgaattgaaccggtgctgtgaatatcattgcatttgcattgtagaagaaacatgtacaaggtaacccctcaaccgcacccattcattgttgcaacgtgcacgaaacaccaatccgctggcgccacaaatattagctgcagccctattttgtttgaatcctatgaagagggcctcttttgtccttgttcatgtggggcgcctttcttccttatgctcagatgaaacatgtagctgtgtaagcctgtataactggatttcttgccattaaacctgtgacccccaccactttcctc

SEQ ID NO: 51551 - DNA, 3798 bp, Zea Mays
gccatccctactccaccccaacctaagcagtaggcagtaggcatcaagcgtcttgcgtggctgcgtccaagtccaagcgccatccggccaccagcgcaggtaccgagccaccgaggtaggagccggccaccgggcagatcccaggctgccagccaccggcgtccagcactccggctgctagctaccggccacccgcagcgcaggccacaccaacgggcagcaaccgcatggtgccatagctgtcgacgaacaccagcaaccagacggccagatcccaggttatgttactactattatttctatatgatatatttgtctaaagtataaagtctaaacgctatatgaaatgtgattttatatagctatatatgagtgtcaaacagagagttatatactcatatattgtttgcttctgtaacagtaattcgatttattatatcttcgtcgaggatagtgacacgtcacgtcagtgtccggccatcgcttgagaggcacgaatgtcttcgctgcgccgtcacgatccagactcgcatccccttctgacgcgcacccattgcgggcagacgtttgggctttgtgtggatggatcatggacgtacataccacatttgttttttaactaaatcttcacttctttgaatcgcagagtccaacccaaggatggttcaggctacggaagggcaatgcactgcttcttagactattgaagaatttataggatgatgtgcaggagcagagcgtgggcagtaaatgcaaagaaaaaaacacagttgcagaaattgctagcaatagactatacaagatagagccaaattgagcaaaaaaaaagaccattcccatttggatcaccattccctaaccacagcaaaatgaagttggaaaattgagtagttgagtgccgtgtatgcacatgagcagggctaatactttataagaaatgtgctggttcttgatactcctccaaccagttgtagaagaattctggtttggctgaagtagttttacatccgaaagatggactttgtacagatatattctctgtcaacaatatgtatatccaggcggagatgaacttggagggaagcagatttacacaatttctgcaagtcggcccatcgcgttgaactaaaccatctctaatttcctacaacttcaactccaacaacagaggtaccacaatggacttcttaagaagaataggaaccgtgtacataagcttttttgctctaacaaaataagagtggttgttgcaacaatggcattcagaatgggtcttgataagagtgacgttgaacgggtggttgattgtatcttgccagaaagcgtagaagaatacatacattgaagttcacgaatatgctatgagaaaattctttgccagatattttcttgtgaaaattcagttggatgcatttgctccttggttaaagagtcgacttcagacaagttagatataaaagaggaggcggagctgcgatgccaccaggtggagccgtgcctgctcgctcaggcgtcatgacggagccgaacgcgaggagccgagtgttttatccccgccgaagcccatccccatttgataccagcgagcgcagacatcgccggggacgccatcatcctcggctgcctccaagaccggcccaccgttctgcctgcactcccactcccaaaccccatgatgaacctccctttccggctccgccatctccgacgccttctcgctgccccgcccttaccaaccctcgccgccacacactcccatagcccaccctccttccgaccgctgcaccccacccgaatccagccgctgcggttccatctacccaaccccccagtgcggcggctctcctccgagcacgcaatcctccccacccacctccaggacgagcgcttcgccacgctctcggataggatctatgatgccgtgattaagacggggacggaatccaacgagggcaccgaggccgcgctcgacgcgttgggcgctgagctgactacccctctcgtcgccgacgtgctgcaccgcctccgctacgaggagaagctggcgttccggttcttcgcctgggcgtcccaacaggacggatacagccacgaaccgacgacttacaacgacatcatcgacattctctccggcacgcggtacaagagccgccagttcggtgtcctctgcaacgtgctcgatcacatgaagcgccatggctcgaggtcggtgccggttgagggccttctggagatcctgcgcgcctacacggagaagcatctcacgcacatgagaaagctggccaagaagcggcgggttcggatgcgtacgccgccagagactgacgcgctcaacgttctgctggacgcgttctgcaagtgtgggatggtcaaggaagcagaggcagtgtttggccgcgtgaagaggaagttgctgggtaatgcagagacgtacagtaccctgttcttcgggtggtgccgggcgagggaccccaagaaggccatgaaggtgctcgaggaaatgattcagatgaagcacaccccagagagtttcacctacgttgcagccatcgaatcattttgcagcgctggattggtgtcagaggcaagggaactgtttgagttcatgaggactgaggggttgacggtgtcatcgcccacagccaaaacatattcgattatgattgttgcattagcaaaggctgaccggatggaggagtgttttgaactgctttcagacatgagaacttgtggttgtatgcctgacgtgacgacttataaagatttgattgaagggatgtgcttggtgggtagactggatgctgcttatcgtgtgttggacgagatggggagggctggatttcctcctgacattgtcacgtataattgctttcttaatgtgctttgtagtcttcgaaatgctgatgatgcacttgaactctgtgagaggatgatagaggcacactgtgagcccagtgttcatacctataatatgctgatgatgatgttcttcgagatgggagaggcacatagagcattagatatatggcttgagatggacaaaagaggatgtcaacgtgctatcgatacctacgagataatgatctatggtctctttgattgtggagaaacagaatatgcaactgctcttctagatgaggttataaaccgtgacatgaaactttcatacaagaagtttgatgctataatgctgaggttatcagctgtaggcaaccttggtgcgatacatcggttgtcagagcatatgaggaaattttacaatgttgcgatgtcgagacgatttgcaatcactcagaagaagaagagcataggcctgagaaggaaatgagtgccgtggctattgctgctgttgtttcttgttagttgttactgaggatattcaggagcttattcaaaggtagttaatgtatgccagcacgtattgttggaacagattacagtggaagaagcactgcattttttttaatgtaaaaaataggagtgttgcataaccccattcatttgttgaattgaaccggtgctgtgaatatcattgcatttgcattgtagaagaaacatgtacaaggtaacccctcaaccgcacccattcattgttgcaacgtgcacgaaacaccaatccgctggcgccacaaatattagctgcagccctattttgtttgaatcctatgaagagggcctcttttgtccttgttcatgtggggcgcctttcttccttatgctcagatgaaacatgtagctgtgtaagcctgtataactggatttcttgccattaaacctgtgacccccaccactttcctc

SEQ ID NO: 51552 - DNA, 4009 bp, Zea Mays
gccatccctactccaccccaacctaagcagtaggcagtaggcatcaagcgtcttgcgtggctgcgtccaagtccaagcgccatccggccaccagcgcaggtaccgagccaccgaggtaggagccggccaccgggcagatcccaggctgccagccaccggcgtccagcactccggctgctagctaccggccacccgcagcgcaggccacaccaacgggcagcaaccgcatggtgccatagctgtcgacgaacaccagcaaccagacggccagatcccagtaattcgatttattatatcttcgtcgaggatagtgacacgtcacgtcagtgtccggccatcgcttgagagagtccaacccaaggatggttcaggctacggaagggcaatgcactgcttcttagactattgaagaatttataggatgatgtgcaggagcagagcgtgggcagtaaatgcaaagaaaaaaacacagttgcagaaattgctagcaatagactatacaagatagagccaaattgagcaaaaaaaaagaccattcccatttggatcaccattccctaaccacagcaaaatgaagttggaaaattgagtagttgagtgccgtgtatgcacatgagcagggctaatactttataagaaatgtgctggttcttgatactcctccaaccagttgtagaagaattctggtttggctgaagtagttttacatccgaaagatggactttgtacagatatattctctgtcaacaatatgtatatccaggcggagatgaacttggagggaagcagatttacagtttggtgatattatatattatcaattgcagtttattaatgttgcgcttcttctctattatcaaactattcacacaagacttcatgtgtgcgtgtgtgaaagattttattagtgtaaggtctttagggacagttcacattgaagttctggtgcctacataaattgtaaaccatacatgttgacatgggtacacatctcatggctatatacaactttgacatgaggtttatcttaagattgtgtgttccaataaaagctattactatttcttgcatgtgcatgtctttaggatatccatttttctttatagatttatttatttacatcgcttactgcttactagcctattttttctagcaatttctgcaagtcggcccatcgcgttgaactaaaccatctctaatttcctacaacttcaactccaacaacagaggtaccacaatggacttcttaagaagaataggaaccgtgtacataagcttttttgctctaacaaaataagagtggttgttgcaacaatggcattcagaatgggtcttgataagagtgacgttgaacgggtggttgattgtatcttgccagaaagcgtagaagaatacatacatgaaactggccgtgctgattcaacaacattctataaaagtcgaagtcttttgcacaaatgaatcttatcttcttgtcctttttttcttgtaatttacatttccaacctgctctaagtttcctacataatgacttcaataaaccctttttacagtgaagttcacgaatatgctatgagaaaattctttgccagatattttcttgtgaaaattcagttggatgcatttgctccttggttaaagagtcgacttcagacaagttagatataaaagaggaggcggagctgcgatgccaccaggtggagccgtgcctgctcgctcaggcgtcatgacggagccgaacgcgaggagccgagtgttttatccccgccgaagcccatccccatttgataccagcgagcgcagacatcgccggggacgccatcatcctcggctgcctccaagaccggcccaccgttctgcctgcactcccactcccaaaccccatgatgaacctccctttccggctccgccatctccgacgccttctcgctgccccgcccttaccaaccctcgccgccacacactcccatagcccaccctccttccgaccgctgcaccccacccgaatccagccgctgcggttccatctacccaaccccccagtgcggcggctctcctccgagcacgcaatcctccccacccacctccaggacgagcgcttcgccacgctctcggataggatctatgatgccgtgattaagacggggacggaatccaacgagggcaccgaggccgcgctcgacgcgttgggcgctgagctgactacccctctcgtcgccgacgtgctgcaccgcctccgctacgaggagaagctggcgttccggttcttcgcctgggcgtcccaacaggacggatacagccacgaaccgacgacttacaacgacatcatcgacattctctccggcacgcggtacaagagccgccagttcggtgtcctctgcaacgtgctcgatcacatgaagcgccatggctcgaggtcggtgccggttgagggccttctggagatcctgcgcgcctacacggagaagcatctcacgcacatgagaaagctggccaagaagcggcgggttcggatgcgtacgccgccagagactgacgcgctcaacgttctgctggacgcgttctgcaagtgtgggatggtcaaggaagcagaggcagtgtttggccgcgtgaagaggaagttgctgggtaatgcagagacgtacagtaccctgttcttcgggtggtgccgggcgagggaccccaagaaggccatgaaggtgctcgaggaaatgattcagatgaagcacaccccagagagtttcacctacgttgcagccatcgaatcattttgcagcgctggattggtgtcagaggcaagggaactgtttgagttcatgaggactgaggggttgacggtgtcatcgcccacagccaaaacatattcgattatgattgttgcattagcaaaggctgaccggatggaggagtgttttgaactgctttcagacatgagaacttgtggttgtatgcctgacgtgacgacttataaagatttgattgaagggatgtgcttggtgggtagactggatgctgcttatcgtgtgttggacgagatggggagggctggatttcctcctgacattgtcacgtataattgctttcttaatgtgctttgtagtcttcgaaatgctgatgatgcacttgaactctgtgagaggatgatagaggcacactgtgagcccagtgttcatacctataatatgctgatgatgatgttcttcgagatgggagaggcacatagagcattagatatatggcttgagatggacaaaagaggatgtcaacgtgctatcgatacctacgagataatgatctatggtctctttgattgtggagaaacagaatatgcaactgctcttctagatgaggttataaaccgtgacatgaaactttcatacaagaagtttgatgctataatgctgaggttatcagctgtaggcaaccttggtgcgatacatcggttgtcagagcatatgaggaaattttacaatgttgcgatgtcgagacgatttgcaatcactcagaagaagaagagcataggcctgagaaggaaatgagtgccgtggctattgctgctgttgtttcttgttagttgttactgaggatattcaggagcttattcaaaggtagttaatgtatgccagcacgtattgttggaacagattacagtggaagaagcactgcattttttttaatgtaaaaaataggagtgttgcataaccccattcatttgttgaattgaaccggtgctgtgaatatcattgcatttgcattgtagaagaaacatgtacaaggtaacccctcaaccgcacccattcattgttgcaacgtgcacgaaacaccaatccgctggcgccacaaatattagctgcagccctattttgtttgaatcctatgaagagggcctcttttgtccttgttcatgtggggcgcctttcttccttatgctcagatgaaacatgtagctgtgtaagcctgtataactggatttcttgccattaaacctgtgacccccaccactttcctc

SEQ ID NO: 51553 - DNA, 3924 bp, Zea Mays
gccatccctactccaccccaacctaagcagtaggcagtaggcatcaagcgtcttgcgtggctgcgtccaagtccaagcgccatccggccaccagcgcaggtaccgagccaccgaggtaggagccggccaccgggcagatcccaggctgccagccaccggcgtccagcactccggctgctagctaccggccacccgcagcgcaggccacaccaacgggcagcaaccgcatggtgccatagctgtcgacgaacaccagcaaccagacggccagatcccagtaattcgatttattatatcttcgtcgaggatagtgacacgtcacgtcagtgtccggccatcgcttgagaggcacgaatgtcttcgctgcgccgtcacgatccagactcgcatccccttctgacgcgcacccattgcgggcagacgtttgggctttgtgtggatggatcatggacgtacataccacatttgttttttaactaaatcttcacttctttgaatcgcagagtccaacccaaggatggttcaggctacggaagggcaatgcactgcttcttagactattgaagaatttataggatgatgtgcaggagcagagcgtgggcagtaaatgcaaagaaaaaaacacagttgcagaaattgctagcaatagactatacaagatagagccaaattgagcaaaaaaaaagaccattcccatttggatcaccattccctaaccacagcaaaatgaagttggaaaattgagtagttgagtgccgtgtatgcacatgagcagggctaatactttataagaaatgtgctggttcttgatactcctccaaccagttgtagaagaattctggtttggctgaagtagttttacatccgaaagatggactttgtacagatatattctctgtcaacaatatgtatatccaggcggagatgaacttggagggaagcagatttacagtttggtgatattatatattatcaattgcagtttattaatgttgcgcttcttctctattatcaaactattcacacaagacttcatgtgtgcgtgtgtgaaagattttattagtgtaaggtctttagggacagttcacattgaagttctggtgcctacataaattgtaaaccatacatgttgacatgggtacacatctcatggctatatacaactttgacatgaggtttatcttaagattgtgtgttccaataaaagctattactatttcttgcatgtgcatgtctttaggatatccatttttctttatagatttatttatttacatcgcttactgcttactagcctattttttctagcaatttctgcaagtcggcccatcgcgttgaactaaaccatctctaatttcctacaacttcaactccaacaacagaatggccccacacacttaatgaaaacatctctaatttctagcaaattcgactccgaggacaataaaggtaccacaatggacttcttaagaagaataggaaccgtgtacataagcttttttgctctaacaaaataagagtggttgttgcaacaatggcattcagaatgggtcttgataagagtgacgttgaacgggtggttgattgtatcttgccagaaagcgtagaagaatacatacattgaagttcacgaatatgctatgagaaaattctttgccagatattttcttgtgaaaattcagttggatgcatttgctccttggttaaagagtcgacttcagacaagttagatataaaagaggaggcggagctgcgatgccaccaggtggagccgtgcctgctcgctcaggcgtcatgacggagccgaacgcgaggagccgagtgttttatccccgccgaagcccatccccatttgataccagcgagcgcagacatcgccggggacgccatcatcctcggctgcctccaagaccggcccaccgttctgcctgcactcccactcccaaaccccatgatgaacctccctttccggctccgccatctccgacgccttctcgctgccccgcccttaccaaccctcgccgccacacactcccatagcccaccctccttccgaccgctgcaccccacccgaatccagccgctgcggttccatctacccaaccccccagtgcggcggctctcctccgagcacgcaatcctccccacccacctccaggacgagcgcttcgccacgctctcggataggatctatgatgccgtgattaagacggggacggaatccaacgagggcaccgaggccgcgctcgacgcgttgggcgctgagctgactacccctctcgtcgccgacgtgctgcaccgcctccgctacgaggagaagctggcgttccggttcttcgcctgggcgtcccaacaggacggatacagccacgaaccgacgacttacaacgacatcatcgacattctctccggcacgcggtacaagagccgccagttcggtgtcctctgcaacgtgctcgatcacatgaagcgccatggctcgaggtcggtgccggttgagggccttctggagatcctgcgcgcctacacggagaagcatctcacgcacatgagaaagctggccaagaagcggcgggttcggatgcgtacgccgccagagactgacgcgctcaacgttctgctggacgcgttctgcaagtgtgggatggtcaaggaagcagaggcagtgtttggccgcgtgaagaggaagttgctgggtaatgcagagacgtacagtaccctgttcttcgggtggtgccgggcgagggaccccaagaaggccatgaaggtgctcgaggaaatgattcagatgaagcacaccccagagagtttcacctacgttgcagccatcgaatcattttgcagcgctggattggtgtcagaggcaagggaactgtttgagttcatgaggactgaggggttgacggtgtcatcgcccacagccaaaacatattcgattatgattgttgcattagcaaaggctgaccggatggaggagtgttttgaactgctttcagacatgagaacttgtggttgtatgcctgacgtgacgacttataaagatttgattgaagggatgtgcttggtgggtagactggatgctgcttatcgtgtgttggacgagatggggagggctggatttcctcctgacattgtcacgtataattgctttcttaatgtgctttgtagtcttcgaaatgctgatgatgcacttgaactctgtgagaggatgatagaggcacactgtgagcccagtgttcatacctataatatgctgatgatgatgttcttcgagatgggagaggcacatagagcattagatatatggcttgagatggacaaaagaggatgtcaacgtgctatcgatacctacgagataatgatctatggtctctttgattgtggagaaacagaatatgcaactgctcttctagatgaggttataaaccgtgacatgaaactttcatacaagaagtttgatgctataatgctgaggttatcagctgtaggcaaccttggtgcgatacatcggttgtcagagcatatgaggaaattttacaatgttgcgatgtcgagacgatttgcaatcactcagaagaagaagagcataggcctgagaaggaaatgagtgccgtggctattgctgctgttgtttcttgttagttgttactgaggatattcaggagcttattcaaaggtagttaatgtatgccagcacgtattgttggaacagattacagtggaagaagcactgcattttttttaatgtaaaaaataggagtgttgcataaccccattcatttgttgaattgaaccggtgctgtgaatatcattgcatttgcattgtagaagaaacatgtacaaggtgacggctactggttttcaacaaacacatatcggggcatcgggtgaagccgccaaacgcatatgagcagcgttggcttt

SEQ ID NO: 51554 - DNA, 3995 bp, Zea Mays
gccatccctactccaccccaacctaagcagtaggcagtaggcatcaagcgtcttgcgtggctgcgtccaagtccaagcgccatccggccaccagcgcaggtaccgagccaccgaggtaggagccggccaccgggcagatcccaggctgccagccaccggcgtccagcactccggctgctagctaccggccacccgcagcgcaggccacaccaacgggcagcaaccgcatggtgccatagctgtcgacgaacaccagcaaccagacggccagatcccagtaattcgatttattatatcttcgtcgaggatagtgacacgtcacgtcagtgtccggccatcgcttgagagagtccaacccaaggatggttcaggctacggaagggcaatgcactgcttcttagactattgaagaatttataggatgatgtgcaggagcagagcgtgggcagtaaatgcaaagaaaaaaacacagttgcagaaattgctagcaatagactatacaagatagagccaaattgagcaaaaaaaaagaccattcccatttggatcaccattccctaaccacagcaaaatgaagttggaaaattgagtagttgagtgccgtgtatgcacatgagcagggctaatactttataagaaatgtgctggttcttgatactcctccaaccagttgtagaagaattctggtttggctgaagtagttttacatccgaaagatggactttgtacagatatattctctgtcaacaatatgtatatccaggcggagatgaacttggagggaagcagatttacagtttggtgatattatatattatcaattgcagtttattaatgttgcgcttcttctctattatcaaactattcacacaagacttcatgtgtgcgtgtgtgaaagattttattagtgtaaggtctttagggacagttcacattgaagttctggtgcctacataaattgtaaaccatacatgttgacatgggtacacatctcatggctatatacaactttgacatgaggtttatcttaagattgtgtgttccaataaaagctattactatttcttgcatgtgcatgtctttaggatatccatttttctttatagatttatttatttacatcgcttactgcttactagcctattttttctagcaatttctgcaagtcggcccatcgcgttgaactaaaccatctctaatttcctacaacttcaactccaacaacagaatggccccacacacttaatgaaaacatctctaatttctagcaaattcgactccgaggacaataaaggtaccacaatggacttcttaagaagaataggaaccgtgtacataagcttttttgctctaacaaaataagagtggttgttgcaacaatggcattcagaatgggtcttgataagagtgacgttgaacgggtggttgattgtatcttgccagaaagcgtagaagaatacatacatgtatattccatgcagattccccccaccctcccattttcttctcttttctagacatcttactatgctctttctaggaaactggccgtgctgattcaacaacattctataaaagtcgaagtcttttgcacaaatgaatcttatcttcttgtcctttttttcttgtaatttacatttccaacctgctctaagtttcctacataatgacttcaataaaccctttttacagtgaagttcacgaatatgctatgagaaaattctttgccagatattttcttgtgaaaattcagttggatgcatttgctccttggttaaagagtcgacttcagacaagttagatataaaagaggaggcggagctgcgatgccaccaggtggagccgtgcctgctcgctcaggcgtcatgacggagccgaacgcgaggagccgagtgttttatccccgccgaagcccatccccatttgataccagcgagcgcagacatcgccggggacgccatcatcctcggctgcctccaagaccggcccaccgttctgcctgcactcccactcccaaaccccatgatgaacctccctttccggctccgccatctccgacgccttctcgctgccccgcccttaccaaccctcgccgccacacactcccatagcccaccctccttccgaccgctgcaccccacccgaatccagccgctgcggttccatctacccaaccccccagtgcggcggctctcctccgagcacgcaatcctccccacccacctccaggacgagcgcttcgccacgctctcggataggatctatgatgccgtgattaagacggggacggaatccaacgagggcaccgaggccgcgctcgacgcgttgggcgctgagctgactacccctctcgtcgccgacgtgctgcaccgcctccgctacgaggagaagctggcgttccggttcttcgcctgggcgtcccaacaggacggatacagccacgaaccgacgacttacaacgacatcatcgacattctctccggcacgcggtacaagagccgccagttcggtgtcctctgcaacgtgctcgatcacatgaagcgccatggctcgaggtcggtgccggttgagggccttctggagatcctgcgcgcctacacggagaagcatctcacgcacatgagaaagctggccaagaagcggcgggttcggatgcgtacgccgccagagactgacgcgctcaacgttctgctggacgcgttctgcaagtgtgggatggtcaaggaagcagaggcagtgtttggccgcgtgaagaggaagttgctgggtaatgcagagacgtacagtaccctgttcttcgggtggtgccgggcgagggaccccaagaaggccatgaaggtgctcgaggaaatgattcagatgaagcacaccccagagagtttcacctacgttgcagccatcgaatcattttgcagcgctggattggtgtcagaggcaagggaactgtttgagttcatgaggactgaggggttgacggtgtcatcgcccacagccaaaacatattcgattatgattgttgcattagcaaaggctgaccggatggaggagtgttttgaactgctttcagacatgagaacttgtggttgtatgcctgacgtgacgacttataaagatttgattgaagggatgtgcttggtgggtagactggatgctgcttatcgtgtgttggacgagatggggagggctggatttcctcctgacattgtcacgtataattgctttcttaatgtgctttgtagtcttcgaaatgctgatgatgcacttgaactctgtgagaggatgatagaggcacactgtgagcccagtgttcatacctataatatgctgatgatgatgttcttcgagatgggagaggcacatagagcattagatatatggcttgagatggacaaaagaggatgtcaacgtgctatcgatacctacgagataatgatctatggtctctttgattgtggagaaacagaatatgcaactgctcttctagatgaggttataaaccgtgacatgaaactttcatacaagaagtttgatgctataatgctgaggttatcagctgtaggcaaccttggtgcgatacatcggttgtcagagcatatgaggaaattttacaatgttgcgatgtcgagacgatttgcaatcactcagaagaagaagagcataggcctgagaaggaaatgagtgccgtggctattgctgctgttgtttcttgttagttgttactgaggatattcaggagcttattcaaaggtagttaatgtatgccagcacgtattgttggaacagattacagtggaagaagcactgcattttttttaatgtaaaaaataggagtgttgcataaccccattcatttgttgaattgaaccggtgctgtgaatatcattgcatttgcattgtagaagaaacatgtacaaggtgacggctactggttttcaacaaacacatatcggggcatcgggtgaagccgccaaacgcatatgagcagcgttggcttt

SEQ ID NO: 51555 - DNA, 3704 bp, Zea Mays
gccatccctactccaccccaacctaagcagtaggcagtaggcatcaagcgtcttgcgtggctgcgtccaagtccaagcgccatccggccaccagcgcaggtaccgagccaccgaggtaggagccggccaccgggcagatcccaggctgccagccaccggcgtccagcactccggctgctagctaccggccacccgcagcgcaggccacaccaacgggcagcaaccgcatggtgccatagctgtcgacgaacaccagcaaccagacggccagatcccagtaattcgatttattatatcttcgtcgaggatagtgacacgtcacgtcagtgtccggccatcgcttgagagagtccaacccaaggatggttcaggctacggaagggcaatgcactgcttcttagactattgaagaatttataggatgatgtgcaggagcagagcgtgggcagtaaatgcaaagaaaaaaacacagttgcagaaattgctagcaatagactatacaagatagagccaaattgagcaaaaaaaaagaccattcccatttggatcaccattccctaaccacagcaaaatgaagttggaaaattgagtagttgagtgccgtgtatgcacatgagcagggctaatactttataagaaatgtgctggttcttgatactcctccaaccagttgtagaagaattctggtttggctgaagtagttttacatccgaaagatggactttgtacagatatattctctgtcaacaatatgtatatccaggcggagatgaacttggagggaagcagatttacagtttggtgatattatatattatcaattgcagtttattaatgttgcgcttcttctctattatcaaactattcacacaagacttcatgtgtgcgtgtgtgaaagattttattagtgtaaggtctttagggacagttcacattgaagttctggtgcctacataaattgtaaaccatacatgttgacatgggtacacatctcatggctatatacaactttgacatgaggtttatcttaagattgtgtgttccaataaaagctattactatttcttgcatgtgcatgtctttaggatatccatttttctttatagatttatttatttacatcgcttactgcttactagcctattttttctagcaatttctgcaagtcggcccatcgcgttgaactaaaccatctctaatttcctacaacttcaactccaacaacagaggtaccacaatggacttcttaagaagaataggaaccgtgtacataagcttttttgctctaacaaaataagagtggttgttgcaacaatggcattcagaatgggtcttgataagagtgacgttgaacgggtggttgattgtatcttgccagaaagcgtagaagaatacatacattgaagttcacgaatatgctatgagaaaattctttgccagatattttcttgtgaaaattcagttggatgcatttgctccttggttaaagagtcgacttcagacaagttagatataaaagaggaggcggagctgcgatgccaccaggtggagccgtgcctgctcgctcaggcgtcatgacggagccgaacgcgaggagccgagtgttttatccccgccgaagcccatccccatttgataccagcgagcgcagacatcgccggggacgccatcatcctcggctgcctccaagaccggcccaccgttctgcctgcactcccactcccaaaccccatgatgaacctccctttccggctccgccatctccgacgccttctcgctgccccgcccttaccaaccctcgccgccacacactcccatagcccaccctccttccgaccgctgcaccccacccgaatccagccgctgcggttccatctacccaaccccccagtgcggcggctctcctccgagcacgcaatcctccccacccacctccaggacgagcgcttcgccacgctctcggataggatctatgatgccgtgattaagacggggacggaatccaacgagggcaccgaggccgcgctcgacgcgttgggcgctgagctgactacccctctcgtcgccgacgtgctgcaccgcctccgctacgaggagaagctggcgttccggttcttcgcctgggcgtcccaacaggacggatacagccacgaaccgacgacttacaacgacatcatcgacattctctccggcacgcggtacaagagccgccagttcggtgtcctctgcaacgtgctcgatcacatgaagcgccatggctcgaggtcggtgccggttgagggccttctggagatcctgcgcgcctacacggagaagcatctcacgcacatgagaaagctggccaagaagcggcgggttcggatgcgtacgccgccagagactgacgcgctcaacgttctgctggacgcgttctgcaagtgtgggatggtcaaggaagcagaggcagtgtttggccgcgtgaagaggaagttgctgggtaatgcagagacgtacagtaccctgttcttcgggtggtgccgggcgagggaccccaagaaggccatgaaggtgctcgaggaaatgattcagatgaagcacaccccagagagtttcacctacgttgcagccatcgaatcattttgcagcgctggattggtgtcagaggcaagggaactgtttgagttcatgaggactgaggggttgacggtgtcatcgcccacagccaaaacatattcgattatgattgttgcattagcaaaggctgaccggatggaggagtgttttgaactgctttcagacatgagaacttgtggttgtatgcctgacgtgacgacttataaagatttgattgaagggatgtgcttggtgggtagactggatgctgcttatcgtgtgttggacgagatggggagggctggatttcctcctgacattgtcacgtataattgctttcttaatgtgctttgtagtcttcgaaatgctgatgatgcacttgaactctgtgagaggatgatagaggcacactgtgagcccagtgttcatacctataatatgctgatgatgatgttcttcgagatgggagaggcacatagagcattagatatatggcttgagatggacaaaagaggatgtcaacgtgctatcgatacctacgagataatgatctatggtctctttgattgtggagaaacagaatatgcaactgctcttctagatgaggttataaaccgtgacatgaaactttcatacaagaagtttgatgctataatgctgaggttatcagctgtaggcaaccttggtgcgatacatcggttgtcagagcatatgaggaaattttacaatgttgcgatgtcgagacgatttgcaatcactcagaagaagaagagcataggcctgagaaggaaatgagtgccgtggctattgctgctgttgtttcttgttagttgttactgaggatattcaggagcttattcaaaggtagttaatgtatgccagcacgtattgttggaacagattacagtggaagaagcactgcattttttttaatgtaaaaaataggagtgttgcataaccccattcatttgttgaattgaaccggtgctgtgaatatcattgcatttgcattgtagaagaaacatgtacaaggtgacggctactggttttcaacaaacacatatcggggcatcgggtgaagccgccaaacgcatatgagcagcgttggcttt

SEQ ID NO: 51556 - DNA, 3856 bp, Zea Mays
gccatccctactccaccccaacctaagcagtaggcagtaggcatcaagcgtcttgcgtggctgcgtccaagtccaagcgccatccggccaccagcgcaggtaccgagccaccgaggtaggagccggccaccgggcagatcccaggctgccagccaccggcgtccagcactccggctgctagctaccggccacccgcagcgcaggccacaccaacgggcagcaaccgcatggtgccatagctgtcgacgaacaccagcaaccagacggccagatcccagtaattcgatttattatatcttcgtcgaggatagtgacacgtcacgtcagtgtccggccatcgcttgagagagtccaacccaaggatggttcaggctacggaagggcaatgcactgcttcttagactattgaagaatttataggatgatgtgcaggagcagagcgtgggcagtaaatgcaaagaaaaaaacacagttgcagaaattgctagcaatagactatacaagatagagccaaattgagcaaaaaaaaagaccattcccatttggatcaccattccctaaccacagcaaaatgaagttggaaaattgagtagttgagtgccgtgtatgcacatgagcagggctaatactttataagaaatgtgctggttcttgatactcctccaaccagttgtagaagaattctggtttggctgaagtagttttacatccgaaagatggactttgtacagatatattctctgtcaacaatatgtatatccaggcggagatgaacttggagggaagcagatttacagtttggtgatattatatattatcaattgcagtttattaatgttgcgcttcttctctattatcaaactattcacacaagacttcatgtgtgcgtgtgtgaaagattttattagtgtaaggtctttagggacagttcacattgaagttctggtgcctacataaattgtaaaccatacatgttgacatgggtacacatctcatggctatatacaactttgacatgaggtttatcttaagattgtgtgttccaataaaagctattactatttcttgcatgtgcatgtctttaggatatccatttttctttatagatttatttatttacatcgcttactgcttactagcctattttttctagcaatttctgcaagtcggcccatcgcgttgaactaaaccatctctaatttcctacaacttcaactccaacaacagaggtaccacaatggacttcttaagaagaataggaaccgtgtacataagcttttttgctctaacaaaataagagtggttgttgcaacaatggcattcagaatgggtcttgataagagtgacgttgaacgggtggttgattgtatcttgccagaaagcgtagaagaatacatacatgaaactggccgtgctgattcaacaacattctataaaagtcgaagtcttttgcacaaatgaatcttatcttcttgtcctttttttcttgtaatttacatttccaacctgctctaagtttcctacataatgacttcaataaaccctttttacagtgaagttcacgaatatgctatgagaaaattctttgccagatattttcttgtgaaaattcagttggatgcatttgctccttggttaaagagtcgacttcagacaagttagatataaaagaggaggcggagctgcgatgccaccaggtggagccgtgcctgctcgctcaggcgtcatgacggagccgaacgcgaggagccgagtgttttatccccgccgaagcccatccccatttgataccagcgagcgcagacatcgccggggacgccatcatcctcggctgcctccaagaccggcccaccgttctgcctgcactcccactcccaaaccccatgatgaacctccctttccggctccgccatctccgacgccttctcgctgccccgcccttaccaaccctcgccgccacacactcccatagcccaccctccttccgaccgctgcaccccacccgaatccagccgctgcggttccatctacccaaccccccagtgcggcggctctcctccgagcacgcaatcctccccacccacctccaggacgagcgcttcgccacgctctcggataggatctatgatgccgtgattaagacggggacggaatccaacgagggcaccgaggccgcgctcgacgcgttgggcgctgagctgactacccctctcgtcgccgacgtgctgcaccgcctccgctacgaggagaagctggcgttccggttcttcgcctgggcgtcccaacaggacggatacagccacgaaccgacgacttacaacgacatcatcgacattctctccggcacgcggtacaagagccgccagttcggtgtcctctgcaacgtgctcgatcacatgaagcgccatggctcgaggtcggtgccggttgagggccttctggagatcctgcgcgcctacacggagaagcatctcacgcacatgagaaagctggccaagaagcggcgggttcggatgcgtacgccgccagagactgacgcgctcaacgttctgctggacgcgttctgcaagtgtgggatggtcaaggaagcagaggcagtgtttggccgcgtgaagaggaagttgctgggtaatgcagagacgtacagtaccctgttcttcgggtggtgccgggcgagggaccccaagaaggccatgaaggtgctcgaggaaatgattcagatgaagcacaccccagagagtttcacctacgttgcagccatcgaatcattttgcagcgctggattggtgtcagaggcaagggaactgtttgagttcatgaggactgaggggttgacggtgtcatcgcccacagccaaaacatattcgattatgattgttgcattagcaaaggctgaccggatggaggagtgttttgaactgctttcagacatgagaacttgtggttgtatgcctgacgtgacgacttataaagatttgattgaagggatgtgcttggtgggtagactggatgctgcttatcgtgtgttggacgagatggggagggctggatttcctcctgacattgtcacgtataattgctttcttaatgtgctttgtagtcttcgaaatgctgatgatgcacttgaactctgtgagaggatgatagaggcacactgtgagcccagtgttcatacctataatatgctgatgatgatgttcttcgagatgggagaggcacatagagcattagatatatggcttgagatggacaaaagaggatgtcaacgtgctatcgatacctacgagataatgatctatggtctctttgattgtggagaaacagaatatgcaactgctcttctagatgaggttataaaccgtgacatgaaactttcatacaagaagtttgatgctataatgctgaggttatcagctgtaggcaaccttggtgcgatacatcggttgtcagagcatatgaggaaattttacaatgttgcgatgtcgagacgatttgcaatcactcagaagaagaagagcataggcctgagaaggaaatgagtgccgtggctattgctgctgttgtttcttgttagttgttactgaggatattcaggagcttattcaaaggtagttaatgtatgccagcacgtattgttggaacagattacagtggaagaagcactgcattttttttaatgtaaaaaataggagtgttgcataaccccattcatttgttgaattgaaccggtgctgtgaatatcattgcatttgcattgtagaagaaacatgtacaaggtgacggctactggttttcaacaaacacatatcggggcatcgggtgaagccgccaaacgcatatgagcagcgttggcttt

SEQ ID NO: 51557 - DNA, 4065 bp, Zea Mays
gccatccctactccaccccaacctaagcagtaggcagtaggcatcaagcgtcttgcgtggctgcgtccaagtccaagcgccatccggccaccagcgcaggtaccgagccaccgaggtaggagccggccaccgggcagatcccaggctgccagccaccggcgtccagcactccggctgctagctaccggccacccgcagcgcaggccacaccaacgggcagcaaccgcatggtgccatagctgtcgacgaacaccagcaaccagacggccagatcccagtaattcgatttattatatcttcgtcgaggatagtgacacgtcacgtcagtgtccggccatcgcttgagaggcacgaatgtcttcgctgcgccgtcacgatccagactcgcatccccttctgacgcgcacccattgcgggcagacgtttgggctttgtgtggatggatcatggacgtacataccacatttgttttttaactaaatcttcacttctttgaatcgcagagtccaacccaaggatggttcaggctacggaagggcaatgcactgcttcttagactattgaagaatttataggatgatgtgcaggagcaggcagctactatgcaattttctatttattgtactcttgccacgaactgctcgtaattctctttcagtttgttgcagagcgtgggcagtaaatgcaaagaaaaaaacacagttgcagaaattgctagcaatagactatacaagatagagccaaattgagcaaaaaaaaagaccattcccatttggatcaccattccctaaccacagcaaaatgaagttggaaaattgagtagttgagtgccgtgtatgcacatgagcagggctaatactttataagaaatgtgctggttcttgatactcctccaaccagttgtagaagaattctggtttggctgaagtagttttacatccgaaagatggactttgtacagatatattctctgtcaacaatatgtatatccaggcggagatgaacttggagggaagcagatttacagtttggtgatattatatattatcaattgcagtttattaatgttgcgcttcttctctattatcaaactattcacacaagacttcatgtgtgcgtgtgtgaaagattttattagtgtaaggtctttagggacagttcacattgaagttctggtgcctacataaattgtaaaccatacatgttgacatgggtacacatctcatggctatatacaactttgacatgaggtttatcttaagattgtgtgttccaataaaagctattactatttcttgcatgtgcatgtctttaggatatccatttttctttatagatttatttatttacatcgcttactgcttactagcctattttttctagcaatttctgcaagtcggcccatcgcgttgaactaaaccatctctaatttcctacaacttcaactccaacaacagaggtaccacaatggacttcttaagaagaataggaaccgtgtacataagcttttttgctctaacaaaataagagtggttgttgcaacaatggcattcagaatgggtcttgataagagtgacgttgaacgggtggttgattgtatcttgccagaaagcgtagaagaatacatacatgaaactggccgtgctgattcaacaacattctataaaagtcgaagtcttttgcacaaatgaatcttatcttcttgtcctttttttcttgtaatttacatttccaacctgctctaagtttcctacataatgacttcaataaaccctttttacagtgaagttcacgaatatgctatgagaaaattctttgccagatattttcttgtgaaaattcagttggatgcatttgctccttggttaaagagtcgacttcagacaagttagatataaaagaggaggtggagccgtgcctgctcgctcaggcgtcatgacggagccgaacgcgaggagccgagtgttttatccccgccgaagcccatccccatttgataccagcgagcgcagacatcgccggggacgccatcatcctcggctgcctccaagaccggcccaccgttctgcctgcactcccactcccaaaccccatgatgaacctccctttccggctccgccatctccgacgccttctcgctgccccgcccttaccaaccctcgccgccacacactcccatagcccaccctccttccgaccgctgcaccccacccgaatccagccgctgcggttccatctacccaaccccccagtgcggcggctctcctccgagcacgcaatcctccccacccacctccaggacgagcgcttcgccacgctctcggataggatctatgatgccgtgattaagacggggacggaatccaacgagggcaccgaggccgcgctcgacgcgttgggcgctgagctgactacccctctcgtcgccgacgtgctgcaccgcctccgctacgaggagaagctggcgttccggttcttcgcctgggcgtcccaacaggacggatacagccacgaaccgacgacttacaacgacatcatcgacattctctccggcacgcggtacaagagccgccagttcggtgtcctctgcaacgtgctcgatcacatgaagcgccatggctcgaggtcggtgccggttgagggccttctggagatcctgcgcgcctacacggagaagcatctcacgcacatgagaaagctggccaagaagcggcgggttcggatgcgtacgccgccagagactgacgcgctcaacgttctgctggacgcgttctgcaagtgtgggatggtcaaggaagcagaggcagtgtttggccgcgtgaagaggaagttgctgggtaatgcagagacgtacagtaccctgttcttcgggtggtgccgggcgagggaccccaagaaggccatgaaggtgctcgaggaaatgattcagatgaagcacaccccagagagtttcacctacgttgcagccatcgaatcattttgcagcgctggattggtgtcagaggcaagggaactgtttgagttcatgaggactgaggggttgacggtgtcatcgcccacagccaaaacatattcgattatgattgttgcattagcaaaggctgaccggatggaggagtgttttgaactgctttcagacatgagaacttgtggttgtatgcctgacgtgacgacttataaagatttgattgaagggatgtgcttggtgggtagactggatgctgcttatcgtgtgttggacgagatggggagggctggatttcctcctgacattgtcacgtataattgctttcttaatgtgctttgtagtcttcgaaatgctgatgatgcacttgaactctgtgagaggatgatagaggcacactgtgagcccagtgttcatacctataatatgctgatgatgatgttcttcgagatgggagaggcacatagagcattagatatatggcttgagatggacaaaagaggatgtcaacgtgctatcgatacctacgagataatgatctatggtctctttgattgtggagaaacagaatatgcaactgctcttctagatgaggttataaaccgtgacatgaaactttcatacaagaagtttgatgctataatgctgaggttatcagctgtaggcaaccttggtgcgatacatcggttgtcagagcatatgaggaaattttacaatgttgcgatgtcgagacgatttgcaatcactcagaagaagaagagcataggcctgagaaggaaatgagtgccgtggctattgctgctgttgtttcttgttagttgttactgaggatattcaggagcttattcaaaggtagttaatgtatgccagcacgtattgttggaacagattacagtggaagaagcactgcattttttttaatgtaaaaaataggagtgttgcataaccccattcatttgttgaattgaaccggtgctgtgaatatcattgcatttgcattgtagaagaaacatgtacaaggtgacggctactggttttcaacaaacacatatcggggcatcgggtgaagccgccaaacgcatatgagcagcgttggcttt

SEQ ID NO: 51558 - DNA, 3676 bp, Zea Mays
gccatccctactccaccccaacctaagcagtaggcagtaggcatcaagcgtcttgcgtggctgcgtccaagtccaagcgccatccggccaccagcgcaggtaccgagccaccgaggtaggagccggccaccgggcagatcccaggctgccagccaccggcgtccagcactccggctgctagctaccggccacccgcagcgcaggccacaccaacgggcagcaaccgcatggtgccatagctgtcgacgaacaccagcaaccagacggccagatcccagtaattcgatttattatatcttcgtcgaggatagtgacacgtcacgtcagtgtccggccatcgcttgagagagtccaacccaaggatggttcaggctacggaagggcaatgcactgcttcttagactattgaagaatttataggatgatagcgtgggcagtaaatgcaaagaaaaaaacacagttgcagaaattgctagcaatagactatacaagatagagccaaattgagcaaaaaaaaagaccattcccatttggatcaccattccctaaccacagcaaaatgaagttggaaaattgagtagttgagtgccgtgtatgcacatgagcagggctaatactttataagaaatgtgctggttcttgatactcctccaaccagttgtagaagaattctggtttggctgaagtagttttacatccgaaagatggactttgtacagatatattctctgtcaacaatatgtatatccaggcggagatgaacttggagggaagcagatttacagtttggtgatattatatattatcaattgcagtttattaatgttgcgcttcttctctattatcaaactattcacacaagacttcatgtgtgcgtgtgtgaaagattttattagtgtaaggtctttagggacagttcacattgaagttctggtgcctacataaattgtaaaccatacatgttgacatgggtacacatctcatggctatatacaactttgacatgaggtttatcttaagattgtgtgttccaataaaagctattactatttcttgcatgtgcatgtctttaggatatccatttttctttatagatttatttatttacatcgcttactgcttactagcctattttttctagcaatttctgcaagtcggcccatcgcgttgaactaaaccatctctaatttcctacaacttcaactccaacaacagaggtaccacaatggacttcttaagaagaataggaaccgtgtacataagcttttttgctctaacaaaataagagtggttgttgcaacaatggcattcagaatgggtcttgataagagtgacgttgaacgggtggttgattgtatcttgccagaaagcgtagaagaatacatacatgaaactggccgtgctgattcaacaacattctataaaagtcgaagtcttttgcacaaatgaatcttatcttcttgtcctttttttcttgtaatttacatttccaacctgctctaagtttcctacataatgacttcaataaaccctttttacagtgaagttcacgaatatgctatgagaaaattctttgccagatattttcttgtgaaaattcagttggatgcatttgctccttggttaaagagtcgacttcagacaagttagatataaaagaggaggcggagctgcgatgccaccaggtggagccgtgcctgctcgctcaggcgtcatgacggagccgaacgcgaggagccgagtgttttatccccgccgaagcccatccccatttgataccagcgagcgcagacatcgccggggacgccatcatcctcggctgcctccaagaccggcccaccgttctgcctgcactcccactcccaaaccccatgatgaacctccctttccggctccgccatctccgacgccttctcgctgccccgcccttaccaaccctcgccgccacacactcccatagcccaccctccttccgaccgctgcaccccacccgaatccagccgctgcggttccatctacccaaccccccagtgcggcggctctcctccgagcacgcaatcctccccacccacctccaggacgagcgcttcgccacgctctcggataggatctatgatgccgtgattaagacggggacggaatccaacgagggcaccgaggccgcgctcgacgcgttgggcgctgagctgactacccctctcgtcgccgacgtgctgcaccgcctccgctacgaggagaagctggcgttccggttcttcgcctgggcgtcccaacaggacggatacagccacgaaccgacgacttacaacgacatcatcgacattctctccggcacgcggtacaagagccgccagttcggtgtcctctgcaacgtgctcgatcacatgaagcgccatggctcgaggtcggtgccggttgagggccttctggagatcctgcgcgcctacacggagaagcatctcacgcacatgagaaagctggccaagaagcggcgggttcggatgcgtacgccgccagagactgacgcgctcaacgttctgctggacgcgttctgcaagtgtgggatggtcaaggaagcagaggcagtgtttggccgcgtgaagaggaagttgctgggtaatgcagagacgtacagtaccctgttcttcgggtggtgccgggcgagggaccccaagaaggccatgaaggtgctcgaggaaatgattcagatgaagcacaccccagagagtttcacctacgttgcagccatcgaatcattttgcagcgctggattggtgtcagaggcaagggaactgtttgagttcatgaggactgaggggttgacggtgtcatcgcccacagccaaaacatattcgattatgattgttgcattagcaaaggctgaccggatggaggagtgttttgaactgctttcagacatgagaacttgtggttgtatgcctgacgtgacgacttataaagatttgattgaagggatgtgcttggtgggtagactggatgctgcttatcgtgtgttggacgagatggggagggctggatttcctcctgacattgtcacgtataattgctttcttaatgtgctttgtagtcttcgaaatgctgatgatgcacttgaactctgtgagaggatgatagaggcacactgtgagcccagtgttcatacctataatatgctgatgatgatgttcttcgagatgggagaggcacatagagcattagatatatggcttgagatggacaaaagaggatgtcaacgtgctatcgatacctacgagataatgatctatggtctctttgattgtggagaaacagaatatgcaactgctcttctagatgaggttataaaccgtgacatgaaactttcatacaagaagtttgatgctataatgctgaggttatcagctgtaggcaaccttggtgcgatacatcggttgtcagagcatatgaggaaattttacaatgttgcgatgtcgagacgatttgcaatcactcagaagaagaagagcataggcctgagaaggaaatgagtgccgtggctattgctgctgttgtttcttgttagttgttactgaggatattcaggagcttattcaaaggtgacggctactggttttcaacaaacacatatcggggcatcgggtgaagccgccaaacgcatatgagcagcgttggcttt

SEQ ID NO: 51559 - DNA, 3802 bp, Zea Mays
gccatccctactccaccccaacctaagcagtaggcagtaggcatcaagcgtcttgcgtggctgcgtccaagtccaagcgccatccggccaccagcgcaggtaccgagccaccgaggtaggagccggccaccgggcagatcccaggctgccagccaccggcgtccagcactccggctgctagctaccggccacccgcagcgcaggccacaccaacgggcagcaaccgcatggtgccatagctgtcgacgaacaccagcaaccagacggccagatcccagtaattcgatttattatatcttcgtcgaggatagtgacacgtcacgtcagtgtccggccatcgcttgagaggcacgaatgtcttcgctgcgccgtcacgatccagactcgcatccccttctgacgcgcacccattgcgggcagacgtttgggctttgtgtggatggatcatggacgtacataccacatttgttttttaactaaatcttcacttctttgaatcgcagagtccaacccaaggatggttcaggctacggaagggcaatgcactgcttcttagactattgaagaatttataggatgatgtgcaggagcagagcgtgggcagtaaatgcaaagaaaaaaacacagttgcagaaattgctagcaatagactatacaagatagagccaaattgagcaaaaaaaaagaccattcccatttggatcaccattccctaaccacagcaaaatgaagttggaaaattgagtagttgagtgccgtgtatgcacatgagcaggtagtcatgttcccttatttcatatcctttggatctactcatattatatgaaagcaaacctgaaactgaagtcataaatctattgtatttttcttttagcatttattatgactatctgtatttatcacgcagggctaatactttataagaaatgtgctggttcttgatactcctccaaccagttgtagaagaattctggtttggctgaagtagttttacatccgaaagatggactttgtacagatatattctctgtcaacaatatgtatatccaggcggagatgaacttggagggaagcagatttacagtttggtgatattatatattatcaattgcagtttattaatgttgcgcttcttctctattatcaaactattcacacaagacttcatgtgtgcgtgtgtgaaagattttattagtgtaaggtctttagggacagttcacattgaagttctggtgcctacataaattgtaaaccatacatgttgacatgggtacacatctcatggctatatacaactttgacatgaggtttatcttaagattgtgtgttccaataaaagctattactatttcttgcatgtgcatgtctttaggatatccatttttctttatagatttatttatttacatcgcttactgcttactagcctattttttctagcaatttctgcaagtcggcccatcgcgttgaactaaaccatctctaatttcctacaacttcaactccaacaacagaggtaccacaatggacttcttaagaagaataggaaccgtgtacataagcttttttgctctaacaaaataagagtggttgttgcaacaatggcattcagaatgggtcttgataagagtgacgttgaacgggtggttgattgtatcttgccagaaagcgtagaagaatacatacattgaagttcacgaatatgctatgagaaaattctttgccagatattttcttgtgaaaattcagttggatgcatttgctccttggttaaagagtcgacttcagacaagttagatataaaagaggaggtggagccgtgcctgctcgctcaggcgtcatgacggagccgaacgcgaggagccgagtgttttatccccgccgaagcccatccccatttgataccagcgagcgcagacatcgccggggacgccatcatcctcggctgcctccaagaccggcccaccgttctgcctgcactcccactcccaaaccccatgatgaacctccctttccggctccgccatctccgacgccttctcgctgccccgcccttaccaaccctcgccgccacacactcccatagcccaccctccttccgaccgctgcaccccacccgaatccagccgctgcggttccatctacccaaccccccagtgcggcggctctcctccgagcacgcaatcctccccacccacctccaggacgagcgcttcgccacgctctcggataggatctatgatgccgtgattaagacggggacggaatccaacgagggcaccgaggccgcgctcgacgcgttgggcgctgagctgactacccctctcgtcgccgacgtgctgcaccgcctccgctacgaggagaagctggcgttccggttcttcgcctgggcgtcccaacaggacggatacagccacgaaccgacgacttacaacgacatcatcgacattctctccggcacgcggtacaagagccgccagttcggtgtcctctgcaacgtgctcgatcacatgaagcgccatggctcgaggtcggtgccggttgagggccttctggagatcctgcgcgcctacacggagaagcatctcacgcacatgagaaagctggccaagaagcggcgggttcggatgcgtacgccgccagagactgacgcgctcaacgttctgctggacgcgttctgcaagtgtgggatggtcaaggaagcagaggcagtgtttggccgcgtgaagaggaagttgctgggtaatgcagagacgtacagtaccctgttcttcgggtggtgccgggcgagggaccccaagaaggccatgaaggtgctcgaggaaatgattcagatgaagcacaccccagagagtttcacctacgttgcagccatcgaatcattttgcagcgctggattggtgtcagaggcaagggaactgtttgagttcatgaggactgaggggttgacggtgtcatcgcccacagccaaaacatattcgattatgattgttgcattagcaaaggctgaccggatggaggagtgttttgaactgctttcagacatgagaacttgtggttgtatgcctgacgtgacgacttataaagatttgattgaagggatgtgcttggtgggtagactggatgctgcttatcgtgtgttggacgagatggggagggctggatttcctcctgacattgtcacgtataattgctttcttaatgtgctttgtagtcttcgaaatgctgatgatgcacttgaactctgtgagaggatgatagaggcacactgtgagcccagtgttcatacctataatatgctgatgatgatgttcttcgagatgggagaggcacatagagcattagatatatggcttgagatggacaaaagaggatgtcaacgtgctatcgatacctacgagataatgatctatggtctctttgattgtggagaaacagaatatgcaactgctcttctagatgaggttataaaccgtgacatgaaactttcatacaagaagtttgatgctataatgctgaggttatcagctgtaggcaaccttggtgcgatacatcggttgtcagagcatatgaggaaattttacaatgttgcgatgtcgagacgatttgcaatcactcagaagaagaagagcataggcctgagaaggaaatgagtgccgtggctattgctgctgttgtttcttgttagttgttactgaggatattcaggagcttattcaaaggtgacggctactggttttcaacaaacacatatcggggcatcgggtgaagccgccaaacgcatatgagcagcgttggcttt

SEQ ID NO: 51560 - DNA, 3766 bp, Zea Mays
gccatccctactccaccccaacctaagcagtaggcagtaggcatcaagcgtcttgcgtggctgcgtccaagtccaagcgccatccggccaccagcgcaggtaccgagccaccgaggtaggagccggccaccgggcagatcccaggctgccagccaccggcgtccagcactccggctgctagctaccggccacccgcagcgcaggccacaccaacgggcagcaaccgcatggtgccatagctgtcgacgaacaccagcaaccagacggccagatcccagtaattcgatttattatatcttcgtcgaggatagtgacacgtcacgtcagtgtccggccatcgcttgagaggcacgaatgtcttcgctgcgccgtcacgatccagactcgcatccccttctgacgcgcacccattgcgggcagacgtttgggctttgtgtggatggatcatggacgtacataccacatttgttttttaactaaatcttcacttctttgaatcgcagagtccaacccaaggatggttcaggctacggaagggcaatgcactgcttcttagactattgaagaatttataggatgatgtgcaggagcaggcagctactatgcaattttctatttattgtactcttgccacgaactgctcgtaattctctttcagtttgttgcagagcgtgggcagtaaatgcaaagaaaaaaacacagttgcagaaattgctagcaatagactatacaagatagagccaaattgagcaaaaaaaaagaccattcccatttggatcaccattccctaaccacagcaaaatgaagttggaaaattgagtagttgagtgccgtgtatgcacatgagcagggctaatactttataagaaatgtgctggttcttgatactcctccaaccagttgtagaagaattctggtttggctgaagtagttttacatccgaaagatggactttgtacagatatattctctgtcaacaatatgtatatccaggcggagatgaacttggagggaagcagatttacagtttggtgatattatatattatcaattgcagtttattaatgttgcgcttcttctctattatcaaactattcacacaagacttcatgtgtgcgtgtgtgaaagattttattagtgtaaggtctttagggacagttcacattgaagttctggtgcctacataaattgtaaaccatacatgttgacatgggtacacatctcatggctatatacaactttgacatgaggtttatcttaagattgtgtgttccaataaaagctattactatttcttgcatgtgcatgtctttaggatatccatttttctttatagatttatttatttacatcgcttactgcttactagcctattttttctagcaatttctgcaagtcggcccatcgcgttgaactaaaccatctctaatttcctacaacttcaactccaacaacagaggtaccacaatggacttcttaagaagaataggaaccgtgtacataagcttttttgctctaacaaaataagagtggttgttgcaacaatggcattcagaatgggtcttgataagagtgacgttgaacgggtggttgattgtatcttgccagaaagcgtagaagaatacatacattgaagttcacgaatatgctatgagaaaattctttgccagatattttcttgtgaaaattcagttggatgcatttgctccttggttaaagagtcgacttcagacaagttagatataaaagaggaggcggagctgcgatgccaccaggtggagccgtgcctgctcgctcaggcgtcatgacggagccgaacgcgaggagccgagtgttttatccccgccgaagcccatccccatttgataccagcgagcgcagacatcgccggggacgccatcatcctcggctgcctccaagaccggcccaccgttctgcctgcactcccactcccaaaccccatgatgaacctccctttccggctccgccatctccgacgccttctcgctgccccgcccttaccaaccctcgccgccacacactcccatagcccaccctccttccgaccgctgcaccccacccgaatccagccgctgcggttccatctacccaaccccccagtgcggcggctctcctccgagcacgcaatcctccccacccacctccaggacgagcgcttcgccacgctctcggataggatctatgatgccgtgattaagacggggacggaatccaacgagggcaccgaggccgcgctcgacgcgttgggcgctgagctgactacccctctcgtcgccgacgtgctgcaccgcctccgctacgaggagaagctggcgttccggttcttcgcctgggcgtcccaacaggacggatacagccacgaaccgacgacttacaacgacatcatcgacattctctccggcacgcggtacaagagccgccagttcggtgtcctctgcaacgtgctcgatcacatgaagcgccatggctcgaggtcggtgccggttgagggccttctggagatcctgcgcgcctacacggagaagcatctcacgcacatgagaaagctggccaagaagcggcgggttcggatgcgtacgccgccagagactgacgcgctcaacgttctgctggacgcgttctgcaagtgtgggatggtcaaggaagcagaggcagtgtttggccgcgtgaagaggaagttgctgggtaatgcagagacgtacagtaccctgttcttcgggtggtgccgggcgagggaccccaagaaggccatgaaggtgctcgaggaaatgattcagatgaagcacaccccagagagtttcacctacgttgcagccatcgaatcattttgcagcgctggattggtgtcagaggcaagggaactgtttgagttcatgaggactgaggggttgacggtgtcatcgcccacagccaaaacatattcgattatgattgttgcattagcaaaggctgaccggatggaggagtgttttgaactgctttcagacatgagaacttgtggttgtatgcctgacgtgacgacttataaagatttgattgaagggatgtgcttggtgggtagactggatgctgcttatcgtgtgttggacgagatggggagggctggatttcctcctgacattgtcacgtataattgctttcttaatgtgctttgtagtcttcgaaatgctgatgatgcacttgaactctgtgagaggatgatagaggcacactgtgagcccagtgttcatacctataatatgctgatgatgatgttcttcgagatgggagaggcacatagagcattagatatatggcttgagatggacaaaagaggatgtcaacgtgctatcgatacctacgagataatgatctatggtctctttgattgtggagaaacagaatatgcaactgctcttctagatgaggttataaaccgtgacatgaaactttcatacaagaagtttgatgctataatgctgaggttatcagctgtaggcaaccttggtgcgatacatcggttgtcagagcatatgaggaaattttacaatgttgcgatgtcgagacgatttgcaatcactcagaagaagaagagcataggcctgagaaggaaatgagtgccgtggctattgctgctgttgtttcttgttagttgttactgaggatattcaggagcttattcaaaggtgacggctactggttttcaacaaacacatatcggggcatcgggtgaagccgccaaacgcatatgagcagcgttggcttt

SEQ ID NO: 51561 - DNA, 2845 bp, Zea Mays
cccagcagtccgcctctccctcgctctcagatctaatcattatttaatccattttttcccagtctcacatgagcacgcctcactcgtcctccacctcctccgtcccccaccgcgcctccgctccccagatcccccaatccctaaccctagcgccacccacggcgtgctccgcctcgccttcctcctccttctcctcctcctccgcgtccggcatgcgggacgcgggggaggacgacgactccgactccccgccgtcgcagatgtcggaggacgaccccggcgccggcgccggcgacaggtgggagccggatctgaggggcgggggcggcaggcgggcgccgccggaccaggtgctggggaacgtgctcgagaccgtgctccagttcctcaccgccgcgcgcgaccgcaacgccgcctcgctcgtctgccgctcctggtaccaggccgaggcgcagacgcgccgcgagctcttcatcggcaactgctacgccgtctcgccgcgccgcgccgtcgagcgcttcggcggcctgcgcgccgtcgtgctcaagggcaagccccgcttcgccgacttcagcctcgtgccctacggctggggcgcctacgtctccccctgggtggccgcgctcggccccgcctacccttgcctcgagcgcatctgcctcaagcggatgaccgtctccgacgacgacctcgcgctcgtcgccacctccttcccctgcttcagggacctctccctcgtgtgctgcgacggcttcagcacgctcgggctcgccgtcgtcgccgagcgctgccggcatcttcgtgtgctggatctgattgaagactacgtcgaggatgatgaggacgagctggtggattggatctccaagttcccagagtgcaacacctctctggagtcgcttgtcttcgactgtgtcagcgtcccgttcaactttgaggccctggaggcacttgtcgcacgctcaccggctctgcgccagttgcgtgtgaaccaccatgtgtcagtagagcagctgcgccgtctcatggcaagagcaccccagctcacgcactttggaaccggtgcattccgatctgagggcgcccctggtgggggtttggctgtgactgagcttgctacatcttttgctgcatccaggtctctcatttgtctatcaggtttccgggaggtcgatccagaatacctcccagcgatctaccctgtctgtgccaagctcacgtcactaaacttcagctttgcaagcctaaccgctgcggaactcaagccagttattcgcaactgcaccaatcttcgcactttttgggtccttgatactgttggcgatgaaggcctacgtgctgtggctgatgcatgctctgatctccgtgagctgagagtttttcctttggatgcctctgaggattctgagggttcggtctcagatgtcggtcttgaggcaatctcaaaaggctgccggaagctagaatcaatcctctacttttgccagcggatgacaaatgcagcagtaattgatatgtcgaagaactgtcccgagcttgtagtgttccgcctctgcattatgggccgccaccgccctgaccgggtcaccggggagcccatggacgaaggttttggcgcaattgtgatgaactgcaagaaactcaccaggctttcggtctctggcctgcttaccgataaagcctttgcgcacattggaaaacatgggaagctaataaagaccctctccgtcgccttcgccgggaacagtgacatgtccctccagtatgtattcgaggggtgcaccaagttgcagaagcttgaggtcagagacagccctttcagtgacagggggctgctctccggactggactacttctacaacatgaggttcctatggatgaactcatgcaggctgacgatgaggggctgtagagatgtagctcggcagatgcaaaatctggtggtcgaagtaattaaggaccactccgaagatgaaggggagggggagaccgttgacaagctgtacttgtatcggtcgctggcaggaccgagggatgatgctccgccatttgttaccctcttgtagcactggtatttgaaggacagccccgcaccgtactgacggacatgtttgttaggtcattccttaccatcaagttgccatggccagcgagggaaagcgtagcgtcccgtgggtgatattcacaagttgctgcaggagcgctcgtgtaaaatcaagtaaagaacctgccgattattccttggaacttgatctggcatgggggcggcatccagagttggggcagttgaggagcacatccagacctagtatagcagtgatgggtagtaactgattgcacaggaactgactgcacactgactccagtcagcaggctccggatggttctttggcagtggcacccaagtctccagttatttactttgccatcttccgttccattttttcagctcagaccaaggaatggcggcggcgctgggtcctggaggggtcgtcatggctgatgctgaggaaggtacacactgatagtggtggtcggagttccatcgcatcgctgcatgctgacatgctgttgtacgccctgttgagagcgccaccatcttccgtccgcgtgctgaccactgacgtcgcgctccgaaagcaaaccccaaccagtcgccgcgactagttaaacaaggatgtgttgtctcttttaccacggaggaatggcgagcatgtggtctgtttcctcggggccactgcgcctcgcagttttctgcagagatcctgttcgatctgcccggtttctttataccatcaggccttgttcggttacatctacccggaatcgttccggctaatcaaag

SEQ ID NO: 51562 - DNA, 3091 bp, Zea Mays
cccagcagtccgcctctccctcgctctcagatctaatcattatttaatccattttttcccagtctcacatgagcacgcctcactcgtcctccacctcctccgtcccccaccgcgcctccgctccccagatcccccaatccctaaccctagcgccacccacggcgtgctccgcctcgccttcctcctccttctcctcctcctccgcgtccggcatgcgggacgcgggggaggacgacgactccgactccccgccgtcgcagatgtcggaggacgaccccggcgccggcgccggcgacaggtgggagccggatctgaggggcgggggcggcaggcgggcgccgccggaccaggtgctggggaacgtgctcgagaccgtgctccagttcctcaccgccgcgcgcgaccgcaacgccgcctcgctcgtctgccgctcctggtaccaggccgaggcgcagacgcgccgcgagctcttcatcggcaactgctacgccgtctcgccgcgccgcgccgtcgagcgcttcggcggcctgcgcgccgtcgtgctcaagggcaagccccgcttcgccgacttcagcctcgtgccctacggctggggcgcctacgtctccccctgggtggccgcgctcggccccgcctacccttgcctcgagcgcatctgcctcaagcggatgaccgtctccgacgacgacctcgcgctcgtcgccacctccttcccctgcttcagggacctctccctcgtgtgctgcgacggcttcagcacgctcgggctcgccgtcgtcgccgagcgctgccggcatcttcgtgtgctggatctgattgaagactacgtcgaggatgatgaggacgagctggtggattggatctccaagttcccagagtgcaacacctctctggagtcgcttgtcttcgactgtgtcagcgtcccgttcaactttgaggccctggaggcacttgtcgcacgctcaccggctctgcgccagttgcgtgtgaaccaccatgtgtcagtagagcagctgcgccgtctcatggcaagagcaccccagctcacgcactttggaaccggtgcattccgatctgagggcgcccctggtgggggtttggctgtgactgagcttgctacatcttttgctgcatccaggtctctcatttgtctatcaggtttccgggaggtcgatccagaatacctcccagcgatctaccctgtctgtgccaagctcacgtcactaaacttcagctttgcaagcctaaccgctgcggaactcaagccagttattcgcaactgcaccaatcttcgcactttttgggtccttgatactgttggcgatgaaggcctacgtgctgtggctgatgcatgctctgatctccgtgagctgagagtttttcctttggatgcctctgaggattctgagggttcggtctcagatgtcggtcttgaggcaatctcaaaaggctgccggaagctagaatcaatcctctacttttgccagcggatgacaaatgcagcagtaattgatatgtcgaagaactgtcccgagcttgtagtgttccgcctctgcattatgggccgccaccgccctgaccgggtcaccggggagcccatggacgaaggttttggcgcaattgtgatgaactgcaagaaactcaccaggctttcggtctctggcctgcttaccgataaagcctttgcgcacattggaaaacatgggaagctaataaagaccctctccgtcgccttcgccgggaacagtgacatgtccctccagtatgtattcgaggggtgcaccaagttgcagaagcttgaggtcagagacagccctttcagtgacagggggctgctctccggactggactacttctacaacatgaggttcctatggatgaactcatgcaggctgacgatgaggggctgtagagatgtagctcggcagatgcaaaatctggtggtcgaagtaattaaggaccactccgaagatgaaggggagggggagaccgttgacaagctgtacttgtatcggtcgctggcaggaccgagggatgatgctccgccatttgttaccctcttgtagcactggtatttgaaggacagccccgcaccgtactgacggacatgtttgttaggtcattccttaccatcaagttgccatggccagcgagggaaagcgtagcgtcccgtgggtgatattcacaagttgctgcaggagcgctcgtgtaaaatcaagtaaagaacctgccgattattccttggaacttgatctggcatgggggcggcatccagagttggggcagttgaggagcacatccagacctagtatagcagtgatgggtagtaactgattgcacaggaactgactgcacactgactccagtcagcaggctccggatggttctttggcagtggcacccaagtctccagttatttactttgccatcttccgttccattttttcagctcagaccaaggaatggcggcggcgctggtgcgtgctgcctatgcccggaagcttcaatggctcaaccggccattaattatgagttgtagtggatccaaaactcaattccgctatttttctccccctcccattgtttttagcactccagagttatttttgtagacctgtagtgtagaccaccaccactacccctttcctccgtcccacgccctctgctattttatatcaagaagctactggaggagacctgggaattcgatcggcatttgcttgggtcctggaggggtcgtcatggctgatgctgaggaaggtacacactgatagtggtggtcggagttccatcgcatcgctgcatgctgacatgctgttgtacgccctgttgagagcgccaccatcttccgtccgcgtgctgaccactgacgtcgcgctccgaaagcaaaccccaaccagtcgccgcgactagttaaacaaggatgtgttgtctcttttaccacggaggaatggcgagcatgtggtctgtttcctcggggccactgcgcctcgcagttttctgcagagatcctgttcgatctgcccggtttctttataccatcaggccttgttcggttacatctacccggaatcgttccggctaatcaaag

SEQ ID NO: 51563 - DNA, 1004 bp, Zea Mays
gagcaggactgcaggagcaccaggagccttggaggtgcactccaccagtaggagtacttcctcaagtcctcatcccccattcctcctcgcggctcatagaaacctcaaaacccaaccaggacagcgtccacagaaagaagaaagagcacagagagtggagtagtggacagaccatggagctctgcgtctctacacccccatcctccgtccgcgccaccgccgcgcccatatccttcgccccgccccgacgtggcgcgtctgcctccaccgccgttccgccccaccgccgcatcccaactcgagtctggcgctgcgccagcgcggccgtgcctggcccggtgccctccgaagagccggcatccgcctcctacgccgtcgtcgtcacggacaagcccgatacgcctgccgacgacaaggccgaggagttgaacattgaagtgactccgactttaatcctcactggatttggtgcttttattgctttatggatcctatcttctgttgttgctgcagttgattcagtccccctgctcccaaaattgctggaattaataggaactgcttacacaatttggttcatcgcacggtatctccttttcaaggaaagcagagatgaactgtttgcaaagttcgaagatctcaaacagaggattatttgatctatcgtcgaccttttgccacgtgtttaggctttacagccagcttattattaggttttctccctttcgtttgaaatatttctgaatgggtaaagaaggtcatgtatctaaattgtctcctcatggggtctgttaattgttatcagaccccaagttcggctagtgcgcttcttcaggtcaatatggattttttttttactcaatcctatgtgtatactgtcgagtaaagctttaaaaaggtgaatacggttagtatcttacttcttcccactcctatgcaagtttcggactcctatttgctactgtccagtaaacacttcatatgcctgtttggctgagctgcag

SEQ ID NO: 51564 - DNA, 984 bp, Zea Mays
ctcaaaacccaaccaggacagcgtccacagaaagaagaaagagcacagagagtggagtagtggacagaccatggagctctgcgtctctacacccccatcctccgtccgcgccaccgccgcgcccatatccttcgccccgccccgacgtggcgcgtctgcctccaccgccgttccgccccaccgccgcatcccaactcgagtctggcgctgcgccagcgcggccgtgcctggcccggtgccctccgaagagccggcatccgcctcctacgccgtcgtcgtcacggacaagcccgatacgcctgccgacgacaaggccgaggaggttagcgccgcgcctagtggctccgcggaggcgcctatggcagagctggtgccgtcagaggcgtcatcatccccagatgatggcggcctggatgagattctaagcaagttgaacattgaagtgactccgactttaatcctcactggatttggtgcttttattgctttatggatcctatcttctgttgttgctgcagttgattcagtccccctggaactgcttacacaatttggttcatcgcacggtatctccttttcaaggaaagcagagatgaactgtttgcaaagttcgaagatctcaaacagaggattatttgatctatcgtcgaccttttgccacgtgtttaggctttacagccagcttattattaggttttctccctttcgtttgaaatatttctgaatgggtaaagaaggtcatgtatctaaattgtctcctcatggggtctgttaattgttatcagaccccaagttcggctagtgcgcttcttcaggtcaatatggattttttttttactcaatcctatgtgtatactgtcgagtaaagctttaaaaaggtgaatacggttagtatcttacttcttcccactcctatgcaagtttcggactcctatttgctactgtccagtaaacacttcatatgcctgtttggctgagctgcag

SEQ ID NO: 51565 - DNA, 425 bp, Zea Mays
ctccaacgcgccctgctcctcctccaagtctggccccgccttcccctcctccctctcacttcttcggcaccacccacctctccaccgcgccttactcctccttcaactccgcccccctctgtcgtgcttcttcagcgccacgcaccaacaaaacaagcaacaggacaactagatttatatactctccatagtagctccttttgacaagaaagaaagcaacagaagtgtcgttcatacatgtaaaaagattaatttgcagcagcaaattataattccacaggtctgaattgtgtgtatatacatacatgtgaaaaaattaatttgcaaggacagcacctttttgggttgaaacgcgtggaataatagcactgatccttagagacttcatccaacgagggggtgagggcagcagtggcacatagaag

SEQ ID NO: 51566 - DNA, 534 bp, Zea Mays
ctccaacgcgccctgctcctcctccaagtctggccccgccttcccctcctccctctcacttcttcggcaccacccacctctccaccgcgccttactcctccttcaactccgcccccctctgtcgtgcttcttcagcgccacgcaccaacaaaacaagcaacaggacaactagatttatatactctccatagtagctccttttgacaagaaagaaagcaacagaagtgtcgttcatacatgtaaaaagattaatttgcagcagcaaattataattccacaggtctgaattgtgtgtatatacatacatgtgaaaaaattaatttgcaaggacagcacctttttgggttgaaacgcgtggaataatagcactgatccttagagacttcatccaacgaggattacagctgcaacattcctaatggttttaacccaccggcagcgaacagccatggaagcttgtcagaacctctgtcgccagctgcaagcctgcaattgccacgaagcaccacagcaccagggccaaaaacgtcttta

SEQ ID NO: 51567 - DNA, 4441 bp, Zea Mays
ccactccccgtacactccatcgcgctcgacgctcccgtcgctgtcggccaccgcgctgcgctgcgctgctcgcagagttcgtcccgacgctcgtccgaagaaattcaaatccggggcgctcgcgtcactcccagcgacaaatccgcgcgtagattcggctcccaattggaacccgcatgcgctggccatgttcacggaggggctagatcgcgacgccctcaagtgggtgcgagagggccagggagcggcggcgctgcatagccacgaccggatggacgcgctgcgtgccgtgcgcggagcggccggccgcggcgggcttggcatgccgacgccggagaagtttcggagcggccacatgccgcgcggcgcgacggtgccgctgtcacgctcctcgctgcgcagcgacgacggcaccgccgcctcgggatccgacatggacgagtcgtcggacaacgatgagatcgaggtctgcagcggcaggtactcggtcgactcgtcaccccgccgcgacgacgtgacccgacgaacggccgttcccctctaccgctacgccaccatgcctgggcagcagagctactactccactgatgatggctactcggacttgagctcttcgcgtgacacggcactgccaagagctaaggcacagccgttgggacggccgcaggcacgggtcgttgagtatgctgatgaggagtactccgtatctccaggcacctccgaattttctagccaggtggaagggcagagcaatggtgtgacctccaagggtgggtatgtatcagagtactcccatactggtccagcccgaagagaagcaaacaatttgggtcctaagaatcgtgcagcagctccagcgaggatgcgataccaacatgacagccattctgctcatgtccccgctcgagaggatgtgaaatcaacacgtaaattggttagttttctttgtttatttacaaagatttttcattcatctaccccactctttttctatgtgatagcaccatctaatgggtcatctggtgatattcctagtgcgccgccaataaatgattatgaccaggaccatcagccagtaactcatgatgatactcggtcttgtgataattcaaatttcaccaatggcttatctgccaaaaaagatcaccgggaagtcaatggaggagtaaacttagctgacaaaaatgacaggagcactttgaatgcaggaccaacaagcaagccatctagttcgattcctattcgagtcccaacctttcatgccagtctgcaggggccctggtattctgtacttgcttatgatgcttgcgtccgcctttgccttcatgcatgggctagaggctgtatggaagctcccgtttttctcgaaaatgaatgcacactcttgagaaatacattcagcttgcaaaatgtcttgttacaatcggaagaggagcttatgtcgaagcgtgcgtcagagctagttagtgaaggggctgcatcaaagcccaagaaaacaataggcaagatgaaggttcaagttcgcaaagttcggatgtctgtagatatgccttctggttgcaacttatcatcactgccaatggtgaaattggattctgtccggtaccgtttgtccaatgtacaatccacactttcatcaggatgggagtctgtacggagagttcgagttctaccacagcttcctgctaacagttcgttctcaaagcacagcttagcatacatgcaagcaagtgctcagtatatcaagcaggtgtctggcctattaaaggtcggtgtaactactctgcggagcagttcagcctatgaagcaccacaagaaacatactcctgccagttgaggcttaaaagttcacctgaagatgatgtggtacctatgcagccaggatctggtgaaacacatgtcttctttcctgatagcctcggagatgatttgatcatcgatgtgtctgattcaaagggaaagtcttgtggtcgtgttgttgcccaagttgctacaatggctgaggatcatgctgacaagctacgctggtggtcaatcttccgagaaccggagcatgaacttgtgggtcgtatacagctatatatccactatacaactgctgctgatgagaacaatatgaagtatggttctgttgcagaaactgtagcatatgatattgttttggaagttgcaatgaaagcacaacgcattcaacaaaggaaccttgttgtgcatggctcctggaagtggttattgacagaatttgcattgtattatggggtttcagatgcctacacgaggttgaggtacctgtcttatatcatggatgttgcaactcctaccgctgattggctcaatctggttcacgggcttttgttacctatactgatgaaaagcgatggtactgctactttgagccaccaagagaaccgaatactgggggaagttgaagagcaaattgagcaaactctagctatggtttgtgagaattacaagtcgctagatgactctataccgttgggtttggcggaagattttaggcctccaactggattggctgctgctgctctggaaccagctattaagttgtacagtcttctacacgacgtcctatctccggaagctcaactaagattgtgtggttacttccaggcagctgccaggaagcgtacgaggcgttacatgattgaaactgatgagtatgtatcaggaaattcagaaggcttcagggtagacttggtaaccgttaccacggcttaccagaagatgaaatcattatgcaacaatctacgaagtgaaatttttactgatattgaaatccataatcagcacatacttcccagttttgttgatctgccaaatttagctgcctccatctatagtgtagagctgtcaaatcgtctacgcgcttttcttgttgcttgccctcctgctggtccagcatcacctgttgctgatttggtggttgccacagctgattttcagaaggatctggctagctggaatatctgcaatataaaagcaggtgttgatgcaaaagagctgttccatttgtacattgtattgtggattgaagacaaacgcaggatgttactggaaaactgcagactggacaaggtcaaatggtcaggagttaggacccagcatatgacaacaccttttgtggatgagatgtatgatttgctgaagaagacattgacagagtatgaagttatcatttgtcgatggccagaatacatatttgttctcgagaatgctattgcagatgttgagaaagcggttatcgagtctctggaaaaacagtatgcagatgttttggctccactgaaggattgtattgcaccaaaaaaatttggcctcaaagttgtccagaaactcacaaagcgcaattcaacggtgccctacactgtacctgaagatcttggcattctcttgaatacattgaaaagattacttgaggttttgcgacctcggattgagagtcacttgaaatcatggagttcttgtatacctaatggaggaaattctgcggccattggagaaaaacttagtgaagttacagtgacattgagagctaaattccgaaattacatgcaagcagttgttgagaagctttcggagaatacccgtatgcaaaataccacaaagctcaaaaagatcattcaggattcaaaagagttggttattgaatctgatatccgcagcaggatgcaggccttgaaggatcagctaattgaggcaataaatcatgtgcacaaagtatctgaagtacatgtttttttagccatatgccgaggtttttgggaccggatgggacaggatgtgctgagtttcctggagaatcgcaaagaaaacaaagcctggtataaaggtgcacgagtcgcaatctcagtattggatgatacttttgcatcccagctgcaacagctgctaggtaatacagtcccaccgaaggacctagagccacccagatctatcgtggaagttcgttctattctctgcaaagatgcaccccgccagaagaattctagtttctattattgatgatcaggcttaactgtacatagtagtcatgcgctgcgcgtgcagcttttctcttggagagaaaagctccaaagtgcccaaatagccggatctttataaagaaactagaggaggctcaatggtatctgagaagcttgccttgtgttacaccatatctttttgctagttaaattggctatgttcccattgcctgtggatgtggactacattcggaaagtggattgtgcttcagagtgtagtccaattgacattgtaggttagcttcattggtaacacttacctgtggttaagcagttgctctatttgttcttagggatttttttgaaacaacaaaaaagaactttctggttactgatgttccagttcctgtattgtatagctagtgaggaaagaaaacaatggacgcttcatgttgcc

SEQ ID NO: 51568 - DNA, 4231 bp, Zea Mays
ccactccccgtacactccatcgcgctcgacgctcccgtcgctgtcggccaccgcgctgcgctgcgctgctcgcagagttcgtcccgacgctcgtccgaagaaattcaaatccggggcgctcgcgtcactcccagcgacaaatccgcgcgtagattcggctcccaattggaacccgcatgcgctggccatgttcacggaggggctagatcgcgacgccctcaagtgggtgcgagagggccagggagcggcggcgctgcatagccacgaccggatggacgcgctgcgtgccgtgcgcggagcggccggccgcggcgggcttggcatgccgacgccggagaagtttcggagcggccacatgccgcgcggcgcgacggtgccgctgtcacgctcctcgctgcgcagcgacgacggcaccgccgcctcgggatccgacatggacgagtcgtcggacaacgatgagatcgaggtctgcagcggcaggtactcggtcgactcgtcaccccgccgcgacgacgtgacccgacgaacggccgttcccctctaccgctacgccaccatgcctgggcagcagagctactactccactgatgatggctactcggacttgagctcttcgcgtgacacggcactgccaagagctaaggcacagccgttgggacggccgcaggcacgggtcgttgagtatgctgatgaggagtactccgtatctccaggcacctccgaattttctagccaggtggaagggcagagcaatggtgtgacctccaagggtgggtatgtatcagagtactcccatactggtccagcccgaagagaagcaaacaatttgggtcctaagaatcgtgcagcagctccagcgaggatgcgataccaacatgacagccattctgctcatgtccccgctcgagaggatgtgaaatcaacacgtaaattgaatgggtcatctggtgatattcctagtgcgccgccaataaatgattatgaccaggaccatcagccagtaactcatgatgatactcggtcttgtgataattcaaatttcaccaatggcttatctgccaaaaaagatcaccgggaagtcaatggaggagtaaacttagctgacaaaaatgacaggagcactttgaatgcaggaccaacaagcaagccatctagttcgattcctattcgagtcccaacctttcatgccagcttgcaaaatgtcttgttacaatcggaagaggagcttatgtcgaagcgtgcgtcagagctagttagtgaaggggctgcatcaaagcccaagaaaacaataggcaagatgaaggttcaagttcgcaaagttcggatgtctgtagatatgccttctggttgcaacttatcatcactgccaatggtgaaattggattctgtccggtaccgtttgtccaatgtacaatccacactttcatcaggatgggagtctgtacggagagttcgagttctaccacagcttcctgctaacagttcgttctcaaagcacagcttagcatacatgcaagcaagtgctcagtatatcaagcaggtgtctggcctattaaaggtcggtgtaactactctgcggagcagttcagcctatgaagcaccacaagaaacatactcctgccagttgaggcttaaaagttcacctgaagatgatgtggtacctatgcagccaggatctggtgaaacacatgtcttctttcctgatagcctcggagatgatttgatcatcgatgtgtctgattcaaagggaaagtcttgtggtcgtgttgttgcccaagttgctacaatggctgaggatcatgctgacaagctacgctggtggtcaatcttccgagaaccggagcatgaacttgtgggtcgtatacagctatatatccactatacaactgctgctgatgagaacaatatgaagtatggttctgttgcagaaactgtagcatatgatattgttttggaagttgcaatgaaagcacaacgcattcaacaaaggaaccttgttgtgcatggctcctggaagtggttattgacagaatttgcattgtattatggggtttcagatgcctacacgaggttgaggtacctgtcttatatcatggatgttgcaactcctaccgctgattggctcaatctggttcacgggcttttgttacctatactgatgaaaagcgatggtactgctactttgagccaccaagagaaccgaatactgggggaagttgaagagcaaattgagcaaactctagctatggtttgtgagaattacaagtcgctagatgactctataccgttgggtttggcggaagattttaggcctccaactggattggctgctgctgctctggaaccagctattaagttgtacagtcttctacacgacgtcctatctccggaagctcaactaagattgtgtggttacttccaggcagctgccaggaagcgtacgaggcgttacatgattgaaactgatgagtatgtatcaggaaattcagaaggcttcagggtagacttggtaaccgttaccacggcttaccagaagatgaaatcattatgcaacaatctacgaagtgaaatttttactgatattgaaatccataatcagcacatacttcccagttttgttgatctgccaaatttagctgcctccatctatagtgtagagctgtcaaatcgtctacgcgcttttcttgttgcttgccctcctgctggtccagcatcacctgttgctgatttggtggttgccacagctgattttcagaaggatctggctagctggaatatctgcaatataaaagcaggtgttgatgcaaaagagctgttccatttgtacattgtattgtggattgaagacaaacgcaggatgttactggaaaactgcagactggacaaggtcaaatggtcaggagttaggacccagcatatgacaacaccttttgtggatgagatgtatgatttgctgaagaagacattgacagagtatgaagttatcatttgtcgatggccagaatacatatttgttctcgagaatgctattgcagatgttgagaaagcggttatcgagtctctggaaaaacagtatgcagatgttttggctccactgaaggattgtattgcaccaaaaaaatttggcctcaaagttgtccagaaactcacaaagcgcaattcaacggtgccctacactgtacctgaagatcttggcattctcttgaatacattgaaaagattacttgaggttttgcgacctcggattgagagtcacttgaaatcatggagttcttgtatacctaatggaggaaattctgcggccattggagaaaaacttagtgaagttacagtgacattgagagctaaattccgaaattacatgcaagcagttgttgagaagctttcggagaatacccgtatgcaaaataccacaaagctcaaaaagatcattcaggattcaaaagagttggttattgaatctgatatccgcagcaggatgcaggccttgaaggatcagctaattgaggcaataaatcatgtgcacaaagtatctgaagtacatgtttttttagccatatgccgaggtttttgggaccggatgggacaggatgtgctgagtttcctggagaatcgcaaagaaaacaaagcctggtataaaggtgcacgagtcgcaatctcagtattggatgatacttttgcatcccagctgcaacagctgctaggtaatacagtcccaccgaaggacctagagccacccagatctatcgtggaagttcgttctattctctgcaaagatgcaccccgccagaagaattctagtttctattattgatgatcaggcttaactgtacatagtagtcatgcgctgcgcgtgcagcttttctcttggagagaaaagctccaaagtgcccaaatagccggatctttataaagaaactagaggaggctcaatggtatctgagaagcttgccttgtgttacaccatatctttttgctagttaaattggctatgttcccattgcctgtggatgtggactacattcggaaagtggattgtgcttcagagtgtagtccaattgacattgtaggttagcttcattggtaacacttacctgtggttaagcagttgctctatttgttcttagggatttttttgaaacaacaaaaaagaactttctggttactgatgttccagttcctgtattgtatagctagtgaggaaagaaaacaatggacgcttcatgttgcc

SEQ ID NO: 51569 - DNA, 343 bp, Zea Mays
cggttttgtatcgaactttttacactatgaatgagataattgacaagtacaacacgcattctaaaaacctggggaaaacagaacagccttcgctggacttgaacttagagcatagcaaatatgcaaatttgaatgagcaacttgcggaagcaagccttcgactcaggcagatgagaggtgaagagcttgagggattgaatgttgaagaactccagcaattggagaagaacctggaatctggtctgcatagggtgcttcaaacaaaggatcaacaattcttggaacagatcaatgacctcgaacgtaagtggagatccttttttttttgcaccggaactacaga

SEQ ID NO: 51570 - DNA, 714 bp, Zea Mays
atacattaataccgagtacgcagctggcagaggagaacatgcaactgaggaatcaagtatcccagatacccccagctggcaagcaagcagttgctgatactgaaaatgttattgctgaagaagggcaatcctctgaatcagtgatgactgcgttgcactctgggagttcacaggataatgatgatggttcggatgtatctctaaagttagggctgccttgcgttgcatggaagtaaacaggaaatgaggctccttgtcgattctgggtgtggatgtgggtggagctgcggcctcagcggataggcacttgtgtatggttttatggacgaccggcccccgactacgtactgcaataatcttgcattggaagcgagatcggttaacctgatttgtcatccttgtggcttcatgatgcgatgttccgcttgtaccgtttgctagcatgttaactgaatttttagaatcgcatatactttttgttcttatatatcactgtcgtactgctcgtaagatgtatctactttattctatccaatgttgtaacctatcacctgccaacttccctactgttttggcgcgccgcaagctgtgctcaagcatgcttcatgttatattcggaagttgtggtctgctctctgcatacatcctgaatgggcaccgttcaattttcagcaccgcatctttctctgaactttattctgagaaaaaataaca

SEQ ID NO: 51571 - DNA, 1033 bp, Zea Mays
atcttgtttaagcccaagcaaaacctcgccatagtgcggacggagagcccaggaactgaaagcctaatcgcaatcccactcgcagcaacgacctacgccgcccctaactccaatccagaaccccagagtccagaggcagaccggcaagctggacacctgcggcatggagcgggtggcgctgctccgcacctcaggccgccgcctcctacaccgctgccgcaggggcaggcccgtcgtcgtgcccgctgccgcggcctcatccttggcacgccgggcgtcctcgttctcactcccggcgcgcggctactcggctctgccccgcggcggcgcgcgattcctggtcgctgcggcgccgctgcactgctccggccggtactggccggccgctgcgccccagctcgcgcggaggctgtccgcctccgctgtatctacctcgccctctcccgtgccctatgatgacgtacatgagtatgccacaaagctcggatttgaaaaggtctctgaacagactatagatgagtgcaaatcaattgctgttctttacaagcacaagaagacgggtgctgaagtaatgtctgtgtcaaatgatgatgagaataaagtttttggcattgttttccgtacccctccgaaaaattcaactggcataccccacatccttgaacatagtgttctctgcggatcaagaaaatatcctttaaaagaaccgtttgtggagctcctaaagggtagtttgcatacattcctgaatgcgttcacatatcccgatcggacatgttatccggttgcatcaacaaacactaaggatttctacaacttggtagatgtatatcttgatgccgtctttttccctaaatgtgttgacgacttccaaacatttcaacaagaaggttggcactatgagcttgacaaccctgaagaagagataacatacaaaggtgtcgtcttcaatgagatgaaaggagtttactctcaacctgataacataatgggacgtgtatcccaacagctgaaatcaggtccagacctatag

SEQ ID NO: 51572 - DNA, 2037 bp, Zea Mays
cccgaacccgcgacttcctgagacgaggactcctttcccttctgtcatctgagactcggaagcctcggccgccgccgttaccacctccttgcgccatggcggagaagtcgccggcagccgacgtggaagccggtctccttgcccacctcaactcagcgggagaggtccccgactcacgctctttcgcttcctccctcggcgtctcccacctcgaacttgagggcgtcatcaagagcctctcagctttccgcatcgtcgacagcacagacatcatcaaggagacatgggtgctcaccgaggaggccaagggctacgccgccaagggctcccccgaggcacagctcgtcgccgcaatttcaccggagggtgcctctaaggacgcactcaaggcaatattgggagatgctttcgatgttggcatgaaggcagccgcgaggaacaagtggataggtttcgagaaggggaataaggacttagtccttaggaaggttgagagcgtaaaggatgagctgcaagagcagcttagaagactagagaatggggaggttgtttctgataaagtgatcgatgatttgaagagaaggaaacttattacgaaagagaaatcaatttggtactctctaaagaaggggtctgagtttgttgtaaagagaaaaacgttggctactgatgtgacaacagaacaccttaggagtggtgactggaaggaccttgaattcaaagactataattatggagctcaaggtcaacctatagccaaaggttatgttcagcctttgatggaggttcgtgaggcaatcgagaacatctttattatgatgggattcactgagatgccaaccaacaatttcgtcgaaagcagcttctggaatttcgatgcactgtttcagcctcaacagcatcctgctcgggattcacatgatacatttttcctgaaagctccagcaactacaaaacagttgcctgacgactatcttgagaaagtaaagcaagttcatcagtctggcggttatggctccaaaggatatggttatgattggaaacgggatgaagcggagaagaatcttctccgtactcatacaactgctgtttccacgagaatgttatacaagcttgctcaggagaaaccttttactccaaagaggtattactccattgatcgtgttttccgcaatgaagctgttgaccggactcatcttgctgaattccaccagatagagggacttatctgtgattatggtttgacacttggtgatctgattggtgtattggaggatttcttctcaagtctaggcatgtccaagctgcgtttcaagcctgcctacaatccatatactgaacccagcatggaaattttcagttaccatgatggtttgaagaaatgggtggaagttggtaattcaggcatgttcaggccagagatgttgcttcccatgggactgccagaaggtgttaatgttattgcatggggtctttcacttgaaaggccaacgatgatcctttatggtatcgacaacataagggacctgtttggaccaaaggttgatttcaacctcatcaagagcaacccactatgccgattgggactgtagtgactagtgaggtcctgaaatccctactaattctaaagctctggctaagctatggaatcagggggtcagcaatgacttttctactttattttggtgtgacaagtttttgggttgctgaatcaaaggatttgggggcaccaatggtgcttgctgctgtcccaatgaggcaaacaaagcgcagaacagtggcagaagcgatgcaaaatcaaagcttggacgaccatggacatacacggagggaggcctctcaatgatggttcgaatatttccagctctagaatgttgtacaagaggtcatcctgtgaaccgcccaagagacgtctaaatgacatctagtaatggtctatcgaaatggagatgttgtcttgtgaccgagcttgcatctccaagaaattccgataatcttatcccactttttaatttaggagaaaagtgaaaaaaaaac

SEQ ID NO: 51573 - DNA, 706 bp, Zea Mays
ctgagacgaggactcctttcccttctgtcatctgagactcggaagcctcggccgccgccgttaccacctccttgcgccatggcggagaagtcgccggcagccgacgtggaagccggtctccttgcccacctcaactcagcgggagaggtccccgactcacgctctttcgcttcctccctcggcgtctcccacctcgaacttgagggcgtcatcaagagcctctcagctttccgcatcgtcgacagcacagacatcatcaaggagacatgggtgctcaccgaggaggccaagggctacgccgccaagggctcccccgaggcacagctcgtcgccgcaatttcaccggagggtgcctctaaggacgcactcaaggcaatattgggagatgctttcgatgttggcatgaaggcagccgcgaggaacaagtggataggtttcgagaaggggaataaggacttagtccttaggaaggttgagagcgtaaaggatgagctgcaagagcagcttagaagactagagaatggggaggttgtttctgataaagtgatcgatgatttgaagagaaggaaacttattacgaaagagaaatcaatttggtactctctaaagaaggggtctgagtttgttgtaaagagaaaaacgttggctactgatgtgacaacagaacaccttaggagttgtgatattcttatttcggaacgacttt

SEQ ID NO: 51574 - DNA, 2094 bp, Zea Mays
ctgagacgaggactcctttcccttctgtcatctgagactcggaagcctcggccgccgccgttaccacctccttgcgccatggcggagaagtcgccggcagccgacgtggaagccggtctccttgcccacctcaactcagcgggagaggtccccgactcacgctctttcgcttcctccctcggcgtctcccacctcgaacttgagggcgtcatcaagagcctctcagctttccgcatcgtcgacagcacagacatcatcaaggagacatgggtgctcaccgaggaggccaagggctacgccgccaagggctcccccgaggcacagctcgtcgccgcaatttcaccggagggtgcctctaaggacgcactcaaggcaatattgggagatgctttcgatgttggcatgaaggcagccgcgaggaacaagtggataggtttcgagaaggggaataaggacttagtccttaggaaggttgagagcgtaaaggatgagctgcaagagcagcttagaagactagagaatggggaggttgtttctgataaagtgatcgatgatttgaagagaaggaaacttattacgaaagagaaatcaatttggtactctctaaagaaggggtctgagtttgttgtaaagagaaaaacgttggctactgatgtgacaacagaacaccttaggagtggtgactggaaggaccttgaattcaaagactataattatggagctcaaggtcaacctatagccaaaggttatgttcagcctttgatggaggttcgtgaggcaatcgagaacatctttattatgatgggattcactgagatgccaaccaacaatttcgtcgaaagcagcttctggaatttcgatgcactgtttcagcctcaacagcatcctgctcgggattcacatgatacatttttcctgaaagctccagcaactacaaaacagttgcctgacgactatcttgagaaagtaaagcaagttcatcagtctggcggttatggctccaaaggatatggttatgattggaaacgggatgaagcggagaagaatcttctccgtactcatacaactgctgtttccacgagaatgttatacaagcttgctcaggagaaaccttttactccaaagaggtattactccattgatcgtgttttccgcaatgaagctgttgaccggactcatcttgctgaattccaccagatagagggtgcacaaagttatattggtgaacatatgcacaaactcaatctcctcccttgaatcatgtggcccatgtgggaggacttatctgtgattatggtttgacacttggtgatctgattggtgtattggaggatttcttctcaagtctaggcatgtccaagctgcgtttcaagcctgcctacaatccatatactgaacccagcatggaaattttcagttaccatgatggtttgaagaaatgggtggaagttggtaattcaggcatgttcaggccagagatgttgcttcccatgggactgccagaaggtgttaatgttattgcatggggtctttcacttgaaaggccaacgatgatcctttatggtatcgacaacataagggacctgtttggaccaaaggttgatttcaacctcatcaagagcaacccactatgccgattgggactgtagtgactagtgaggtcctgaaatccctactaattctaaagctctggctaagctatggaatcagggggtcagcaatgacttttctactttattttggtgtgacaagtttttgggttgctgaatcaaaggatttgggggcaccaatggtgcttgctgctgtcccaatgaggcaaacaaagcgcagaacagtggcagaagcgatgcaaaatcaaagcttggacgaccatggacatacacggagggaggcctctcaatgatggttcgaatatttccagctctagaatgttgtacaagaggtcatcctgtgaaccgcccaagagacgtctaaatgacatctagtaatggtctatcgaaatggagatgttgtcttgtgaccgagcttgcatctccaagaaattccgataatcttatcccactttttaatttaggagaaaagtgaaaaaaaaac

SEQ ID NO: 51575 - DNA, 1928 bp, Zea Mays
ctgagacgaggactcctttcccttctgtcatctgagactcggaagcctcggccgccgccgttaccacctccttgcgccatggcggagaagtcgccggcagccgacgtggaagccggtctccttgcccacctcaactcagcgggagaggtccccgactcacgctctttcgcttcctccctcggcgtctcccacctcgaacttgagggcgtcatcaagagcctctcagctttccgcatcgtcgacagcacagacatcatcaaggagacatgggtgctcaccgaggaggccaagggctacgccgccaagggctcccccgaggcacagctcgtcgccgcaatttcaccggagggtgcctctaaggacgcactcaaggcaatattgggagatgctttcgatgttggcatgaaggcagccgcgaggaacaagtggataggtttcgagaaggggaataaggacttagtccttaggaaggttgagagcgtaaaggatgagctgcaagagcagcttagaagactagagaatggggaggttgtttctgataaagtgatcgatgatttgaagagaaggaaacttattacgaaagagaaatcaatttggtactctctaaagaaggggtctgagtttgttgtaaagagaaaaacgttggctactgatgtgacaacagaacaccttaggagtggtgactggaaggaccttgaattcaaagactataattatggagctcaaggtcaacctatagccaaaggttatgttcagcctttgatggaggttcgtgaggcaatcgagaacatctttattatgatgggattcactgagatgccaaccaacaatttcgtcgaaagcagcttctggaatttcgatgcactgtttcagcctcaacagcatcctgctcgggattcacatgatacatttttcctgaaagctccagcaactacaaaacagttgcctgacgactatcttgagaaagtaaagcaagttcatcagtctggcggttatggctccaaaggatatggttatgattggaaacgggatgaagcggagaagaatcttctccgtactcatacaactgctgtttccacgagaatgttatacaagcttgctcaggagaaaccttttactccaaagaggtattactccattgatcgtgttttccgcaatgaagctgttgaccggactcatcttgctgaattccaccagatagagggacttatctgtgattatggtttgacacttggtgatctgattggtgtattggaggatttcttctcaagtctaggcatgtccaagctgcgtttcaagcctgcctacaatccatatactgaacccagcatggaaattttcagttaccatgatggtttgaagaaatgggtggaagttggtaattcaggcatgttcaggccagagatgttgcttcccatgggactgccagaaggtgttaatgttattgcatggggtctttcacttgaaaggccaacgatgatcctttatggtatcgacaacataagggacctgtttggaccaaaggttgatttcaacctcatcaagagcaacccactatgccgattgggactgtagtgactagtgagtttttgggttgctgaatcaaaggatttgggggcaccaatggtgcttgctgctgtcccaatgaggcaaacaaagcgcagaacagtggcagaagcgatgcaaaatcaaagcttggacgaccatggacatacacggagggaggcctctcaatgatggttcgaatatttccagctctagaatgttgtacaagaggtcatcctgtgaaccgcccaagagacgtctaaatgacatctagtaatggtctatcgaaatggagatgttgtcttgtgaccgagcttgcatctccaagaaattccgataatcttatcccactttttaatttaggagaaaagtgaaaaaaaaac

SEQ ID NO: 51576 - DNA, 742 bp, Zea Mays
gagattctgaaattttcaccggattttatgatgtctagtatagctctaggcctgcaacattcatcgtctactgagccaaggctgctgaaaaagaacatgcacacatccattgaatatatatatggagaaaattcagtatttacctcattctttctaaatctttaataaattcacgagcaaaaccacggtatgcatttggtgaatagatgcctggatcatgatatagccaaattaacccattctcaattctaacagaatcgtggcacaggtcaatagaattaatatatttctgatatacgttacgtttggaggaatgaagttgagcagaagtgcacttaagtttacggtcttagtggaagagaacacagtataacctataaatggtagagctgacagtgatgtttgagacctatattttgattcaagtgacatcctagcattttctgatattggaataaagtggtctccttcaatgcgggaaaaaatgaaaagaactgaacagaaaaaagatccagacattacattctgtggaaaagtaatccagctttttgaagtatgcatacgtgtcatgcagttaaggatttaaaatatattaaatgaagtcaacatagtaaaaaaatgaaaatataagatatttcatagacaggatatataacgatctccttctcataggtatacttgaagggcttgcatcttggtattggcccatcttcaccagtagttataaaggtacatctactta

SEQ ID NO: 51577 - DNA, 1046 bp, Zea Mays
gtgtgtctgtgtgattgtgatagaatccaaagacgcaagcggctgaaggcagcagcgccgcgcaggcgttgtggccttgtgggagaggaaaaagagaaagaggaaccggcctagacaagcaagcgagagggcagggccgcggcgttgcgtcagatggggaagtacatgcgcaagtgcaggggggccgcaggcgcggaggtcgccgccgtcgaggttacgcaggtcgtcggcgtccgcacgaggtccaggtccgcggcggcgaccggcggtgtcgcgaaggtcgtcgccccgaggaggaagagggcgccggcgggggagcctgctgcctccgtgggcgctggtggggacggcggaagctgctacatccacctgcgtagccgcatgctgttcatggcaccgcctcagccgcagccgccgtcggttccgaccccggcggaggctgctgatggcgctgcaggacagcagggcgcggcgctcgcggccgggctctcgcgttgctccagcacggcgtcgtcggtgcacgtggggggtcagcgcgggagccacacctgccgctccgacgacgctgcagaggtacaacttcgacttcgtccgtggcgtgcccctcgacgccggcggccggttcgagtgggcgccggtggtcagcatctgaagcgagcgtgcgtccggtgcaaggtgaagctagaaagagaaaagatgccccccccaacaaacataacggagaagagaaaaaccaaacaattaagcagctttatatagcctaagctaaccaccaccattcatctcgtccaaatgccttgcttttctctggagctagcaggagcgtagttattatttagtactactttacttattcagaggttatcttgaccccgatagatcaatccgcttactgtgtaatttgtctcatgcatcttagatggagtttaatcgtcttaatttattactgtacagcagcttgctggcttgcaaagaaagatctggtttgtctctaatccgagtcacgtttagctaccgcgcgtgtcggcgtgtacgctgcttgttgg

SEQ ID NO: 51578 - DNA, 477 bp, Zea Mays
attgtcacaactgtcgtctccccctcacgtcgcagctcttaatcttcctcccactgcccctatcgtcggtcgtcgttattccacttgccgggggccacaacgccagcctcgatcgcgcacagaggcacactccaccaaggagcgacatgaggagagatgacaggtgcggagatggggtcagtgttgctgcaaacaatgtggctgaagagtgaggtggatgccaccgtctgcgataagcctcgacaaggtccttgttctctgatttggtcgtgccaccaacgtcgattgtctccacctagatgacatcgtactgaagcaattgaagggcaaagcattaaagagagcggggctgactaaataaaaattgcaagagcagattgagcagagaaacattgcaaggaagattaagcagtttgggcatcgttctgatggatgaaccttccggtacaatgtgtagaccatgcgaaccagaacgat

SEQ ID NO: 51579 - DNA, 633 bp, Zea Mays
gtcacaactgtcgtctccccctcacgtcgcagctcttaatcttcctcccactgcccctatcgtcggtcgtcgttattccacttgccgggggccacaacgccagcctcgatcgcgcacagaggcacactccaccaaggagcgacatgaggagagatgacaggtgcggagatggggtcagtgttgctgcaaacaatgtggctgaagagtgaggtggatgccaccgtctgcgataagcctcgacaaggtccttgttctctgatttggtcgtgccaccaacgtcgattgtctccacctagatgacatcgttctcatgactgaggctagggataacaggtacgaggtgtccgtgtaagaaatgctgatgtaactagtggaagttgcacagtaaagaaattattataatgtaaatgacaaaatcaatagatttatatggtctttgtttgataacaggtacgagtacctcactaggtctaatagaaaaatgaaaaatgacttttaataatgtagatccctcacatcacatagcaaaacacatgaacttatatgatctctgtagcaacgcacggtcaccaaactagtttagtgttatatgttggtagtagattgagaaaactggagtatacatctctatct

SEQ ID NO: 51580 - DNA, 576 bp, Zea Mays
caactgtcgtctccccctcacgtcgcagctcttaatcttcctcccactgcccctatcgtcggtcgtcgttattccacttgccgggggccacaacgccagcctcgatcgcgcacagaggcacactccaccaaggagcgacatgaggagagatgacaggtgcggagatggggtcagtgttgctgcaaacaatgtggctgaagagtgaggtggatgccaccgtctgcgataagcctcgacaaggtccttgttctctgatttggtcgtgccaccaacgtcgattgtctccacctagatgacatcgatactaaacaagtggagttcctcaataaagttcctaaaagagtcaagtattttgcctattcctaaaattgccaagccattcaaaaggacttctactgctacaccgaacattaatcgtcaagtcgtaggagtgggcgtagagtttagcatgcgggatttaggctgcaaagcgaacaaaaaaggcataaaatctctgcaaatcattgctgaaacagaagatgaactcaacatccaagatgaaaatgtgccattcaagtgcacaaaagactatcaaat

SEQ ID NO: 51581 - DNA, 600 bp, Zea Mays
tcgccagatgaaacttgcatttctggttgtgtaagaagcaatgtccatgcagggatactaaacaagtggagttcctcaataaagttcctaaaagagtcaagtattttgcctattcctaaaattgccaagccattcaaaaggacttctactgctacaccgaacattaatcgtcaagtcgtaggagtgggcgtagagtttagcatgcgggatttaggctgcaaagcgaacaaaaaaggcataaaatctctgcaaatcattgctgaaacagaaggttctcatgactgaggctagggataacaggtacgaggtgtccgtgtaagaaatgctgatgtaactagtggaagttgcacagtaaagaaattattataatgtaaatgacaaaatcaatagatttatatggtctttgtttgataacaggtacgagtacctcactaggtctaatagaaaaatgaaaaatgacttttaataatgtagatccctcacatcacatagcaaaacacatgaacttatatgatctctgtagcaacgcacggtcaccaaactagtttagtgttatatgttggtagtagattgagaaaactggagtatacatctctatct

SEQ ID NO: 51582 - DNA, 1962 bp, Zea Mays
gagctgagctcatggtgatggggaggccaagcaacagccacgggggcgggggcgacgaggagcggctgcccctccgcggcgtgctggagacgtccccgtcccatcacgccgcggtgcaggccaaggacaaggaggccgactcctcgccgcagtgggtcttcgacttcgagccacccgaggaagacgacgaccaagatatacaagacgacatgtcagacgatctatctccgtcgccgcaaatagagtacgatcgtcttctgggcggccttctcgtcgagggttttgacgacaaatcatgcagaagcaggtaccgtttcgcacgctaccacagttcaccgagcataccttctccgtacctcatagagaggctaaggaaacaagaagctctgcagaagaagtgcggcccaggcaccagagcatacagggaagcttcgaagcagctgaaatccggtcagagcatgagcatcaacgccacagacgactgcaactacctgttccttatcatccacgccggcttagggaaccggatgctcgagatcacttcggcgttcctctacgcgctgctcacgaaccggatcttgctcctggaccgttacaaggagatcgcggatcttttctgcgagccctttcctggaacgtcgtggctggttccttcggacttccctctgaacgacgacgagttcggccagagcagcgctgagagctacggcaacatgctgcagaacaaggctttcggtggtggtacggaccgatctttggttggcaacagactccctccctatgtgtacctccacctggacggcaactatggtttccacgacaaactcttcttctgcgaggacgaccagcagttcctgcgaggtgttccgtggctggtcatgaggacggacatgtacttcgtgccgtccctgttcctcgttccagctttccaggacgagctcggcaggctgtttcctgagaaagacaccgtcttccatcacttggcgcgctatcttttccatccgacaaatggcgtctggtattcggttacaagatgcttcaggtcctacctggccaaagcggaaaaaagggtgggaattcagatcaggatatatgaaaccaaaggtatcttgcagagaaacggcccgttcccacacattctgaaccagatcctctcgtgtgctcaaaacgagaagctgcttccagaaatcagtatggcagagggagcagccgatgggactcggaataaccgaacagcagccgggagtgggactcggaacaaccggacgatcgctgttctaacgacttctctgagcgcttggtacagcgagcagatccaggagaagtacgacgagcagtcggctgttgatggcgtgtctgtcagagtgttccagccgagccacgaggagtaccagaggtcgaggaacaaggggcacaacatgaaggcgcttgctgagatctacctattgagcatgaccgacgtgctgatcaccagtggcttttccacgttcgggtacgctgctcaggggctcgccggcctgaagccgtggatcatgcttaagtcggagaaccacgtgacgccagacccaccgtgcgtccgcgccatgtccatcgagccgtgcttccatcaagctcccttctacgactgcaaggcgaggaaggacaccgatttgggcaaggtagtgccttacgtgaggcactgcgaggacgtgagctgggggctcaagattgtagatcaaactcatttgtagtgtagctgtaatctggtcaggactcacggcagacttgcttgctaactagggcagaactattgttattcttattcttaatctgcgaaacacaaaggaaccatacaaaatgtattctttccctcctgtatttgatccaagtgtagatagttgatagacagatccattaatctgttcatcctctgatgtcaaaaggaagagaaacatgtttactatatatcatcgctcatttggc

SEQ ID NO: 51583 - DNA, 1786 bp, Zea Mays
caacactatgttcttccatatatacaagacgacatgtcagacgatctatctccgtcgccgcaaatagagtacgatcgtcttctgggcggccttctcgtcgagggttttgacgacaaatcatgcagaagcaggtaccgtttcgcacgctaccacagttcaccgagcataccttctccgtacctcatagagaggctaaggaaacaagaagctctgcagaagaagtgcggcccaggcaccagagcatacagggaagcttcgaagcagctgaaatccggtcagagcatgagcatcaacgccacagacgactgcaactacctgttccttatcatccacgccggcttagggaaccggatgctcgagatcacttcggcgttcctctacgcgctgctcacgaaccggatcttgctcctggaccgttacaaggagatcgcggatcttttctgcgagccctttcctggaacgtcgtggctggttccttcggacttccctctgaacgacgacgagttcggccagagcagcgctgagagctacggcaacatgctgcagaacaaggctttcggtggtggtacggaccgatctttggttggcaacagactccctccctatgtgtacctccacctggacggcaactatggtttccacgacaaactcttcttctgcgaggacgaccagcagttcctgcgaggtgttccgtggctggtcatgaggacggacatgtacttcgtgccgtccctgttcctcgttccagctttccaggacgagctcggcaggctgtttcctgagaaagacaccgtcttccatcacttggcgcgctatcttttccatccgacaaatggcgtctggtattcggttacaagatgcttcaggtcctacctggccaaagcggaaaaaagggtgggaattcagatcaggatatatgaaaccaaaggtatcttgcagagaaacggcccgttcccacacattctgaaccagatcctctcgtgtgctcaaaacgagaagctgcttccagaaatcagtatggcagagggagcagccgatgggactcggaataaccgaacagcagccgggagtgggactcggaacaaccggacgatcgctgttctaacgacttctctgagcgcttggtacagcgagcagatccaggagaagtacgacgagcagtcggctgttgatggcgtgtctgtcagagtgttccagccgagccacgaggagtaccagaggtcgaggaacaaggggcacaacatgaaggcgcttgctgagatctacctattgagcatgaccgacgtgctgatcaccagtggcttttccacgttcgggtacgctgctcaggggctcgccggcctgaagccgtggatcatgcttaagtcggagaaccacgtgacgccagacccaccgtgcgtccgcgccatgtccatcgagccgtgcttccatcaagctcccttctacgactgcaaggcgaggaaggacaccgatttgggcaaggtagtgccttacgtgaggcactgcgaggacgtgagctgggggctcaagattgtagatcaaactcatttgtagtgtagctgtaatctggtcaggactcacggcagacttgcttgctaactagggcagaactattgttattcttattcttaatctgcgaaacacaaaggaaccatacaaaatgtattctttccctcctgtatttgatccaagtgtagatagttgatagacagatccattaatctgttcatcctctgatgtcaaaaggaagagaaacatgtttactatatatcatcgctcatttggc

SEQ ID NO: 51584 - DNA, 1842 bp, Zea Mays
ctgcggctcggctccgccgtcacgccacatggacatcaaggagcggatccgccgctcgccgccgtcgtcgccgcaggctgtgggggaggcggcggcgtccgcgcccggacacccgcgcgggaggaaggcccgggtcgcggtgcttcccctgtcagtcgcctgcggggtcacgctgttgttgctcgcgggcgtctccgccgcgaggaggggtgcccaattctccggcgcggatcctaccactctctccggcaacgacgatcgtggcggctttgaacaggccgggccgcgcgatggagagcatgcaactacggtgtcttccaaagttcaaagggacaaactaattggtggcttgttagctcctggttttgatgaacagtcatgtctaagtagataccaatcagcattgtatcgtaaagagtcgccccatttagtatcaacctaccttttggaaagactgagagaacatgaggttctccagaagaaatgtggcccatatacagactcatacaagaaagctattgagcaactgaattctggtcaggatataatggttggagattgcaactatttggtgtgggtatcttatagtggtcttggtaacaggatcttgactattgcctcagcatttctctatgccatccttacaaacagagttctacttgtagatggagataaaggcactgcagatcttttctgtgaaccattccctgaaacttcatgggtattaccgccggatttccctattactaaatttaagaacttcagtattggctcccctgagagttacggaaacatggcgaaaactgaagctattcattctgatggttcttttaagggtcctaaacctgcctttctatatcttcacctggctcatgactatgatgatcatgataagctttttttctgtgaacatagtcagcaacatctccagaagatcccatggctgatcttaagatccgataattactttgtaccttcgctttttctgatctcatcataccaagaggagctcacgaggctgtttccgcagaaagatgttgtcttccatcacttgggacgttacttgttccaccctaccaatgctgtgtggggcttgattacaagcatgtcttggatcaggtccttcattgcacactgaaggaaaaattactaccagagatcaacgcgcaacagccaattatctcgacagggaacatcaagtctaaagttgttctgattacttctttgaactcaggatactacgaaaggatcaggaacatgtactgggaacatccgactgagaatggtgagatgattagcttccatcagccaagccacgaggagcaccaggattcagacaagacaatgcataacatgaaagcatgggcagagatttatctgctgagcttatctgatgctatggtaacaagtgcatggtcaacttttggatatgtagctcagggtctgagtggttcgaagacgtggcttctgttcaagcctgaaaatcgcactgcgcctaatccaccttgccgtcaggtcatgtctatagaaccgtgctttcatgctccgcctttctatgattgcaaaactaggaagggaactgacacagggaagcttgttccacatgtaagacactgtgaagatatgagctgggggctcaagctagttgatacaggtacataggttcaggtttgtatttatattgaaggcaaggtttgagcgacacagttaatacaaaatggcataggggtgtttgtttgggattatataatctggctagattataattccaaacaaacacgtatgctgactgtggtcaggtaagtttagcgcaactataacggttctgtccgtacgaattat

SEQ ID NO: 51585 - DNA, 13648 bp, Zea Mays
atgacaaaagctataccaaaaataggttcacgtaagaaagtacgtattggtttgcgtaggaatgcccgttttagtttacggaagagtgcacgtagaataacaaaagggattattcatgttcaagctagtttcaacaataccattataaccgttacagacccacaaggtcgggtcgttttctggtcctccgcaggtacttgtggattcaaaagctcaagaaaagcatcaccctatgctggtcaaagaacagcagtagatgctattcgtacagtgggtttgcaacgagcagaagttatggtaaaaggtgctggtagcggaagagatgccgcattacgagccattgctaaaagtggtgtacggttaagttgtatacgcgatgtaacacctatgccgcataatggatgtcgacctcctaaaaaaagacgtctgtaaaaaaaatgaaaccgctttcaagagaaataaacgattcaatgatcaaataatactagtctgttatggttcgagaagagataacaggatccactcaaacactagagtggaagtgtgttgaatcaagagtagatagtaaacgtctttattatggtcgtttcattctgtctccgcttagaaaaggtcaagcggatactgtcggtattgccttgcgaagagctttacttggagaaatagaaggaacatgtatcacacgcgccaaatttgggaacgtgccacatgaatattccacaatagtaggtattgaagaatccatacaagaaattttactaaatttgaaagaaattgtattgagaagtaatctctatggagttagagacgcatcaatttgcgtcaaaggtcctagatacataaccgctcaagatataatcttaccgccttccgtagaaatcgttgatacgacacaacctatagctaacttgagagaacccgttgatttctgtattgagttacagatcaagagagatcgcgcatatcatacggaactcagaaagaactctcaagatggaagttatcctatagatgctgtattcatgcctgttcgaaatgtgaattatagtattttttcttgtgggaatggaaatgaaaaacacgagatactttttttagaaatatggatgaatggaagtttaactcctaaagaagcgctttatgaagcttctcgtaatttgattgatttatttcttccttttctacacacagaggaagagggcactagtttcgaagaaaataaaaacaggttaactccaccccttttaacctttcaaaaaagattcactaatctaaagaaaaacaaaaaaggaattccattgaattgtatttttattgatcaattagaattgccttctagaacgtataattgtctcaaaagggccaatatacatacactattggaccttttgagtaagactgaagaagatcttatgcaaattaatagttttcgtatggaagatggaaaactgatatgggacactctagagaagcatctcccaattgatttacctaagaacaagttctcgctttaaatcattgcaattttttcctcttcttcttttttgagttagaataaaaagaaaaaagaaagcaatttggcatctttggcataatctatattttcgcgaaatggatcataataaaatagattttaggtatctagggaagattcacttggaagtaactatttcctagatacccatgcaggggacttcgcggtggaatgaatcaactcgaaaaatccctaaactaaaaaagacctaaagttaaggatttatcaatgggtaatgttgctccaatacctaaccaaagagctactgcagtaccgattaaaaaaacggtcgtagctactgggcgacgaaatggattttggaatttattgacattctctagaaagggtactgtcaataagcccgttggcacagaaaccattaagagaacgcccaataacttattgggtactgtacggagtatttgaaatacgggaaagaagtaccactcgggtaatatttccaaaggagttgcaaacggatccgccggttcaccaatcattgacggctctagaaccgctaaacctacattacacgcaatagtacctagaattactactggaaaaatgtataaaagatcgttgggccacgcgggttccccataataattatgtcccatccctttagctaattttgctcttaatacaggatcatttaagtcaggtttctttgttattgggataggtgaattctttaggatccatcccccaaaggaaccggacatgagaatttttcatcatccggctcgagcaagaatgaaagaaataagaccgtggaggatccacaatagaataggggtatataatgactcaatgactcaaggtaagaaaaactttatcaaattatcttttccgaagttgcgcctataactactcattgaaaagaatcctattcttatgcttaaatgctcaatatccaagtgggcttacaaatttgatcatgatcaattgctttgtggattgtctcttgattagttgttgtttatcccctcgatatcgcaagtttcttatgtccaaacaaagtatttacttgttactaataaaaaatcaaaaagtttagcctgcgttcttccttagatcccttcttttactccgatagtattgcggatcaaaatcgatgcaaagaaaatgaatgcatttccatactataataaaaagtaagtgtaataaaaattgaattggatcatatcacatgacttattccatttatactctataggatcttacggagcctgttcatggatgacatggttggtggggtatgatcatagaaaatattctcctcgagtgaaccagcctatccttcctagataggggacttacgtgttgattggatgcggagacacctttggtcgtgaattctaatgtggcagatccaattctctatctgcatggccaaattaataattcaagtcacacactcccataatccgccttattttctttcgtaaaattcacttcaactatttgtataaaaatacttcgaagttgaagagaagtatccaaatgacatgtcttattttacaataacccatgtttgtagcaatgaaataccataacctacccgatatgatatatgagaattagaattctctatgctatgccttccctataacggacccgaaataccttgcttacgtaccattggaaagtgcattaacataaatacggcagtaagcagaggtagtataaaggtatgtaaactataaaaacgagtcaaagtggattggcccacactagcacttccacgtaataattccactaaaggggaccctattaccggaatagcttcgggtacacctgtaacaattttgactgcccaataaccaatttgatcccaaggcaaagaataaccagttacaccaaatgatgcagtcaatacagccaaaaccacgcctgtgacccaagttaattcacggggttttttaaatccacctgtgagatacacacgaaatacgtgcaggatcatcattagaaccatcatacttgctgaccatcgatgaaccgatcggattaaccaaccaaagttggcctccgtcattatatattgaacggaggaaaaagcctctgtaacggtcggtcggtagtaaaaagtcatagcaaaaccggtagcgacttgtactagaaaacaagtaagtgtaattccccctaaacaataaaatatgttgacatgaggaggaacatatttactagttatatcatctgcaattgcctgaatctcaagacgttcttcaaaccaatcatatactttattgagataggtaactagcccgactccccctccgagaaccgtatatgaaaatttcatctcgtacggctcaagcagaaatacacaaattttcaacggatattagaaaaaagggttcaaaactccatcagccacggtattggatcgatttgccttgaagatatgaaataagaaaaatccagaatttcttctttgtgataataatgccaaaaaatctcaagttggctcatctgtctttctttcccttatgttgatcattagaggcctcttgacttttctcttccctattttttattgattttattttttgactagtcaaaaaataaaatcaaaatttctagtggttttctgatagaaattatcttgttgcgatcctatgaatcagttcaattaaaaccttagattcatactagagccacgatgattcagtctcaagataaacaaaaggcaagggttcttcgaataagaaccgcttgatgatcatttattgaaagagaaaagagttctcttttgggcaaacaaaattggaaggaagaaaatttctttttttattaagaactacttcatttttttttaagtctggttgcgaggtctaaatagtgagtatgaatcatagttccttttttttgatccactctatgtatttcgtgttccagatactagaataaataatatctgacgaattagaatcatcttgatagagataacatgccccttctatgtattatcaataggatcaattctaacaagtcacacactcatattccagagataccaaaacaaaaaaatccacggtcgaactaccagaatgtctagaaatgtggagcttaaagtagaaaggctttttttggatggaaaaactatgaagtcatagttttagttagtagaaacctaattcgttaaaattccgtccagtaaaacagaagaattataaatttctaaaattatagataggaatatcgcgaataaagccattgcgacccccataaaaggagtagtcccccaacccggagcaactttcccatattccgaattcaagggtttcaataaactagctgcgccagtccgttttggcttaggtctagaactatcttcaacggtttgtgtagccataaattctatttaatcattggtgttgactttgtatactattccgttgtagttgtaaatacacgatcttttcatagatccattgtaatcttgaaattctataaaaatggaaacagcaactttagtcgccatctccatatctggtttacttgtaagctttactgggtatgccttatatacctcgtttgggcaaccctctcaacaattaagagatccattcgaagaacatggggactaattgaagtaagaagtctcccctccgggggacttcttacttcaattaaattatttcatttcttagtcggaaccttaggtggttctcggaagaagatagcgaaaaaaattatccctaaagtcgaaactaaaaggaacgtataaaccaatgcttccatagattcgatcctggtttatttacaattataacttccacacctattcacttatcatttgggatcatttcccatataaaaaaagaaaaagagtcaaagaaaggacaggagatgttcctcatgtcaaatcaaacaaaaaatggaggtgaaagataccatagcaatgtggtatcaggctgcctgtctccttgtagttggatctccaactttttggaatgttccaaattccacttgagcatccaagtctggatcaataccagcaaaaacatctcggaacaaggttcgagcgccatgccaaatgtgtccgaaaaagaagagcaaagcaaaggtagcatgaccaaaagtgaaccaaccccttggactgctgcgaaaaacaccatctgatttcaaagtagctcgatctaattcaaaaatttcccctaattgagcacgccgcgcatatttttttacagtagcaggatcagaataacttactccattaagttcgccaccatagaactccaccgttacgcctacttgttcaacactatatttggattctgctcttctaaaaggaacgtccgctctcacaattccctcttcatctaccaaaacgaccggaaatgtttcaaaaaaagtaggcatacgacgtacaaaaagctcgcgtccttctttatctctaaagacgggatgtcctaaccatccaacagctatgccatccccattgtccattgagcctgctctgaataatcccccctttgccggattattaccaatataatcataaaaggctaatttttcgggaattttagaccaagcttctgataaactaagattttcggctaacccatcgctaactcttcgatatatttcttgctgaaagtatccctgatcccactgataacgagtaggcccaaataattcgattggggtagttgctgatccataccacatagttccggcaactacgaaagcagcaaaaaaaacagcagcgatactactggaaagtacagtttcaatattgcccatacgtaaccctttgtatagacgttgaggcggacggacacttagatggaataggcccgctaatatgcccaaagtacccgcagcaatatgatgcgaagctattcctcccggaacgaaaggatcaaaaccttctgcaccccacgcaggatttacagcttgtacttttccagtgagtccgtaaggatcggacacccatatcccagggccatataaacccgttacatgaaatgcaccaaagccaaaacaagccacccctgcaagaaataaatgaattccaaagatcttgggcaaatccaaagaaggttttcccgtccgctcatcacagaatatttctaggtcccaatatacccaatgccagatagctgccaagaaacacaagccagaaaacacaatatgcgcacctgccacaccttcataactccaaatacccggattcgttacagttactcctgaaatactccaaccaccccacgaattcgttattcctaaacgagtcatgaaggggatgacgaacataccttgtctccacattggatccagaacaggatcagagggatcaaaaaccgctaattcgtataaagccatcgaaccagcccaaccagaaactagagctgtgtgcattatatgcaccgaaagcaatcgacccggatcattcaatacgacagtatgaacacgataccaaggcaaacacatggaaatacccctttagcaaagaaaaatagacacgatgtcgctttattttatcgcattggaaaagactatccatacttattctatgtacctaacccttctaggggattctatgtcagaaagcgtgaatatttatttcattccattaaaaataacaagccaattctgtttgtaagaagaaagagaagcagatctattctatactcgataagtgccaatatgcaatgggtagcttgggctatttggaaaaacgaagaatagatccttcatccctctttgtttatcattcaaatcacggattcttttttctttattcaatctgttttaccttccttatatgtagaatatttcaatctatgtattaatagaatctatagtattcttatagaataagaaaaaaaaatgaagataataaactgcggattctttctttctcttccattcttacgtttccatattaaagtgtagtttttttacttaaatttaataatattaatctaatatgcccattggtgttccaaaagtaccttaccggattcccggagatgaagaagcgacttgggttgacttatacaatgttatgtatcgagaaaggacactttttttaggtcaagagattcgttgcgagatcacaaatcatattacaggtctgatggtatatctcagtatagaagatggaaatagcgatatttttttgtttataaactcccctggcgggtggctaatctcaggaatggcgatttttgatacgatgcaaacggtgacacctgatatatatacaatatgcctcggaatagccgcgtccatggcctccttcattctgcttggaggagaacccaccaagcgtatagcattccctcacgctaggattatgcttcaccaacctgctagtgcttattatcgggcaaggacaccagaatttttactagaagtggaagagttacacaaagttcgcgaaatgatcacaagggtttatgcactaagaacaggcaagcctttttgggttgtatccgaagacatggaaagggatgtttttatgtcagcagacgaagccaaagcttatggacttgtcgatattgtaggggatgaaatgattgacgagcactgcgatactgatccagtgtggtttctagaaatgtttaaggattggtagtgggtggatttcttgtaaatttatttcaaacctaaattcgggttttatgctatagaaaatagaaatacttcatgatgatgaatcatcaggttaagatcgatctaaaccaatccattttatatatacatacgacatgccaacggttaaacaacttattagaaatgcaagacaaccaatacgaaatgctagaaaatcggccgcgcttaagggatgtcctcagcgtcgaggaacatgtgctagggtgtatactatcaaccccaaaaaacccaactctgccttacgtaaagttgccagagtacgattaacctctggatttgaaatcactgcttatatacctggtattggccataatttacaagaacattctgtagtattagtaagaggaggaagggttaaggatttacccggtgtgagatatcgcattattcgaggaaccctagatgctgtcgcagtaaagaatcgtcaacaagggcgttctagtgcgttgtagattcttatccaagacttgtatcatttgatgatgccatgtgaatcgctagaaacatgtgaagtgtatggctaacccaataacgaaagtttcgtaaggggactggagcaggctaccatgagacaaaagatcttctttctaaagagattcgattcggaactcttatatgtccaaggtcaatatggaaattctttcagaggttttcccttactttgtccgtgtcaacaaacaattcgaaatacctcgactttttcagaacaggtccgagtcaaatagcaatgattcgaagcacttctttttccattacactatttcggaaacctaaggactcgatcgtatggatatggaaaatacaggatttccggtcctagcgggaaaaggagggaaacggatactcaatttaaagtgagtaaacagaattccatactcgatctcatagatccctatagaattctgtggaaagccgtattcgatgaaagtcgtatgtacggcttggagggagatctttcctatctttcgagatccaccctacaatatggggccaaaaagccaaaaaaataagtgattcgtttttagcccttataaaaagaaaacggattcttgaacctctttcacgctcatgtcacgtcgaggtactgcagaaaaaagaaccgcaaaatccgatccaatttttcgtaatcgattagttaacatggtggttaaccgtattatgaaagacggaaaaaaatcattggcttatcaaattctctatcgagccgtgaaaaagattcaacaaaagacagaaacaaatccactattggttttacgtcaagcaatacgtagagtaactcccaatataggagtaaaaacaagacgtaataaaaaaggatcgacgcggaaagttccgattgaaataggatctaaacaaggaagagcacttgccattcgttggttattagaagcatcccaaaagcgtccgggtcgaaatatggctttcaaattaagttccgaattagtagatgctgccaaagggagtgggggtgccatacgcaaaaaggaagcgactcatagaatggcagaggcaaatagagctcttgcacattttcgttaatccatgaacagaatctaggtatgtagacacatggatccatacatctcgatcggaaaagaatcaatagaaggagaatcggacgatatctttttcgaaacaaataaaaaggaaaaaaaagagaaaacagaaatcatgatcaactaagccctctcgggggcttgcttaagaataagaaagaggaatcttatggaaatagcatggaataaggtttgatcctattcatggggattccgtaaatatcccattccaaaaatcgaaacaatcgggacttttcggagattggctgcagttactaattcatgatctggcatgtacagaatgaaaacttcattctcgattctacgagaatttttatgaaagcgtttcatttgcttctcttccatggaagtttcattttcccagaatgtatcctaatttttggcctaattcttcttctgatgatcgatttaacctctgatcaaaaagatagaccttggttctatttcatctcttcaacaagtttagtaataagcataacggccctattgttccgatggagagaagaacctataattagcttttcgggaaatttccaaacgaacaatttcaacgaaatctttcaatttcttattttattatgttcaactttatgtattcctctatccgtagagtacattgaatgtacagaaatggctataacagagtttctgttattcgtattaacagctactctagggggaatgtttttatgtggtgctaacgatttaataactatctttgtagctccagaatgtttcagtttatgttcctacctattgtctggatataccaagagagatctacggtctaatgaggctactatgaaatatttactcatgggtggggcaagctcttctattctggttcatggtttctcttggctatatggttcatctgggggggagatcgagcttcaagaaattgtgaatggtcttatcaatacacaaatgtataactccctaggaatttcaattgcgcttatattcatcactgtaggacttgggttcaagctttccccagccccttttcatcaatggactcctgacgtctacgaaggagtagactacgagtgtaataggagcatccgttgacaaaaggatcaccctaagatgatcatctcatggctattgggaacgaatcaaatcagatggttctatttctcaacctttctgacttgctcctacggaaccaaggtcgaaaggattgaaaaagtcagtcattcacaaccactgatgaaggattcctcggaaagttaaggattagtagttctttttcgaaatccatttcgaaaaagaatggattcggtcttatacatacgcgaggaaggtaatcaaaaaagaaagaagacgagttcttctttcttttatcacttaggagccgtgcgagatgaaagtctcatgcacggttttgcatgagagaaagaagcgaggaatcctcttttcgactctgactcccccactccagtcgttgcttttctttctgttacttcgaaagtagctgcttcagctttagccacgcgaattctcgatattcctttttatttctcatcaaacgaatggcatcttcttctggaaatcctagctattcttagcatgatattggggaatctccttgctattactcaaacaagcatgaaacgtatgcttgcatattcgtccatagggcaaatcggatatgtaattattggaataattgttggagactcaaatgatggatatgcaagcatgataacttatatgctgttctatatctccatgaatctaggaacttttgcttgcattgtattatttggtctacgtaccagaactgataacattcgagattatgcaggattatacacgaaagatccttttttggctctctctttagccctatgtctcttatccctaggaggccttcctccactagcaggtttcttcggaaaactctatctattctggtgtggatggcaagcaggcctatatttcttggtttcaataggactccttacgagcgttctttctatctactattatctaaaaataatcaagttattaatgactggacgaaaccaagaaataaccccttatgtgcgaaattatagaagatcccctttaagatcaaacaattccatcgaattgagtatgactgtatgtgtgatagcatctactataccaggaatatcaatgaaccccattcttgcaattgctcaggataccctcttttagctgctaggtctatttcttagttcaagatccctcttactaactggaataaaagaattagtagatctgttccgcccaaaatgggaatgggtgctagggttatgaacttataatcatggaatcgactcgatcatcagattataagttcattccataccggaccagatcgtgcacattcttattatgagaaggggtcattcgagcctatggaaataggatactctgtttacatagaaatccctacgtccttacattctatttaggattaggaataggtgtaatcagacctgcttttgacatatctatcctatccttatttgggtaccatatgcacctctttgggcttctattgaatcgagaaattggattgtacatctttttgattttgatatcgattttgatacatataaggtgtcctacggataatgcaaatcgaagctatttgatgtctgactcaggcctatatgtatatgaccgatcgatcgaaatactccaagactccacctttgtcatatattccatatatcacattcgatagatatcatattcatggaatacgattcactttcaagatgccttgatggtgaaatggtagacacgcgagactcaaaatctcgtgctaaagagcgtggaggttcgagtcctcttcaaggcataatacggagaatgctcattgaatgagcattccccgtagaagtattccggaaatctgcgcctggcgctctcctctatcttctgaggtccttaaccatctccctgagaaaagtagacagtaaaagccaaaatagactaaatatagcctgaatgatcctaaaaacccctcgaaggagataataaagaacctaaagcagacggtatcctactgcaagggtggtcttaagaatccaaaagaggttgctcagaagagatagatgtatcccaacctctattgctctcgcgtaaagcctttttttacgcgacaggaaaaagtgactacgaattcccctttttgtttgcgaatccctgtttgtatcctttgagcgcacgcccataagtagcgatcaaggaaatcgatcaaacgatcccaataccgtgaaagagaaacttcccagatccagggaagcttatcataaagggcttcaacaaggggttttattcgttctttgagcaaaaagataaagatcggatagattcgaaccgcaattgcaaaggtaataactactatgccagcccaaatcatgatcttcaccaacttggatttggttctctcgtgaaaatcgcgagttgcagagatgagaaccatgaaaagcaagatcccgaataagaaaatagaaaccgaggaaaccacaagagtgaagactagtagagtctcatcttttgtcattctttgctcctttttcactcaatgattcattcgaatttcccaaccaaaaattctatatgtctattctatgatatttctatatatatagaatatgatatctaatatgacacccgatttgtcaaagggattggattggtgacttacccattcagtgactttggcactggacgttccaaaaacgggtactatcggatcgggtgaattagagaatagacagaggtccgttggcatttcagcttctcttctcctttcagggcctatccgaaagagaatccaggacctcttggtcctgaatatcagaataggacgaacgaaccggcctccgcggatatctttgcttcggaacaaaacaattagcat

SEQ ID NO: 51586 - DNA, 581 bp, Zea Mays
ttggaatttcttttggatagttcaattcagattatttcaaaatcttattatttgtttgcttgttgcccagaaaaaccttttggttttggatgctcgttgcccctagaaaatgatcttgattttgctaaagaataagattgtactatggaaaaataagtcttttttttccaaagatttttacgaatacgcttttttgacatcgaagtacgtttttttggaactgccattcaaaaagggaattacttttttctagttgtatgtgaaagacatctattgccacaaatcaatccttctttctgttttttcttagtatttatacttagatactgaaagatactgaaagatacttaaattcgaaattcttctttagttcattttgtctaatgtggataagacaagagttttttaagattttctatttaaatcaatttctatatcaaatatactccatatataaatatatggtatgggggataagccctcatataagagggggagataaaaagaaggtaaaattcaattcaaatagttaattaagttcagaaggctattccataattgaattccaataaaaaaaaata

SEQ ID NO: 51587 - DNA, 2829 bp, Zea Mays
aaaactgctcatactatcattatagtataatgacgagtggttgtatatggtgctatcgtctagtgatgcccccatcgtctagtggttcaggacatctctctttcaaggaggcagcggggattcgacttcccctgggggtagggagtattataaaaagaggttaatcatagattatcaaaaagcctagaaaaaattcttcctgggtcgatgcccgagcggttaatggggacggactgtaaattcgttgacgatatgtctacgctggttcaaatccagctcggcccaaaaatttagggcttcgtgaatatgaactaaatctatttttttatggaagaaaaaagatgtattatctatagaaataaaggataaagagaaacggggaaattgatttctaatccgtatctctctgattctttgtcttacaaagaaaagacaaagaaaagagcttttcttatggaaaagcggattatcgtttatttttagggataaaaaatcgcaacatactagttatgccactctcactatacccgcataggatatgcgggtatgtagtatatgattcgtctaattcttagagcacgacagacggatcgaatcttctatttaagaataggcatgccatacaccccgcagggattgtagttcaattggtcagagcaccgccctgtcaaggcggaagctgcgggttcgagccccgtcagtcccgaactagggttcaatgaatggacaaattcatcttttcttttttcatggaaatttttgatgaaaaaaggggggggggacaggaggcaagatcaaatatctatggggcacccttacttcacttttatttttttgcatttctcagtaaaaagagagcagtgcagtatagaattttttttgcactacttccggttgataaggaaaggcatacatatcatacgtggattagtataatttaggatactactccatttttatgatgataccaccctcatcttaacttcctattcgactcttatgaaatcgagtaccggtattttaccggaatccatacataaaccgtattcgtttattgttagagaatgaatttcatctaattagttactttttgggggttaaaccgcaccccttccattttctagttccaactttgtttgtgtatataattggaaagaatccacctcattctcactccatttgccgactcctttttttatggatttgctctcatctttagaccccaaaaagcgtatatggatagtaacctaataaaataaaaaccaagcaaacgctctttttcctaaatttaaatatgggatcctttttatttaagatcctcttttctccatctcatttctacttctactgcttattgggatgtctatgtgacccatagaaagttggtcatataatacatacataattgtatgtataactataagaaaaaggaagtgaaattggataagataagaaagattttgggttatacatatagaaaagcaaaagtagaaaagaatgaaaaaagaatagagggggtttcgaatccaatcaaaaaacctattttggtcttagtatggataagagatcttcctatgttatattattccactatccaccatgaattgatttgatagatgcaatattcataatattgaattgattcagtattatcagaatgcaagtcctccccttgaatttacaggatacccctttttcctctccatgggattacatcccgagttattgtgaaaaaaataaataaataaagaggttatggaagtaaatattctcgcatttattgctacagcattgttcattctagttcctactgcctttttacttattatttatgtaaaaacagccagtcaaaatgattaattggaattccaattaatcattgaagaaatgaaaaagggattaaagaaaataaaaaatccaagtcttaaatgaaagggtctggttggaatcataaagtgtggtagaaagaactacatatagttttttctaccacactttagattctttctattatattatcttgaatctacatagaatcgattagtagattgaaatagtagtctaattcaacttcttttttcactgcatccacttaatttcaatcaagtcaaaatcaaaaaaatcgaagataattcttcattgaaagaatccaaggagggggagaaaaataatacgagaatagactagaatagattatagtaaaagaaaaaaaaaaaaaccattcgagatgcacacaacagcagaaggaaggaatctccggcggtcgcctcaagcagaaaaaagacgaagagaaaaaaaaatctgttagggtttggtcatttggtgggccgccgccgccttccaccttgctcgtcctatcttggactgctagctaatcatctttcttccaccatgattgtatgattccgttggagacaaaacatcatgcctaattactttgcttgcttattaatcctcttgcttcccccctaatccatattagtttctcatcttcgtgtatgtacatggttcctttcaagaggcagattaatttccatcatctcaaatgattagcggggcacttccttctcgatctactactatacctatacttgagatgacgacgattgttgaatacgcacggatgtctctctctctctctctctctctctctctctcttagatcctttttcagttcatcaactctgttgaaacctgtgctcaatcaagagttgagacttaatacatgtcgtcaatccagagtcttgcagatcaagggcaaggagacgaatttttcaacaaaaccaacagcggtggaaataaattccgtgtggttggatcggttgggag

SEQ ID NO: 51588 - DNA, 3344 bp, Zea Mays
aaagacggatccgacacacttccgaattccgatccacccacttcatcaccaaggccgtcgtctctccccacgccggccgaacggatggcggcggcgccgactgcggatgccatggacgtcgacgcgccggctaggacgctgactacctctccggccaccaagttgcgctcccctcacgacctcctggcagagacacgcgcctccatcgagaaagtcgcagcccggatactcgccatcaagaaagacggcgcccccaagtcggagctccgcgagcttgtcactcagatgtctctgcacctcgtcacgctacgccaagtgaacagagagatactgatggaggaggacaaggtcaaggcggagacggaggccgcgaaggcgccggtggactccacgacgctgcagctgcataacctgttgtacgagaagaaccactacgtgaaggccataagagcgtgtcttgactttcagacgaagtatccggggatagagcttgtgcccgaggaggagttccagcgttccgcgcccgcagacatccttgagaagaccctcgctgccgacgcctcccacgacctcatgctcaagcgcctcaactttgagctcgtccagaggaaagagttatgcaagctacatgagaaattaggacaacagaggggcagcttgctggagacaattgctaatcagaaaaagtttctttcaagcctgccatcacatttgaaatcattgaagaaagcatcactgccagtgcagcaacagttggggatgcaacataccaagaaactaaagcagcaccatgctgctgagttacttcctactccgctttatatagcatacactcagctgctagggcagaaagaagcatttggagagaatattgaagtagagatcgcgggaagcacaaaggatgcccaaatatttgctcaacaacaagccaagaaggaaaacagcactctttcaagtggcgacaacagaatggatgatgatgtgattgatgatgaagaagatgctcagagaagaagatcaagatccaaaaagaatgtggtgaaggaagctaataatccagcagtggcctatcaacttcacccacttaaaattatacttcatgtatatgatactgaagattctggtagcaaacgccgtaaactcatcaccctgaggtttgaatacttggcaaagttgaatgttgtttgtgtcggaattgaagattcagagggtctggacagtaatatcttgtccaacctatttccagatgacactggtttagatctgcctcaccagatggctaagatttatgttggggaggttccaaacttcagcgacaaggattcaaggccatacaagtgggcacaacatttaggtggtatcgactttttgcctgaagtgcctccatctgttggggatgattctagcagagcattaaacactgctgatttgtcatctgggcttgctctgtaccgtcagcagaaccgtgcacagactattttgcagaggatccgcttgcggaaagttgcacagatggctcttatgtgagtcactggtctatgttttttgctgtttgggacatcgatgaaaaaaaccggatggcagattagcctgagagtgaccgtgtaatttgactgacgattttgagctaatgatgcttttgcttcattgcacatgtcattctgagttatggcaatactatgaatcatttaccaggcagaaattgtgaaacataccatttatatcttcttcatatgttctctacatattgattcaaagctaattattggcgaccttcattataatgttattcatgactgttatatacatggcctgtttgattggtagcatccctttgaagttttcgagtctctttgattacaggtggcaacttgattatttgacaaagctgaagtggcctcgaatagaacataagaatgcaccatgggcatcacgcaacccactgtgcagtctacatagttggtcattgacaagttatcctgagtcatctcgttctattttgatgctaagtggtgctgcaagcaatgttgacagtgatgtagagagatctgtgacaaactgggaagaaactgagagtatcagggaggatggggagcttccagttgttattcctgctgagaatgagccaaatggttctacaattttgcaacctgaggtgtcagctgagatccggagccattctagaggcttatctcttatatcaaagagtgcaacaccatctaagctaagcatctcacgaagttttggtagaaatgaggacgatcttgatctcttgatgtatagcgacagcgagttggaggaccagccctgcattcttgacgaaactgaaaaagctactagcccgattagagacagattctgggaggagtatgcttccaaggaattcaccatggtcctgagtaaaactatgaagaatggtctaaaagtcatgctggaagccaaggttaagataagtatggagtatcctcttagacctccccttttcagattacgtttgctctcagaaaagtctgaaattttgaagtggcacaatgatcttcgtgcaatggaagctgaggtaaatcttcacatccttcgaagcatacctctatcatatgaggattatatattgactcaccaagttatgtgcctggctatgctgtttgacatgcattttgatgaggaaaacgagaaaagaaaagtcacttcagtgatcgatgttggtctttgcaaacctgttagtggaactatgcttactagatcggttaggggtagagacagaaggcaaactatttattggagaggtgctgattgctcttccagttacttgtagagtatgtgcgatcttgattggtcttggttgagttcagcattgactaccctctggagaaatcatttctgggcattggagaactgcatatataacttaagagctgacacagatccccttgtttatcactactgtgtcttgacagcaatagctgggaagatttctctgtgcccatactgactcgagaaactatttacaatgctgatggtaactacacttttatatgcccaggaagaaaagctataggtgcagttaatcaccacaaggcttttactgcatgaatattgtgctatatgtttcaagaagcctttctgctagttcctattttcttggttgttcaaattggtatcctggatctacccagaacatttccaaccgcagttaaatcctggaagcttgcagcattcttttgcaataaacagagcttgcttacccggatgaagatgttggaggacccagcttttaaccaaccttagttatctcaatcgcctatggttggccgacagctatgagaacacgaagaagaagtggaaat

SEQ ID NO: 51589 - DNA, 1870 bp, Zea Mays
gacggatccgacacacttccgaattccgatccacccacttcatcaccaaggccgtcgtctctccccacgccggccgaacggatggcggcggcgccgactgcggatgccatggacgtcgacgcgccggctaggacgctgactacctctccggccaccaagttgcgctcccctcacgacctcctggcagagacacgcgcctccatcgagaaagtcgcagcccggatactcgccatcaagaaagacggcgcccccaagtcggagctccgcgagcttgtcactcagatgtctctgcacctcgtcacgctacgccaagtgaacagagagatactgatggaggaggacaaggtcaaggcggagacggaggccgcgaaggcgccggtggactccacgacgctgcagctgcataacctgttgtacgagaagaaccactacgtgaaggccataagagcgtgtcttgactttcagacgaagtatccggggatagagcttgtgcccgaggaggagttccagcgttccgcgcccgcagacatccttgagaagaccctcgctgccgacgcctcccacgacctcatgctcaagcgcctcaactttgagctcgtccagaggaaagagttatgcaagctacatgagaaattaggacaacagaggggcagcttgctggagacaattgctaatcagaaaaagtttctttcaagcctgccatcacatttgaaatcattgaagaaagcatcactgccagtgcagcaacagttggggatgcaacataccaagaaactaaagcagcaccatgctgctgagttacttcctactccgctttatatagcatacactcagctgctagggcagaaagaagcatttggagagaatattgaagtagagatcgcgggaagcacaaaggatgcccaaatatttgctcaacaacaagccaagaaggaaaacacaggcactctttcaagtggcgacaacagaatggatgatgatgtgattgatgatgaagaagatgctcagagaagaagatcaagatccaaaaagaatgtggtgaaggaagctaataatccagcagtggcctatcaacttcacccacttaaaattatacttcatgtatatgatactgaagattctggtagcaaacgccgtaaactcatcaccctgaggtttgaatacttggcaaagttgaatgttgtttgtgtcggaattgaagattcagagggtctggacagtaatatcttgtccaacctatttccagatgacactggtttagatctgcctcaccagatggctaagatttatgttggggaggttccaaacttcagcgacaaggattcaaggccatacaagtgggcacaacatttaggtggtatcgactttttgcctgaagtgcctccatctgttggggatgattctagcagagcattaaacactgctgatttgtcatctgggcttgctctgtaccgtcagcagaaccgtgcacagactattttgcagaggatccgcttgcggaaagttgcacagatggctcttatgtgagtcactggtctatgttttttgctgtttgggacatcgatgaaaaaaaccggatggcagattagcctgagagtgaccgtgtaatttgactgacgattttgagctaatgatgcttttgcttcattgcacatgtcattctgagttatggcaatactatgaatcatttaccaggcagaaattgtgaaacataccatttatatcttcttcatatgttctctacatattgattcaaagctaattattggcgaccttcattataatgttattcatgactgttatatacatggcctgtttgattggtagcatccctttgaagttttcgagtctctttgattacaggtggcaa

SEQ ID NO: 51590 - DNA, 1963 bp, Zea Mays
gacggatccgacacacttccgaattccgatccacccacttcatcaccaaggccgtcgtctctccccacgccggccgaacggatggcggcggcgccgactgcggatgccatggacgtcgacgcgccggctaggacgctgactacctctccggccaccaagttgcgctcccctcacgacctcctggcagagacacgcgcctccatcgagaaagtcgcagcccggatactcgccatcaagaaagacggcgcccccaagtcggagctccgcgagcttgtcactcagatgtctctgcacctcgtcacgctacgccaagtgaacagagagatactgatggaggaggacaaggtcaaggcggagacggaggccgcgaaggcgccggtggactccacgacgctgcagctgcataacctgttgtacgagaagaaccactacgtgaaggccataagagcgtgtcttgactttcagacgaagtatccggggatagagcttgtgcccgaggaggagttccagcgttccgcgcccgcagacatccttgagaagaccctcgctgccgacgcctcccacgacctcatgctcaagcgcctcaactttgagctcgtccagaggaaagagttatgcaagctacatgagaaattaggacaacagaggggcagcttgctggagacaattgctaatcagaaaaagtttctttcaagcctgccatcacatttgaaatcattgaagaaagcatcactgccagtgcagcaacagttggggatgcaacataccaagaaactaaagcagcaccatgctgctgagttacttcctactccgctttatatagcatacactcagctgctagggcagaaagaagcatttggagagaatattgaagtagagatcgcgggaagcacaaaggatgcccaaatatttgctcaacaacaagccaagaaggaaaacacaggcactctttcaagtggcgacaacagaatggatgatgatgtgattgatgatgaagaagatgctcagagaagaagatcaagatccaaaaagaatgtggtgaaggaagctaataatccagcagtggcctatcaacttcacccacttaaaattatacttcatgtatatgatactgaagattctggtagcaaacgccgtaaactcatcaccctgaggtttgaatacttggcaaagttgaatgttgtttgtgtcggaattgaagattcagagggtctggacagtaatatcttgtccaacctatttccagatgacactggtttagatctgcctcaccagcagggatatgttttgttactacatctgtatctagtatcttcttggggcctctcatttacgtcagctgaaatagtgacttgtcaattttctcagatggctaagatttatgttggggaggttccaaacttcagcgacaaggattcaaggccatacaagtgggcacaacatttaggtggtatcgactttttgcctgaagtgcctccatctgttggggatgattctagcagagcattaaacactgctgatttgtcatctgggcttgctctgtaccgtcagcagaaccgtgcacagactattttgcagaggatccgcttgcggaaagttgcacagatggctcttatgtgagtcactggtctatgttttttgctgtttgggacatcgatgaaaaaaaccggatggcagattagcctgagagtgaccgtgtaatttgactgacgattttgagctaatgatgcttttgcttcattgcacatgtcattctgagttatggcaatactatgaatcatttaccaggcagaaattgtgaaacataccatttatatcttcttcatatgttctctacatattgattcaaagctaattattggcgaccttcattataatgttattcatgactgttatatacatggcctgtttgattggtagcatccctttgaagttttcgagtctctttgattacaggtggcaa

SEQ ID NO: 51591 - DNA, 3041 bp, Zea Mays
gacggatccgacacacttccgaattccgatccacccacttcatcaccaaggccgtcgtctctccccacgccggccgaacggatggcggcggcgccgactgcggatgccatggacgtcgacgcgccggctaggacgctgactacctctccggccaccaagttgcgctcccctcacgacctcctggcagagacacgcgcctccatcgagaaagtcgcagcccggatactcgccatcaagaaagacggcgcccccaagtcggagctccgcgagcttgtcactcagatgtctctgcacctcgtcacgctacgccaagtgaacagagagatactgatggaggaggacaaggtcaaggcggagacggaggccgcgaaggcgccggtggactccacgacgctgcagctgcataacctgttgtacgagaagaaccactacgtgaaggccataagagcgtgtcttgactttcagacgaagtatccggggatagagcttgtgcccgaggaggagttccagcgttccgcgcccgcagacatccttgagaagaccctcgctgccgacgcctcccacgacctcatgctcaagcgcctcaactttgagctcgtccagaggaaagagttatgcaagctacatgagaaattaggacaacagaggggcagcttgctggagacaattgctaatcagaaaaagtttctttcaagcctgccatcacatttgaaatcattgaagaaagcatcactgccagtgcagcaacagttggggatgcaacataccaagaaactaaagcagcaccatgctgctgagttacttcctactccgctttatatagcatacactcagctgctagggcagaaagaagcatttggagagaatattgaagtagagatcgcgggaagcacaaaggatgcccaaatatttgctcaacaacaagccaagaaggaaaacacaggcactctttcaagtggcgacaacagaatggatgatgatgtgattgatgatgaagaagatgctcagagaagaagatcaagatccaaaaagaatgtggtgaaggaagctaataatccagcagtggcctatcaacttcacccacttaaaattatacttcatgtatatgatactgaagattctggtagcaaacgccgtaaactcatcaccctgaggtttgaatacttggcaaagttgaatgttgtttgtgtcggaattgaagattcagagggtctggacagtaatatcttgtccaacctatttccagatgacactggtttagatctgcctcaccagatggctaagatttatgttggggaggttccaaacttcagcgacaaggattcaaggccatacaagtgggcacaacatttaggtggtatcgactttttgcctgaagtgcctccatctgttggggatgattctagcagagcattaaacactgctgatttgtcatctgggcttgctctgtaccgtcagcagaaccgtgcacagactattttgcagaggatccgcttgcggaaagttgcacagatggctcttatgtggcaacttgattatttgacaaagctgaagtggcctcgaatagaacataagaatgcaccatgggcatcacgcaacccactgtgcagtctacatagttggtcattgacaagttatcctgagtcatctcgttctattttgatgctaagtggtgctgcaagcaatgttgacagtgatgtagagagatctgtgacaaactgggaagaaactgagagtatcagggaggatggggagcttccagttgttattcctgctgagaatgagccaaatggttctacaattttgcaacctgaggtgtcagctgagatccggagccattctagaggcttatctcttatatcaaagagtgcaacaccatctaagctaagcatctcacgaagttttggtagaaatgaggacgatcttgatctcttgatgtatagcgacagcgagttggaggaccagccctgcattcttgacgaaactgaaaaagctactagcccgattagagacagattctgggaggagtatgcttccaaggaattcaccatggtcctgagtaaaactatgaagaatggtctaaaagtcatgctggaagccaaggttaagataagtatggagtatcctcttagacctccccttttcagattacgtttgctctcagaaaagtctgaaattttgaagtggcacaatgatcttcgtgcaatggaagctgaggtaaatcttcacatccttcgaagcatacctctatcatatgaggattatatattgactcaccaagttatgtgcctggctatgctgtttgacatgcattttgatgaggaaaacgagaaaagaaaagtcacttcagtgatcgatgttggtctttgcaaacctgttagtggaactatgcttactagatcggttaggggtagagacagaaggcaaactatttattggagaggtgctgattgctcttccagttacttgtagagtatgtgcgatcttgattggtcttggttgagttcagcattgactaccctctggagaaatcatttctgggcattggagaactgcatatataacttaagagctgacacagatccccttgtttatcactactgtgtcttgacagcaatagctgggaagatttctctgtgcccatactgactcgagaaactatttacaatgctgatggtaactacacttttatatgcccaggaagaaaagctataggtgcagttaatcaccacaaggcttttactgcatgaatattgtgctatatgtttcaagaagcctttctgctagttcctattttcttggttgttcaaattggtatcctggatctacccagaacatttccaaccgcagttaaatcctggaagcttgcagcattcttttgcaataaacagagcttgcttacccggatgaagatgttggaggacccagcttttaaccaaccttagttatctcaatcgcctatggttggccgacagctatgagccatgggaatgtctgaacgtatggaggaagtaactcagcagcatggtgctatcaaaagt

SEQ ID NO: 51592 - DNA, 3545 bp, Zea Mays
gacggatccgacacacttccgaattccgatccacccacttcatcaccaaggccgtcgtctctccccacgccggccgaacggatggcggcggcgccgactgcggatgccatggacgtcgacgcgccggctaggacgctgactacctctccggccaccaagttgcgctcccctcacgacctcctggcagagacacgcgcctccatcgagaaagtcgcagcccggatactcgccatcaagaaagacggcgcccccaagtcggagctccgcgagcttgtcactcagatgtctctgcacctcgtcacgctacgccaagtgaacagagagatactgatggaggaggacaaggtcaaggcggagacggaggccgcgaaggcgccggtggactccacgacgctgcagctgcataacctgttgtacgagaagaaccactacgtgaaggccataagagcgtgtcttgactttcagacgaagtatccggggatagagcttgtgcccgaggaggagttccagcgttccgcgcccgcagacatccttgagaagaccctcgctgccgacgcctcccacgacctcatgctcaagcgcctcaactttgagctcgtccagaggaaagagttatgcaagctacatgagaaattaggacaacagaggggcagcttgctggagacaattgctaatcagaaaaagtttctttcaagcctgccatcacatttgaaatcattgaagaaagcatcactgccagtgcagcaacagttggggatgcaacataccaagaaactaaagcagcaccatgctgctgagttacttcctactccgctttatatagcatacactcagctgctagggcagaaagaagcatttggagagaatattgaagtagagatcgcgggaagcacaaaggatgcccaaatatttgctcaacaacaagccaagaaggaaaacagcactctttcaagtggcgacaacagaatggatgatgatgtgattgatgatgaagaagatgctcagagaagaagatcaagatccaaaaagaatgtggtgaaggaagctaataatccagcagtggcctatcaacttcacccacttaaaattatacttcatgtatatgatactgaagattctggtagcaaacgccgtaaactcatcaccctgaggtttgaatacttggcaaagttgaatgttgtttgtgtcggaattgaagattcagagggtctggacagtaatatcttgtccaacctatttccagatgacactggtttagatctgcctcaccagatggctaagatttatgttggggaggttccaaacttcagcgacaaggattcaaggccatacaagtgggcacaacatttaggtggtatcgactttttgcctgaagtgcctccatctgttggggatgattctagcagagcattaaacactgctgatttgtcatctgggcttgctctgtaccgtcagcagaaccgtgcacagactattttgcagaggatccgcttgcggaaagttgcacagatggctcttatgtgagtcactggtctatgttttttgctgtttgggacatcgatgaaaaaaaccggatggcagattagcctgagagtgaccgtgtaatttgactgacgattttgagctaatgatgcttttgcttcattgcacatgtcattctgagttatggcaatactatgaatcatttaccaggcagaaattgtgaaacataccatttatatcttcttcatatgttctctacatattgattcaaagctaattattggcgaccttcattataatgttattcatgactgttatatacatggcctgtttgattggtagcatccctttgaagttttcgagtctctttgattacaggtggcaacttgattatttgacaaagctgaagtggcctcgaatagaacataagaatgcaccatgggcatcacgcaacccactgtgcagtctacatagttggtcattgacaagttatcctgagtcatctcgttctattttgatgctaagtggtgctgcaagcaatgttgacagtgatgtagagagatctgtgacaaactgggaagaaactgagagtatcagggaggatggggagcttccagttgttattcctgctgagaatgagccaaatggttctacaattttgcaacctgaggtgtcagctgagatccggagccattctagaggcttatctcttatatcaaagagtgcaacaccatctaagctaagcatctcacgaagttttggtagaaatgaggacgatcttgatctcttgatgtatagcgacagcgagttggaggaccagccctgcattcttgacgaaactgaaaaagctactagcccgattagagacagattctgggaggagtatgcttccaaggaattcaccatggtcctgagtaaaactatgaagaatggtctaaaagtcatgctggaagccaaggttaagataagtatggagtatcctcttagacctccccttttcagattacgtttgctctcagaaaagtctgaaattttgaagtggcacaatgatcttcgtgcaatggaagctgaggtaaatcttcacatccttcgaagcatacctctatcatatgaggattatatattgactcaccaagttatgtgcctggctatgctgtttgacatgcattttgatgaggaaaacgagaaaagaaaagtcacttcagtgatcgatgttggtctttgcaaacctgttagtggaactatgcttactagatcggttaggggtagagacagaaggcaaactatttattggagaggtgctgattgctcttccagttacttgtagagtatgtgcgatcttgattggtcttggttgagttcagcattgactaccctctggagaaatcatttctgggcattggagaactgcatatataacttaagagctgacacagatccccttgtttatcactactgtgtcttgacagcaatagctgggaagatttctctgtgcccatactgactcgagaaactatttacaatgctgatggtaactacacttttatatgcccaggaagaaaagctataggtgcagttaatcaccacaaggcttttactgcatgaatattgtgctatatgtttcaagaagcctttctgctagttcctattttcttggttgttcaaattggtatcctggatctacccagaacatttccaaccgcagttaaatcctggaagcttgcagcattcttttgcaataaacagagcttgcttacccggatgaagatgttggaggacccagcttttaaccaaccttagttatctcaatcgcctatggttggccgacagctatgagaggctgtcgaagtagaggcagaagtgcttgaactgaagcgcgttgtcgtcgtatggcaccctcggcaccatgtcgttgcagtacacgaacctgaagtacctgctgggcttgccgagatacgcgtccgtgaagctcccgaagacccgaacgcctcgtcccctggcgaacattatcaattttgctattattatttgtaggcttccctataatgtcatcgaacccacaa

SEQ ID NO: 51593 - DNA, 1293 bp, Zea Mays
tcctccgagagctacagctgccgatcgaggcaggcagccaggcaccatcaaaccaacccgacgcaaggaaccgcaaccaccgcctcgccgatgtcggcgacgacggcgcccgtgcgccaccggacgtgccgcatgtactggtgctaccagtgcggccgcgcgctccgcatcatctcctacccgtccaccgacgtcttctgcccgcgctgcttcggccgcttcctccacgagatcgacctgccggcgcgccccgcgttcccgccgccgcactttctgccgcacccgttccacccgcagcgccagcacgacggccacccgcgccgctgggtcatatacggcggggagccggcgacgacggtaccaggccgcgcgttccgccagcctgctgcgccggcgcagggacctgccacgcatcctgctcctgcgccggcgccggttcgacggcgcgtgccctccccgccgccgccgccgccggtactgcggcggccgaccacggccccggccgtcgacctcgggaactacttcacggggccgaacctgaacaacctcatcgaggagctgacgcagaacgaccggccggggccggcgccggcgccgccgtcggccatcgactcgctcccgacggtgcggatcaccggggcacacctgtcggacggctcgcagtgccccgtgtgcaaggaggacttcgagctcggggaggccgcgcggcagctgccgtgcaagcacgtctaccactccgactgcatcgtgccgtggctccgcctgcacaactcctgcccggtctgccggtaccagctgccgggagccgggtccacgtccaacggcggcagccaggccgcacctcgcggcggaagcgacggcgacaggaacagcaggaacggggagagggggagagagcccccgacgttggtgcggtgggggccgttctcgtggctgttcccaccgcacgggatggacgaccccgacgacgcgtgggagcacgggcggcgcggcaggcacgacgcggccgacgccggcgcattctacgcttggtggcgctctctgtttctcatatagacgacatgtgtttccagagaagaacgcgcatcctacccagtaactgcatcaatgtcaacggtggaagcctgatgtgaagatgtagacctgctcttgtaggaatgaaatggcacccactgtaaagacgagtaaattacacgtcgttaaaggaggcaagctccatgtaaatcgaatgcctggatgacatatcatgttaacagtaatttctgaaacgcacatttctatgggatgtttctg

SEQ ID NO: 51594 - DNA, 620 bp, Zea Mays
aatctatctattctaccccacctgacctgacccgccgtgcctcaaccggttccgcgcggccaacgcgtcttccggtctgccccgtcggcgataatccgccgcctagcaaagcggccgagccgagccgatggcgctggcgctggccgggctcccccacgccgcttcccgcctcgtgcctcgtgtccgccagcctcccttccgcgctctctgcgccgcagctgcggccggcgatgcctcgaagcggatgctggtactgtacaccaagccggggtgctgcctctgcgatggactcaaggagaagctccacgccgcgtccatgcttgctggcacgccctactcactcgcgtctctcgagctccaggagagggacatcacgacgaatccggagtgggagcggctctaccagtacgagattccagtgttggccaaggtgctccccgacgggaccgaggaagtacttcccagattatcgccacgtctaagtgttgagctcgtacaaaagaaaatttattttgcgtttgatcagtagggagaccgttctgggggaaacgcgaatgttgttgctggcactgcaatactatttttcttgccctcagatgtgtgcttcctatgaaaccgtg

SEQ ID NO: 51595 - DNA, 667 bp, Zea Mays
aatctatctattctaccccacctgacctgacccgccgtgcctcaaccggttccgcgcggccaacgcgtcttccggtctgccccgtcggcgataatccgccgcctagcaaagcggccgagccgagccgatggcgctggcgctggccgggctcccccacgccgcttcccgcctcgtgcctcgtgtccgccagcctcccttccgcgctctctgcgccgcagctgcggccggcgatgcctcgaagcggatgctggtactgtacaccaagccggggtgctgcctctgcgatggactcaaggagaagctccacgccgcgtccatgcttgctggcacgccctactcactcgcgtctctcgagctccaggagagggacatcacgacgaatccggagtgggagcggctctaccagtacgagattccagtgttggccaaggtgctccccgacgggaccgaggaagtacttcccagattatcgccacgtctaagtgttgagctcgtacaaaagaaaatttattttgcgtttgatcagtagggagaccgttctgggggaaacgaaaggaaaagaaaaatcaatgcacgggtgattctagtggatgagaggggatagagtcggtaacctcatctggtgtttgctctagtgtggatccaagctcaatcttcatctcctcaa

SEQ ID NO: 51596 - DNA, 1434 bp, Zea Mays
gcaagcgggcacacgtctcggaatgcaactagccggcgcagcggctattgacgcgatgtcatcgattcccggcgacttccccgccccaatctcccgagtccacgccccatagagcgcacgccctggccacgccacgccacgccgcccgccgcgccccgcaccccgcccgcacgtcgtgccgcgacgatgtcatccggacgcccgtctgaacccgccatgaacgccggcgcaacgcccgcggcgtcgtcccctcccagatcgaagaagcggccgtcccgcatgggcgacggcaactcgagcccaaaccctagcccccgcggctcccccgcccgcaggagcgagctaaagcgcaggcgccgcacatccgccgagtccgccgcgctcgcgctcgccacggtcgccgcgcgcgcgtccgcggccggcgtccgctccgacgcgggcgacggcgccgtcgagaggcgcagacgcccgcgcacccgcgctgaaggaggcgatggggccatccggatgctcggagccgccgccgcccgcgtcggcggaggccgcggcgccgcccagaaacactggagcgacgacgacgagttcacgctcctcaccgccgccgttgccttccgcgaccgcaacggccgggcaccgcgcctcccggacatggccgagctgttcgagtccattagggagtccatctccccgcacatcgaccagttcatggtgtactacaagatcaagcgcctcaagagcaagttccagcactccgccggcccgcgcgaccgtcgcctgcgcgacttgtgctccgtcctatggggtgtcggcgtcgtggcctcttccgaggacgactcggacgtcggcgagcgacgcactgtcccggatgcggcagccatgatgccggtggtcaccgaggtgctcggcgagtactggaaaacgaatgagcgagccatggcaggggtgtcccttgagaagggtctgtccctactggggaaaaaggagggcagactcattgaaaccaaatggaggcagcagcttgatcaagagatgcaatctcagatgcggcggcatgatctggctaaggaagtctgcggcttgctcactgatgccatcaaaggcctcggcccttagctcgccttgcatctgattaagggttgggccaattacagcatcagttcttgagagaaagctggaagccgaaattccccatttgctgtaacattttctcaaaacttacaacacagtgactcctgtaacaaaacaggatggcaagaatgtcatgcttattctagcttgtttagtgaaacagtgatgttctattcagctggcctgtataaaagggctaagtttcgggcaaacctaatgttgttttcatttgtttacatttctcaaggctatgatttgtatgctcggatcctcgtcctcgtagaaatccagaaacgtaagtttgcc

SEQ ID NO: 51597 - DNA, 630 bp, Zea Mays
caagagcatgtcatccaagaagaagagggccgccatagatctctccctggaggcggagaggagtggtgaaggccacagcggcggcggaggcaagggcgatcggcaccggggcaaggataatggtgaggtggacaagaaagaagagcagttcaaagagcaaagagaggcaccggaagagggaactggagaggagaaggtggtagttgaagtggttgtagaccaaggaagggacgacaccagggagatcaaatataggactcaacaagaagaggagatggggaacgacaagcaaccggcagaggacgcgcacggtgacgatgagagcgatggcggcgaaacccgtgcccaagacaagcacgtggtagaggccgccggcaacggtgacggggacgatagctacaccaccatggtgcaagacgaggtgagcgcgatgcaggaggagatggagaagatgaaggaggagaaccggatgctccggcgagtcgtcgaccggaccatgcgtgactacgacgaactgaagaagaaagtagaagcctgctatcagcagcaacaggcagatgagcctaaggagcccgaggtgttcctttccctcggcgccaccgccgccgggactggcggcggattcgcgga

SEQ ID NO: 51598 - DNA, 896 bp, Zea Mays
aaactagggtttccgtgcgcgtccgatgccaaggccccactatgaacgacgggtgccagtggagaaagtatgggcagaaggtcgccaagggcaacccgtgcccgagagcctactaccggtgcaccgtcgcgccgggctgcccggtgcgcaagcaggtgcagcgatgtctagaggacatgtcgatcctggtgacgacgtacgagggtacgcacaaccacccgctccccatcggcgccaccgccatggcctccaccacctccgccgcggccacattcatgctgctctccagcacgagctcctcctccgccacctccgaggtccgcggcggctcagcggcaccttcctacctcagccccccgtacctgctcaactccacctcccaccaccccgccgcttcgccgctgctcggcgcacaaccgtcgtcgtcaatgcccagcgcccctgctggcgtggccaatggcgtgcagcatctcaacatgttcgggcattcgtccatgctcgctcagcaggcgccacatttcagcagcaagtacccgtggtcatcggacccttcgcagtcgcagggcatcggtggtggtctgccagcaggaagcaagaggccgttttggagcaccggcggtgacgagaagacggcaacattgccggacaatgtcggcgcagtcatggcagacccaagtaagttctccgtagcgatcgcggccgcgctcaacagctatattgggaaagacgggcaggtggtcggcggcaaggacggagagagtagcagcaacaaatggggggtggtcgaatcactcccacctccatgactagcaattaatgtggaaaaagttaaggggtgtgtttcttcataatttgttgcgtgtaaacaagctagtcaacatagggagcagtcaaac

SEQ ID NO: 51599 - DNA, 1398 bp, Zea Mays
cgacgcgaaccggccccaccgcaaccaccccccaatttctgagaaaatggcgagaagtgcgggaactaggaggcgtgtggctcgccagctcaagtccacacatcccattccttcataccgatggaagtcaaagcccatgaaaaagccgatgaaaaaatccaaccgaaagcaagtgttgccaaccttgcaaaagatggactgggaagatgccaattgctctgtgtgcatggaatacccacataatgctgtgctcatcctttgctcatcccatgataagggttgtcgtccttatatgtgtggaactagctaccgccactctaattgcttggatcagttcaagaaagcttacaccaagggggcattgcttgaggaagttcctgcaaatagtgttggctctaatctggattcggcgccattggctgcagaaaaaactgactccattgaccttgcatgtccattgtgtcgtggcaaggtgaaagggtggacggtggtggaaccagctcgaagctacctcaatggaaaacgaagaacatgcatgcaggatggttgctcatttgtggggacctacaaggagctccgcaagcatgtcaagttggaacaccctcttgcaaagccaagggaagttgatcctgtccttgagcaaaaatggagattgctcgagattgaaagagagcggcaagatgcgctcagcacgatcacggcaacaatgggcagagccgttgtttttggtgattatgtgctagacttggaggatggaatggactccgaggatgttgacagtgatgctgataatgatggccgtgggacagaaaacactcgtaggatgctactatttattatgcgccaagttgctcaacatcaccaaaaccaaaggctccagaatgcgactggtgcatctgacaatgctgaggacaattatgtggtgagcagtggtgccaatggaaccacaccatactcttaccccttggagggggaggacgagaatggtatggttgtggccggaggcagaagcactgatgtgctgagaccagagaggaggcgccgtcgtcgccgcaggaaccgtgggagattgtttttaggtgctaattgagaggacaggtggccaggtagggtttagccgccagaggagtacatacagaaatgcttccctggtgcctggcattcatcaattcctgtctcaatttacttgatcatgatcatgtaccaagtagttatcttaacatcagctcattgtcataaatttatggtatctcacattcttcgttgaaaaaggaaaacaccgcatccatctcttgcggtttgtgtagcatctatttctgtctattgcttttgttaaagcatttgtttggagatcgtattagattttttaagtgaaacatatctcgttcgatcaggttt

SEQ ID NO: 51600 - DNA, 1424 bp, Zea Mays
cgaggccgcaccagaattgatcctttccgtgcaaattttgccgctccagtccatgtttagatttctgagaaaatggcgagaagtgcgggaactaggaggcgtgtggctcgccagctcaagtccacacatcccattccttcataccgatggaagtcaaagcccatgaaaaagccgatgaaaaaatccaaccgaaagcaagtgttgccaaccttgcaaaagatggactgggaagatgccaattgctctgtgtgcatggaatacccacataatgctgtgctcatcctttgctcatcccatgataagggttgtcgtccttatatgtgtggaactagctaccgccactctaattgcttggatcagttcaagaaagcttacaccaagggggcattgcttgaggaagttcctgcaaatagtgttggctctaatctggattcggcgccattggctgcagaaaaaactgactccattgaccttgcatgtccattgtgtcgtggcaaggtgaaagggtggacggtggtggaaccagctcgaagctacctcaatggaaaacgaagaacatgcatgcaggatggttgctcatttgtggggacctacaaggagctccgcaagcatgtcaagttggaacaccctcttgcaaagccaagggaagttgatcctgtccttgagcaaaaatggagattgctcgagattgaaagagagcggcaagatgcgctcagcacgatcacggcaacaatgggcagagccgttgtttttggtgattatgtgctagacttggaggatggaatggactccgaggatgttgacagtgatgctgataatgatggccgtgggacagaaaacactcgtaggatgctactatttattatgcgccaagttgctcaacatcaccaaaaccaaaggctccagaatgcgactggtgcatctgacaatgctgaggacaattatgtggtgagcagtggtgccaatggaaccacaccatactcttaccccttggagggggaggacgagaatggtatggttgtggccggaggcagaagcactgatgtgctgagaccagagaggaggcgccgtcgtcgccgcaggaaccgtgggagattgtttttaggtgctaattgagaggacaggtggccaggtagggtttagccgccagaggagtacatacagaaatgcttccctggtgcctggcattcatcaattcctgtctcaatttacttgatcatgatcatgtaccaagtagttatcttaacatcagctcattgtcataaatttatggtatctcacattcttcgttgaaaaaggaaaacaccgcatccatctcttgcggtttgtgtagcatctatttctgtctattgcttttgttaaagcatttgtttggagatcgtattagattttttaagtgaaacatatctcgttcgatcaggttt

SEQ ID NO: 51601 - DNA, 1743 bp, Zea Mays
gtttatcatttgcgtgtagatttgggcatatgtgcctcaggaagcaatgaaggtccatttcgtgaattcgttgctgtgtaaattgctaatcccacgttaagtgtactcatgattcgttgcctgaggtccaggcgaaagacctggcgcttagttcttagtgcaaatgttgagtggataaggtgattttaattaagaaaaggtgtatcctttggcaacaagattggcttcagactcgttgattttggaccaaactgtggctaagggaatcctttgccaaggcccatccatgtgctagcgctagcgatctgtactgaacaagggaggaccaagagcaaaagtatacggctaaagaagctagctttgttctttgcttgcgctgatttctgagaaaatggcgagaagtgcgggaactaggaggcgtgtggctcgccagctcaagtccacacatcccattccttcataccgatggaagtcaaagcccatgaaaaagccgatgaaaaaatccaaccgaaagcaagtgttgccaaccttgcaaaagatggactgggaagatgccaattgctctgtgtgcatggaatacccacataatgctgtgctcatcctttgctcatcccatgataagggttgtcgtccttatatgtgtggaactagctaccgccactctaattgcttggatcagttcaagaaagcttacaccaagggggcattgcttgaggaagttcctgcaaatagtgttggctctaatctggattcggcgccattggctgcagaaaaaactgactccattgaccttgcatgtccattgtgtcgtggcaaggtgaaagggtggacggtggtggaaccagctcgaagctacctcaatggaaaacgaagaacatgcatgcaggatggttgctcatttgtggggacctacaaggagctccgcaagcatgtcaagttggaacaccctcttgcaaagccaagggaagttgatcctgtccttgagcaaaaatggagattgctcgagattgaaagagagcggcaagatgcgctcagcacgatcacggcaacaatgggcagagccgttgtttttggtgattatgtgctagacttggaggatggaatggactccgaggatgttgacagtgatgctgataatgatggccgtgggacagaaaacactcgtaggatgctactatttattatgcgccaagttgctcaacatcaccaaaaccaaaggctccagaatgcgactggtgcatctgacaatgctgaggacaattatgtggtgagcagtggtgccaatggaaccacaccatactcttaccccttggagggggaggacgagaatggtatggttgtggccggaggcagaagcactgatgtgctgagaccagagaggaggcgccgtcgtcgccgcaggaaccgtgggagattgtttttaggtgctaattgagaggacaggtggccaggtagggtttagccgccagaggagtacatacagaaatgcttccctggtgcctggcattcatcaattcctgtctcaatttacttgatcatgatcatgtaccaagtagttatcttaacatcagctcattgtcataaatttatggtatctcacattcttcgttgaaaaaggaaaacaccgcatccatctcttgcggtttgtgtagcatctatttctgtctattgcttttgttaaagcatttgtttggagatcgtattagattttttaagtgaaacatatctcgttcgatcaggttt

SEQ ID NO: 51602 - DNA, 979 bp, Zea Mays
ctcgagatggccgctggcgttacggtcctcgccgctgctgcttcagttcagaccgtcgatgggaggtctcaaacaaatcttaaaaacagaatattctctaatctaacagcggcatcattcatacgtaaagagtggagtaaacaaatataattcacacagggggtagcagtagtaggagctggaaaagctagcggaagtggcaatcaggcacggcggagtctgcgacatccagacatgcacgcggtaccacgaaggaaaccaggacggagtaaaggacacggacacaggcgaggacgggtcatatcacgtcgacctgcacaggccaggccccccctgtctcggtcattattgcaccttgtggcctgctggaacctgagcaagtgatcaggtcactcataatgactccatcccagtgacagcagctcgaatccaatgcaatcgcagtacagatttggtcacagagcagcagtaacggctgctgcgatctgcacagcagacgtgcaaatggggacgcggcgtgcaaggacctagtacgtggtttgtgtactgtgcgtcatgcttcagcgtggtttgtactggacgtgacagccatgtgtgtggtgagcagtactgtactactagtgaaaacgggaatcattcccgtacaatgccaaagctattgccagtctatcagtaaaagtcaccatgcggcccagcgataaaacatgggtcctaggggatgtttcatgcctaggttcccgcgataacccatcacttttttaatcgaaactaaactgtttgggttgtgtatggctttggtcgcgtgtgtgtggattgcacattgcagtggcagcatgccagcatttacatttcgctacgtgatccaacgaattcatggtctacgtttcaaccaatggtaccagatgcgcgaatgtgatcgcgatgaatataatggccgatttctagctgcgtcgaaaatggcgcgagggggagaatgagt

SEQ ID NO: 51603 - DNA, 1176 bp, Zea Mays
ccgacgcaaacgaacaatccctcagtcaatcacgcccgacggagacggaagcctcagtcaatcacgcccgacggagacggaggagtcgcggaggaggactgagacgcggacgggaacatcgccgccgaggtctaactccaagtgcgccggacgggagtggacgaggaggaggtgactggtgagcgatttggggtgggcggtgacgggcgtcgcaggtgcgcctcacatggtgcgcgatggcgaaatgggacgctcctgtccgtttgatctgggagaatcgatccgtcccgtttctgacgacggggaagcggtcatggcgacggcggagaacaagaggcccaggctcagcagtggagcagagaagaagccaatgtacctagagtctggaagtggtcatcaactgagaaaaccaatgaggaagtacatccaaaatcttcttaaggttaacatggaggaaccttatggaccagaatggcttttagaagagaaagttaagcgtcgggagatggtggtcccagaagcacgatatatatttgtgaagcaatattctaatgggtttattactgaaagttccatgaaggaaacggaggtggaacatatgtgtgcagtgtgtcctgaaagctgcttgcttggttttgtacactatagatttgttgtggaagaggagcttcctgttctttatgtgtatgagctacaaatggagccttctgctcagggtaaggggctggggaagtttatgatgcagttgattgaacagatcgcttgcaagaaccaaatgggagctgtgatgctaacagttcagaaagctaacactcaagcgatggctttctataccaagttgagatatgtgatatctagtacctcgccatcgcgagtggaccctcagataggacttgaaaaaagctatgagattctatgcaagacatttgactctgaagctaaatcaaaattagaggatggggactattaagagtttagaatgcgtgatgacggtggtccttttagtatgatctgtagtcctgtgtcactgtaatttattattgacagcgtgatgccttgtccaacttgcattctatttgtctgtagcttcttttggaaactgacacatttgttcttgcgactaatgtcttgctggatgcttaaaagttaaaagttaacaactctgctcgtcttgct

SEQ ID NO: 51604 - DNA, 1579 bp, Zea Mays
agacggaagcctcagtcaatcacgcccgacggagacggaggagtcgcggaggaggactgagacgcggacgggaacatcgccgccgaggtctaactccaagtgcgccggacgggagtggacgaggaggaggtgactggtgagcgatttggggtgggcggtgacgggcgtcgcaggtgcgcctcacatggtgcgcgatggcgaaatgggacgctcctgtccgtttgatctgggagaatcgatccgtcccgtttctgacgacggggaagcggtcatggcgacggcggagaacaagaggcccaggctcagcagtggagcagagaagaagccaagcctctgcaggattttatctggggtactacactcattcagtgttcgacaatgggccgagaagtgagatagctggaaatcgctgcaagttcttgaggtccccaggctggataaattttctgcatacgatcaaatagttcattggatgaaatgtaggctgtagggataactttaacacacccattgacgcatcaaccaggtttacatgttgtcctgctgaacttgtgtcaatcatcttttggtgttgttctctgcttggtgtttgaatctgtttttaaacaaaactaatagaggtgcataggtatattgggggctcacacagataattctattctcgtgtgtagattttggaaaggaagaaggccacatatgagcttataagaaaagctgtagctgtgaaggaccatctagctcaattatctgatttccataaatatcagagaaatgtgtacctagagtctggaagtggtcatcaactgagaaaaccaatgaggaagtacatccaaaatcttcttaaggttaacatggaggaaccttatggaccagaatggcttttagaagagaaagttaagcgtcgggagatggtggtcccagaagcacgatatatatttgtgaagcaatattctaatgggtttattactgaaagttccatgaaggaaacggaggtggaacatatgtgtgcagtgtgtcctgaaagctgcttgcttggttttgtacactatagatttgttgtggaagaggagcttcctgttctttatgtgtatgagctacaaatggagccttctgctcagggtaaggggctggggaagtttatgatgcagttgattgaacagatcgcttgcaagaaccaaatgggagctgtgatgctaacagttcagaaagctaacactcaagcgatggctttctataccaagttgagatatgtgatatctagtacctcgccatcgcgagtggaccctcagataggacttgaaaaaagctatgagattctatgcaagacatttgactctgaagctaaatcaaaattagaggatggggactattaagagtttagaatgcgtgatgacggtggtccttttagtatgatctgtagtcctgtgtcactgtaatttattattgacagcgtgatgccttgtccaacttgcattctatttgtctgtagcttcttttggaaactgacacatttgttcttgcgactaatgtcttgctggatgcttaaaagttaaaagttaacaactctgctcgtcttgct

SEQ ID NO: 51605 - DNA, 1162 bp, Zea Mays
agacggaagcctcagtcaatcacgcccgacggagacggaggagtcgcggaggaggactgagacgcggacgggaacatcgccgccgaggtctaactccaagtgcgccggacgggagtggacgaggaggaggtgactggtgagcgatttggggtgggcggtgacgggcgtcgcaggtgcgcctcacatggtgcgcgatggcgaaatgggacgctcctgtccgtttgatctgggagaatcgatccgtcccgtttctgattttggaaaggaagaaggccacatatgagcttataagaaaagctgtagctgtgaaggaccatctagctcaattatctgatttccataaatatcagagaaatgtgtacctagagtctggaagtggtcatcaactgagaaaaccaatgaggaagtacatccaaaatcttcttaaggttaacatggaggaaccttatggaccagaatggcttttagaagagaaagttaagcgtcgggagatggtggtcccagaagcacgatatatatttgtgaagcaatattctaatgggtttattactgaaagttccatgaaggaaacggaggtggaacatatgtgtgcagtgtgtcctgaaagctgcttgcttggttttgtacactatagatttgttgtggaagaggagcttcctgttctttatgtgtatgagctacaaatggagccttctgctcagggtaaggggctggggaagtttatgatgcagttgattgaacagatcgcttgcaagaaccaaatgggagctgtgatgctaacagttcagaaagctaacactcaagcgatggctttctataccaagttgagatatgtgatatctagtacctcgccatcgcgagtggaccctcagataggacttgaaaaaagctatgagattctatgcaagacatttgactctgaagctaaatcaaaattagaggatggggactattaagagtttagaatgcgtgatgacggtggtccttttagtatgatctgtagtcctgtgtcactgtaatttattattgacagcgtgatgccttgtccaacttgcattctatttgtctgtagcttcttttggaaactgacacatttgttcttgcgactaatgtcttgctggatgcttaaaagttaaaagttaacaactctgctcgtcttgct

SEQ ID NO: 51606 - DNA, 1145 bp, Zea Mays
agacggaagcctcagtcaatcacgcccgacggagacggaggagtcgcggaggaggactgagacgcggacgggaacatcgccgccgaggtctaactccaagtgcgccggacgggagtggacgaggaggaggtgactggtgagcgatttggggtgggcggtgacgggcgtcgcaggtgcgcctcacatggtgcgcgatggcgaaatgggacgctcctgtccgtttgatctgggagaatcgatccgtcccgtttctgacgacggggaagcggtcatggcgacggcggagaacaagaggcccaggctcagcagtggagcagagaagaagccaagtaggaaggagtgtacctagagtctggaagtggtcatcaactgagaaaaccaatgaggaagtacatccaaaatcttcttaaggttaacatggaggaaccttatggaccagaatggcttttagaagagaaagttaagcgtcgggagatggtggtcccagaagcacgatatatatttgtgaagcaatattctaatgggtttattactgaaagttccatgaaggaaacggaggtggaacatatgtgtgcagtgtgtcctgaaagctgcttgcttggttttgtacactatagatttgttgtggaagaggagcttcctgttctttatgtgtatgagctacaaatggagccttctgctcagggtaaggggctggggaagtttatgatgcagttgattgaacagatcgcttgcaagaaccaaatgggagctgtgatgctaacagttcagaaagctaacactcaagcgatggctttctataccaagttgagatatgtgatatctagtacctcgccatcgcgagtggaccctcagataggacttgaaaaaagctatgagattctatgcaagacatttgactctgaagctaaatcaaaattagaggatggggactattaagagtttagaatgcgtgatgacggtggtccttttagtatgatctgtagtcctgtgtcactgtaatttattattgacagcgtgatgccttgtccaacttgcattctatttgtctgtagcttcttttggaaactgacacatttgttcttgcgactaatgtcttgctggatgcttaaaagttaaaagttaacaactctgctcgtcttgct

SEQ ID NO: 51607 - DNA, 1143 bp, Zea Mays
agacggaagcctcagtcaatcacgcccgacggagacggaggagtcgcggaggaggactgagacgcggacgggaacatcgccgccgaggtctaactccaagtgcgccggacgggagtggacgaggaggaggtgactggtgagcgatttggggtgggcggtgacgggcgtcgcaggtgcgcctcacatggtgcgcgatggcgaaatgggacgctcctgtccgtttgatctgggagaatcgatccgtcccgtttctgacgacggggaagcggtcatggcgacggcggagaacaagaggcccaggctcagcagtggagcagagaagaagccaagtaggaaggagtgtacctagagtctggaagtggtcatcaactgagaaaaccaatgaggaagtacatccaaaatcttcttaaggttaacatggaggaaccttatggaccagaatggcttttagaagagaaagttaagcgtcgggagatggtggtcccagaagcacgatatatatttgtgaagcaatattctaatgggtttattactgaaagttccatgaaggaaacggaggtggaacatatgtgtgcagtgtgtcctgaaagctgcttgcttggttttgtacactatagatttgttgtggaagaggagcttcctgttctttatgtgtatgagctacaaatggagccttctgctcagggtaaggggctggggaagtttatgatgcagttgattgaacagatcgcttgcaagaaccaaatgggagctgtgatgctaacagttcagaaagctaacactcaagcgatggctttctataccaagttgagatgtgatatctagtacctcgccatcgcgagtggaccctcagataggacttgaaaaaagctatgagattctatgcaagacatttgactctgaagctaaatcaaaattagaggatggggactattaagagtttagaatgcgtgatgacggtggtccttttagtatgatctgtagtcctgtgtcactgtaatttattattgacagcgtgatgccttgtccaacttgcattctatttgtctgtagcttcttttggaaactgacacatttgttcttgcgactaatgtcttgctggatgcttaaaagttaaaagttaacaactctgctcgtcttgct

SEQ ID NO: 51608 - DNA, 1788 bp, Zea Mays
agacggaagcctcagtcaatcacgcccgacggagacggaggagtcgcggaggaggactgagacgcggacgggaacatcgccgccgaggtctaactccaagtgcgccggacgggagtggacgaggaggaggtgactggtgagcgatttggggtgggcggtgacgggcgtcgcaggtgcgcctcacatggtgcgcgatggcgaaatgggacgctcctgtccgtttgatctgggagaatcgatccgtcccgtttctgacgacggggaagcggtcatggcgacggcggagaacaagaggcccaggctcagcagtggagcagagaagaagccaagtaggaaggaggtccttctcttttctctcctgcgtcgacttccttgtcttcctttacccccattgataatgcatacttgcgccattggttaatgcatatttgcgcttgctattgtgtatggccacaaaaaatctactagtagtgcttatgggcagaacagaaaagctctcgtaggtttctaatactcatttgttccgttatactgagaggcctctgcaggattttatctggggtactacactcattcagtgttcgacaatgggccgagaagtgagatagctggaaatcgctgcaagttcttgaggtccccaggctggataaattttctgcatacgatcaaatagttcattggatgaaatgtaggctgtagggataactttaacacacccattgacgcatcaaccaggtttacatgttgtcctgctgaacttgtgtcaatcatcttttggtgttgttctctgcttggtgtttgaatctgtttttaaacaaaactaatagaggtgcataggtatattgggggctcacacagataattctattctcgtgtgtagattttggaaaggaagaaggccacatatgagcttataagaaaagctgtagctgtgaaggaccatctagctcaattatctgatttccataaatatcagagaaatgtgtacctagagtctggaagtggtcatcaactgagaaaaccaatgaggaagtacatccaaaatcttcttaaggttaacatggaggaaccttatggaccagaatggcttttagaagagaaagttaagcgtcgggagatggtggtcccagaagcacgatatatatttgtgaagcaatattctaatgggtttattactgaaagttccatgaaggaaacggaggtggaacatatgtgtgcagtgtgtcctgaaagctgcttgcttggttttgtacactatagatttgttgtggaagaggagcttcctgttctttatgtgtatgagctacaaatggagccttctgctcagggtaaggggctggggaagtttatgatgcagttgattgaacagatcgcttgcaagaaccaaatgggagctgtgatgctaacagttcagaaagctaacactcaagcgatggctttctataccaagttgagatatgtgatatctagtacctcgccatcgcgagtggaccctcagataggacttgaaaaaagctatgagattctatgcaagacatttgactctgaagctaaatcaaaattagaggatggggactattaagagtttagaatgcgtgatgacggtggtccttttagtatgatctgtagtcctgtgtcactgtaatttattattgacagcgtgatgccttgtccaacttgcattctatttgtctgtagcttcttttggaaactgacacatttgttcttgcgactaatgtcttgctggatgcttaaaagttaaaagttaacaactctgctcgtcttgct

SEQ ID NO: 51609 - DNA, 1237 bp, Zea Mays
agacggaagcctcagtcaatcacgcccgacggagacggaggagtcgcggaggaggactgagacgcggacgggaacatcgccgccgaggtctaactccaagtgcgccggacgggagtggacgaggaggaggtgactggtgagcgatttggggtgggcggtgacgggcgtcgcaggtgcgcctcacatggtgcgcgatggcgaaatgggacgctcctgtccgtttgatctgggagaatcgatccgtcccgtttctgacgacggggaagcggtcatggcgacggcggagaacaagaggcccaggctcagcagtggagcagagaagaagccaaattttggaaaggaagaaggccacatatgagcttataagaaaagctgtagctgtgaaggaccatctagctcaattatctgatttccataaatatcagagaaatgtgtacctagagtctggaagtggtcatcaactgagaaaaccaatgaggaagtacatccaaaatcttcttaaggttaacatggaggaaccttatggaccagaatggcttttagaagagaaagttaagcgtcgggagatggtggtcccagaagcacgatatatatttgtgaagcaatattctaatgggtttattactgaaagttccatgaaggaaacggaggtggaacatatgtgtgcagtgtgtcctgaaagctgcttgcttggttttgtacactatagatttgttgtggaagaggagcttcctgttctttatgtgtatgagctacaaatggagccttctgctcagggtaaggggctggggaagtttatgatgcagttgattgaacagatcgcttgcaagaaccaaatgggagctgtgatgctaacagttcagaaagctaacactcaagcgatggctttctataccaagttgagatatgtgatatctagtacctcgccatcgcgagtggaccctcagataggacttgaaaaaagctatgagattctatgcaagacatttgactctgaagctaaatcaaaattagaggatggggactattaagagtttagaatgcgtgatgacggtggtccttttagtatgatctgtagtcctgtgtcactgtaatttattattgacagcgtgatgccttgtccaacttgcattctatttgtctgtagcttcttttggaaactgacacatttgttcttgcgactaatgtcttgctggatgcttaaaagttaaaagttaacaactctgctcgtcttgct

SEQ ID NO: 51610 - DNA, 1073 bp, Zea Mays
gtcaattaaaagcgtacgtcgcccaccttgctttcccctaggccctagctggtggaggccgcacaacacgctactgaaatcctcctacctaaaccctaatttgatctgcggcctctcggtcatcgattctcaaagcaattccaattcatggaggaaatcctcgatccatcgattctctctaggcaattcatggaggaaatcaggtgtgctctggaggaagcacgggaggagcctgatcggaagttgaagacattacagctcccggaggaggaggaggagggttcccgaggcgacaccgtggatgaggaggacagcgacgatgagtttaagggtttcgacgagaatggcgacctgtgtctgccattcgtcgtctcctgggatccgccaccagtactagtttgcacggcaggagcaagttttacgatggaggaagcagaagaaatagttgactctgtcaatgaaaggaacgatgacctgctctcagcatggtgtgaaatggttaacaacaaagtgactcctttgcctgcaacgcctctacatattcttccagccataaccacattctgtgtttctggatatgagtgctaccacctgcgatattggactgaaattacttctgaaactgatccagatcatccatatttcaaaccctgtgagatgatgcaagtgttctccttgggattatcaagccctctcactcatcctgttaatatttatgggtatttttctgttcgtgataactgggaaccactccgcaattatctatttaagcgctcaagagctgatccagccatgatttctcaggcaagtgatgcttgttcttgttctgaatagagaatctttgtactgtcatttataactattgatatgttatacaacagtgtaaatagataatgttacaactcaagtattacatgcacctgttgccggaataagagtgtgcacgatactgaccgacgggcctgtcgtaggtgactgacgggcccatcttactcacacctctttggcgttgttcctaaggctgattccaactgcctgccaagtccccctattcttattttctattcatattt

SEQ ID NO: 51611 - DNA, 1378 bp, Zea Mays
cgcccaccttgctttcccctaggccctagctggtggaggccgcacaacacgctactgaaatcctcctacctaaaccctaatttgatctgcggcctctcggtcatcgattctcaaagcaattccaattcatggaggaaatcctcgatccatcgattctctctaggcaattcatggaggaaatcaggtgtgctctggaggaagcacgggaggagcctgatcggaagttgaagacattacagctcccggaggaggaggaggagggttcccgaggcgacaccgtggatgaggaggaggaggaggaggaggaggaggaggagggttcccgaggcgacaccgtggatgaggaggacagcgacgatgagtttaagggtttcgacgagaatggcgacctgtgtctgccattcgtcgtctcctgggatccgccaccagtactagtttgcacggcaggcaatgataacctcgtcgctacccaaattgttttctctatcaaaattcgttatgtttggaaactccacaagcaacatccttagaccaaagagaacgccgctaagaattgtgtaacatttaagatctacgatagttatgaatgacagtttcaaaatcgtgtgatatcaaaatatttgggttttgcaaatcagcaatattcaggcagttactaaaaaaagagtttatacagaccgtataaccagctgaatacaactgttttttcttcaggagcaagttttacgatggaggaagcagaagaaatagttgactctgtcaatgaaaggaacgatgacctgctctcagcatggtgtgaaatggttaacaacaaagtgactcctttgcctgcaacgcctctacatattcttccagccataaccacattctgtgtttctggatatgagtgctaccacctgcgatattggactgaaattacttctgaaactgatccagatcatccatatttcaaaccctgtgagatgatgcaagtgttctccttgggattatcaagccctctcactcatcctgttaatatttatgggtatttttctgttcgtgataactgggaaccactccgcaattatctatttaagcgctcaagagctgatccagccatgatttctcaggcaagtgatgcttgttcttgttctgaatagagaatctttgtactgtcatttataactattgatatgttatacaacagtgtaaatagataatgttacaactcaagtattacatgcacctgttgccggaataagagtgtgcacgatactgaccgacgggcctgtcgtaggtgactgacgggcccatcttactcacacctctttggcgttgttcctaaggctgattccaactgcctgccaagtccccctattcttattttctattcatattt

SEQ ID NO: 51612 - DNA, 3224 bp, Zea Mays
ctttgatcgattccactgcaccacgcttctctccatttctttctggcgagagagagcgagacagcgagcgggcgcctccctcctgagctgtagtgtgctgctccgtttggaccagcgagattactgccgcgtattgtacctccctccgctaccaccaccaccaccacctgcgtagcagcgaggttatgtagcgcctcggaggaggagctagctgtagctagacacctcgtggtactagtactagtagagccgcccgctatataccgctaggccactggagtagcttgccaggtccaagcagccagccctcccggcccggattgcgctcgaagcaagcggccgcccgaggcgaggcgtgcgcgcgccgcgatggacttcggcgacgacgtcatggacggcggctccgacgcgcagcgccgcaagaagagataccaccgccacactccgcgccagattcagcagctcgaggcgatgttcaaggagtgcccgcacccggacgagaaccagcggatgcagctgagcagggagctggggctggagccccggcagatcaagttctggttccagaaccgccggacgcagatgaaggcgcagcacgagcgccaggacaactgtttcctgcgcgcggagaacgacaagatccggtgcgagaacatcgccatgcaggaggcgctccggaacgtcatctgccccacctgcggcggcccgcccgtcgccgacgaccattttgacgagcagaagctgcgcatggagaacgcgcgactcaaagaagaggcaagccgtttcgcgttcaccattgcgcttgcgcccggtccggcctctctcgacgggcccgccattttaccgcgctctagtttcacattcacaagcggcgaccttgaccgggtgtccagcctgacgtccaagtacctggggcggcccatcacgcagctgccgtcggcgcaggcgctgtccatgtcgtcgctggacctgtccgtcggcgggctcggcggcccgtcgctggacctcgacctcctcagcggcggctcctcggggtatcccccgttccacctcctcccgatggcggtgtcggagatggagcggcccatgatggccgagatggcgacgcgcgccatggacgagctcatcaggatggcgcaggccggcgagcacctgtgggtcaagacgggcggccgcgaggtgctcaatgtcgacacgtacgacagcatcttcgccaagcccgacggctcgttccgcggcccggacgtgcacgtcgagggctcccgcgagacggggctcgtcttcatgagcgccatcggcctcgtcgacatgttcatggactcgagcaagtggacggagctcttccctgccatcgtgtccaaagcgcgcacggtcgacgtcctcgtgaacggcatgggcgggcggagcgagtctttgcttctgatgtacgaggagctgcacgtgatgtcgccggtcgtcccgacgcgcgagttctgcttcctccgctactgcaggcagatcgagcacgggctatgggcgatcgcggacatctcggtggaccagcagcagcgcgacgcgaggttcggcgcgcccccgtcgcgctcgtgccgcctcccgtcgggatgcctcatcgccgacatggccgacggctcgtccaaggtgacctgggtcgagcacatggagatcgaggatcgggttcccatccacctgctctaccgcgacctcgtcctcagcggggcggcgttcggcgcgcaccgttggctcgccgcgctgcagagggcgtgcgagcggtgcgcgtgcctcgccacggccggcattatgccgcaccgggacattgcagcggcaggagtgacgccggaagggaagcggagcatgatgaagctgtcgcagcggatggtgaacagcttctgcgcgagccttagcgcgtcgcagctccaccggtggacgacgctgtcggggcccaacgacgtgggcgtccgcgtcatggtgcaccgcagcacggacccggggcagcccagcggcgtggtgctcagcgcggccacgtccatctggctgccggtcccgtgcgaccgggcgtttgcctttgtccgcgacgagcatacgcgctcccagtgggacgtgctgtcgcacggcaacccggtgcaggaggtgtcgcgcatccccaacggctctcaccctggaaactgcatctccttgctgagaggcctgaacgcgagccagaacagcatgctgatcctgcaggagagctgcaccgacgcgtcaggctcgctggtggtgtacgcgccgatcgacatcccggcggccaacgtggtgatgagcggcgaggacccgtccgcgatcccgctcctgccgtccggcttctccatcctgcccgacgggcggcccggcgcgtcgtcgtcgagggccggccaggcgccgtcggcggggtcgctggtgacggtggcgttccagatcctggtgagcagcctgccgtcggcgaagctgaacgccgagtcggtggcgacggtcaacagcctcatcagcaccactgtggagcaaattaaggcggccttgaattgcgccagccattgatggagccctgcccggccgatggatccatatggaattgatgcgtgcgtgcatgcatgcacgcgtaggtctcttctcctcccctcggccggccgcctgccgctcgcctgctggctgctgcgaggagtgaattcccttcaaggcgctggttcgcgacggggttcttggttggttgggggccttcaatgctggccattcatggaggcggggctgctgccatggtgtcgcccgcttggggttcacctgccgctgttgctgcgccgtccgatcacccatgatcattcagctctctctctctctctctcttcccgccactcatgcatgcatgatagcttttcctcttgctctagcatctaggtttcccgttcctgttacaggatttgaagcttgctcgcgaggctttgcatgaaacggaggagtcaagaacgcaccatgctcgtctcattcctcttgctgccgtcacgctcggttgttaattaattccattgctcttttaatttgtgcctcccccctctccctagtttttgcagtctcacattctgtagtctgcagcagaggatgatgaatggttcgggtattgacttctgtctaatggtgttaagccttcaatgatcattagttctacttgttttttagtagagataattaagacaaataccactgtcactgctttgatt

SEQ ID NO: 51613 - DNA, 4571 bp, Zea Mays
ctcattgcttattcccccgccacccccgcccaaaaaagaaaaagaaaaaaaacaccctcccttctccttgcttgtcagctcgcacccatggaaccctcgtcgccggccaccacggccaccttccctgctgccgtagaagaacatgagacgtaccctcccatggtgtcatcctctctattcccacttttccccttcgccgcctccacctcctctgctccccccgccgaatcccaatggctttcaaaccctagcttctccttcgatgcctcctccctgaacatcccggctaccacctcatcgtcgctcccgtcgccgcagagccactcgtccgatgaggacacgccgctgcaggccgctcctgcgaaatacgagctggtgccttcttcgccgtcctccgacgaggagagggggtcgcggaggaagagaagtgggaggaggaaacggaagcgcgagaaggagcgctatgatggggcagcgacatcgcggaaggctgggattcgtgcctgggctggattggagacgaagccagccaaggattactatgtcgacgcgaagggcgaccatgataacctggcttttggatccctctacagaatggatgttgcacgctacagatcccagaatatgatggaggcatttggtttaaatcatctgaggtttggttcatcacatattgatttggattcagacttggatggaatggataacaaagtaagagctggaggccgttactattctgcaaaaaatgcagtttctgaaagaaataaaggtttcaaacatctgaaaatatttaagggaaacacctctgtaatgctcgctgaagattttgtcccatttggtacacaatcacttcctttgaaaagcacaactgtggaacaagagctagaggagtcttgggaagatgaaatacttcgccggactagggaattcaataagatgtctcgtgaacgccctcacgatgaaaaagtttggctggctttcgctcaatttcaggacaaagttgctagcactcagccacaaaaggctgctcgtttacaaactaccgaaaggaaaattagcatattggagaaagctgtggagctcaatccagatagtgaggaattattgctttgccttctgaagtcatatggcaagagggacaacactgagactctattgactaaatgggagcaaatacttacgaagcacccagatagctctacgttgtggaaacagtatctgcttctgtgccaaggggaattctccagattcaaagtttctgaaattcggaagtcctacgtgtatgctgtacaggctctatctgcagcttgcaccaagttatgtaggcaggataataaaagcatggattccaaatcttcatccttagttcaactagaagtggggttggtggatatatttgttaatctgtgccgatttgagtggcagacaggacatcgggaactagcaactgggctatttcaggcgcagatggagtttagcttatttgcccctcctttgtatctgacaacaagcagtaagcaaaggctctttgaacacttctggaacagtggtggtgccagaattggggaagatggagctcttggatggtctgaatggttagcaaaagacgaggagagtagacaaaagttgtctatgcaagaaaattcacaagagactgaaacaggaggctggagtggttggtttgatccttctctgggtaatactgagacaaatgatttatcaaacaaatcactggaaccatcattgaccgatggaaatgatgctgaagaccttgatgctgaggactcaccagcacaagatgatgttgaatccttgctgaaaaagcttggtatcgatgtagatgcagagtccaatagtgaagttaaagacgcagaaacctggaatagatgggcctcaatggagctgtcacgggacaatcagcaatggatgcctcttcatgaaaattatggatcaattcattgtggtgatgctccatctggggaagacaatgaccagctttccagagtaattttgtttgaggatgtaactgagttcttgttttctctatcttcagaggaggcccgcttttctctgatgtgccaatttattgatttttatggtggcaaaatctcaagatggacatcaacaaacagtccaagttggctcgatcgaatattgagcttagagaatattacagatgacatcctggaagatctaggtgctgtatctgacgttgtaaacaagaaccaaagttcatatagttgtaaatataaattggaatcattactgggaagcatgtgtgacctttcacaaaggccgggcctgatgaaatttctcaaaaatgcgatactgcttctgcttggtgttttccctcgtaatcatatcctggaggaagctgttcttgttactacccaaatgtttactcctcaagagaactcttcctccattcaaactaatgcatcacgggctttggccaaaagtatgttgaagaaagaccgacaggattttttgctttgtgggatatatggacgaactgaggcaatgaatgggaacattgaacaagcaaggaagatatttgacatggcactgttatcaactgaagcaacttctgaggatcttaggaagaaggttcccatcctttatctttggtacgccgagatggagattacagtgtccgcttcaagaaacaactctgactcaatgcatcgtgcagtttacatcctatcctgcttagggagcaatctaaaatattctccttttgttggccctatttcaaggcttcaggtcttgagggctcgccaagggtttaaagagcagattagaagctcacgatctgcattttcctgtggtgctataaacaaagaatcagttgctctgatctgctcagcttctttgttcgaaagcatgacaacaggctgttactcgggtcttgaagtgatagaggagacttttccaatgacattttcagagagcaataatttggagtgtgaggatttgtgggtgtactacatcaaaatgcttcaaaaaaatcttaaccaattgaatctatcaagggtctggccaagcatatcacgcggagtgcacaaatatccctacaatccaaaatcatattcagcgacgttaaccctgagttatctttacagtgtatccaacaatctccgtctcacactcgacaaatgtagtcaaagggacccttctgtaatcaccttgctctttgctttgtcctttgaatggggtaaagctggatctgacaatagaatacacagcctgtttgagagagctctagctgatgataagttgcagaagtctgtcctattgtggcgctgttatctagcctatgaggcagaaatagtctgcaactcttctgcagcacggcgtgtgttcttcagagctatacatgcctgtccatggtctaaaagattatggcttgatggtttccaaaagttgggctctgttctgacattgaaggagttgtcagatctccaggaagtgatgcgtgacaaggaattaaacatccgcactgacatctatgagatactcctagaagaagaaacaaatacatgattctggtttgtgtgaagatcccgaaactgccccgcatgacatgctctgcagttataagtttccaaaggttcatgaaatattggttctgcattgctgttttgtggcctataagcatcgaactctgaagtctcaatcaagaacctgctatctatcatcaaataagatggatgggaagtacaatgggcatgccttggattgacaatcttgccaaatatgaccatgttttactatttttgttctttcaagatggaccttgttggctgccgttctgaatatctcacatgattcattatcggtatatagatagaagtggcttcagtgggcccttcaactgcacgataagatcaatgttaggaaggcctattacaaattcctgtacggaaatcatgccacgaacaaaaccgaaacatcaaaagcagcatatatttttgtttgactatcagtaaagcaactgcagccaggttaggggatcctgcagtgtgcttgagtgtccaaacaaaaaggcttcgaatgtatagcttcacctggcgttttgttgaaggtccccaaagttatggactttaagatgctggtatatactggctgggagcacagataagagaagtagcagcactgacatgacggcctcatgtgcttgtgcatactgtattgagtgttcatttctggaggaatcaagccatctgtttatgtgtgctagctggataaagcgctgcttgatgtacctacagggatatggccacatggctatgtacgccataggtcaacctgcattacagggttgttaatgtatctcatcctgggttgcgccttgataatgtgacaggcacgaaatggtagtgtaatttgatttaagtagttgagttttgtagaaacacagttcctggcacgatggtttgttgagtgcatgacagcatgagacaccaagctcagggatgcaggcatcctcatgaaattatgaaaccacgctgctgtggtagctggtatgttggacaaagttccgaggctgcagcttatgtacgtccaattta

SEQ ID NO: 51614 - DNA, 4689 bp, Zea Mays
ctcattgcttattcccccgccacccccgcccaaaaaagaaaaagaaaaaaaacaccctcccttctccttgcttgtcagctcgcacccatggaaccctcgtcgccggccaccacggccaccttccctgctgccgtagaagaacatgagacgtaccctcccatggtgtcatcctctctattcccacttttccccttcgccgcctccacctcctctgctccccccgccgaatcccaatggctttcaaaccctagcttctccttcgatgcctcctccctgaacatcccggctaccacctcatcgtcgctcccgtcgccgcagagccactcgtccgatgaggacacgccgctgcaggccgctcctgcgaaatacgagctggtgccttcttcgccgtcctccgacgaggagagggggtcgcggaggaagagaagtgggaggaggaaacggaagcgcgagaaggagcgctatgatggggcagcgacatcgcggaaggctgggattcgtgcctgggctggattggagacgaagccagccaaggattactatgtcgacgcgaagggcgaccatgataacctggcttttggatccctctacagaatggatgttgcacgctacagatcccagaatatgatggaggcatttggtttaaatcatctgaggtttggttcatcacatattgatttggattcagacttggatggaatggataacaaagtaagagctggaggccgttactattctgcaaaaaatgcagtttctgaaagaaataaaggtttcaaacatctgaaaatatttaagggaaacacctctgtaatgctcgctgaagattttgtcccatttggtacacaatcacttcctttgaaaagcacaactgtggaacaagagctagaggagtcttgggaagatgaaatacttcgccggactagggaattcaataagatgtctcgtgaacgccctcacgatgaaaaagtttggctggctttcgctcaatttcaggacaaagttgctagcactcagccacaaaaggctgctcgtttacaaactaccgaaaggaaaattagcatattggagaaagctgtggagctcaatccagatagtgaggaattattgctttgccttctgaagtcatatggcaagagggacaacactgagactctattgactaaatgggagcaaatacttacgaagcacccagatagctctacgttgtggaaacagtatctgcttctgtgccaaggggaattctccagattcaaagtttctgaaattcggaagtcctacgtgtatgctgtacaggctctatctgcagcttgcaccaagttatgtaggcaggataataaaagcatggattccaaatcttcatccttagttcaactagaagtggggttggtggatatatttgttaatctgtgccgatttgagtggcagacaggacatcgggaactagcaactgggctatttcaggcgcagatggagtttagcttatttgcccctcctttgtatctgacaacaagcagtaagcaaaggctctttgaacacttctggaacagtggtggtgccagaattggggaagatggagctcttggatggtctgaatggttagcaaaagacgaggagagtagacaaaagttgtctatgcaagaaaattcacaagagactgaaacaggaggctggagtggttggtttgatccttctctgggtaatactgagacaaatgatttatcaaacaaatcactggaaccatcattgaccgatggaaatgatgctgaagaccttgatgctgaggactcaccagcacaagatgatgttgaatccttgctgaaaaagcttggtatcgatgtagatgcagagtccaatagtgaagttaaagacgcagaaacctggaatagatgggcctcaatggagctgtcacgggacaatcagcaatggatgcctcttcatgaaaattatggatcaattcattgtggtgatgctccatctggggaagacaatgaccagctttccagagtaattttgtttgaggatgtaactgagttcttgttttctctatcttcagaggaggcccgcttttctctgatgtgccaatttattgatttttatggtggcaaaatctcaagatggacatcaacaaacagtccaagttggctcgatcgaatattgagcttagagaatattacagatgacatcctggaagatctaggtgctgtatctgacgttgtaaacaagaaccaaagttcatatagttgtaaatataaattggaatcattactgggaagcatgtgtgacctttcacaaaggccgggcctgatgaaatttctcaaaaatgcgatactgcttctgcttggtgttttccctcgtaatcatatcctggaggaagctgttcttgttactacccaaatgtttactcctcaagagaactcttcctccattcaaactaatgcatcacgggctttggccaaaagtatgttgaagaaagaccgacaggattttttgctttgtgggatatatggacgaactgaggcaatgaatgggaacattgaacaagcaaggaagatatttgacatggcactgttatcaactgaagcaacttctgaggaagaaggttcccatcctttatctttggtacgccgagatggagattacagtgtccgcttcaagaaacaactctgactcaatgcatcgtgcagtttacatcctatcctgcttagggagcaatctaaaatattctccttttgttggccctatttcaaggcttcaggtcttgagggctcgccaagggtttaaagagcagattagaagctcacgatctgcattttcctgtggtgctataaacaaagaatcagttgctctgatctgctcagcttctttgttcgaaagcatgacaacaggctgttactcgggtcttgaagtgatagaggagacttttccaatgacattttcagagagcaataatttggagtgtgaggatttgtgggtgtactacatcaaaatgcttcaaaaaaatcttaaccaattgaatctatcaagggtctggccaagcatatcacgcggagtgcacaaatatccctacaatccaaaatcatattcagcgacgttaaccctgagttatctttacagtgtatccaacaatctccgtctcacactcgacaaatgtagtcaaagggacccttctgtaatcaccttgctctttgctttgtcctttgaatggggtaaagctggatctgacaatagaatacacagcctgtttgagagagctctagctgatgataagttgcagaagtctgtcctattgtggcgctgttatctagcctatgaggcagaaatagtctgcaactcttctgcagcacggcgtgtgttcttcagagctatacatgcctgtccatggtctaaaagattatggcttgatggtttccaaaagttgggctctgttctgacattgaaggagttgtcagatctccaggaagtgatgcgtgacaaggaattaaacatccgcactgacatctatgagatactcctagaagaagaaacaaatacatgattctggtttgtgtgaagatcccgaaactgccccgcatgacatgctctgcagttataagtttccaaaggttcatgaaatattggttctgcattgctgttttgtggcctataagcatcgaactctgaagtctcaatcaagaacctgctatctatcatcaaataagatggatgggaagtacaatgggcatgccttggattgacaatcttgccaaatatgaccatgttttactatttttgttctttcaagatggaccttgttggctgccgttctgaatatctcacatgattcattatcggtatatagatagaagtggcttcagtgggcccttcaactgcacgataagatcaatgttaggaaggcctattacaaattcctgtacggaaatcatgccacgaacaaaaccgaaacatcaaaagcagcatatatttttgtttgactatcagtaaagcaactgcagccaggttaggggatcctgcagtgtgcttgagtgtccaaacaaaaaggcttcgaatgtatagcttcacctggcgttttgttgaaggtccccaaagttatggactttaagatgctggtatatactggctgggagcacagataagagaagtagcagcactgacatgacggcctcagtaagtaataatgttagttttcattcgctgaggatgggtattattgctagctgtgttttgtttgtgcatactgtattgactgttcatttctcgaggattcgagccatctgttgttcatgtgtgcagtgtgcttgtgcatactgtattgagtgttcatttctggaggaatcaagccatctgtttatgtgtgctagctggataaagcgctgcttgatgtacctacagggatatggccacatggctatgtacgccataggtcaacctgcattacagggttgttaatgtatctcatcctgggttgcgccttgataatgtgacaggcacgaaatggtagtgtaatttgatttaagtagttgagttttgtagaaacacagttcctggcacgatggtttgttgagtgcatgacagcatgagacaccaagctcagggatgcaggcatcctcatgaaattatgaaaccacgctgctgtggtagctggtatgttggacaaagttccgaggctgcagcttatgtacgtccaattta

SEQ ID NO: 51615 - DNA, 4469 bp, Zea Mays
ctcattgcttattcccccgccacccccgcccaaaaaagaaaaagaaaaaaaacaccctcccttctccttgcttgtcagctcgcacccatggaaccctcgtcgccggccaccacggccaccttccctgctgccgtagaagaacatgagacgtaccctcccatggtgtcatcctctctattcccacttttccccttcgccgcctccacctcctctgctccccccgccgaatcccaatggctttcaaaccctagcttctccttcgatgcctcctccctgaacatcccggctaccacctcatcgtcgctcccgtcgccgcagagccactcgtccgatgaggacacgccgctgcaggccgctcctgcgaaatacgagctggtgccttcttcgccgtcctccgacgaggagagggggtcgcggaggaagagaagtgggaggaggaaacggaagcgcgagaaggagcgctatgatggggcagcgacatcgcggaaggctgggattcgtgcctgggctggattggagacgaagccagccaaggattactatgtcgacgcgaagggcgaccatgataacctggcttttggatccctctacagaatggatgttgcacgctacagatcccagaatatgatggaggcatttggtttaaatcatctgaggtttggttcatcacatattgatttggattcagacttggatggaatggataacaaagtaagagctggaggccgttactattctgcaaaaaatgcagtttctgaaagaaataaaggtttcaaacatctgaaaatatttaagggaaacacctctgtaatgctcgctgaagattttgtcccatttggtacacaatcacttcctttgaaaagcacaactgtggaacaagagctagaggagtcttgggaagatgaaatacttcgccggactagggaattcaataagatgtctcgtgaacgccctcacgatgaaaaagtttggctggctttcgctcaatttcaggacaaagttgctagcactcagccacaaaaggctgctcgtttacaaactaccgaaaggaaaattagcatattggagaaagctgtggagctcaatccagatagtgaggaattattgctttgccttctgaagtcatatggcaagagggacaacactgagactctattgactaaatgggagcaaatacttacgaagcacccagatagctctacgttgtggaaacagtatctgcttctgtgccaaggggaattctccagattcaaagtttctgaaattcggaagtcctacgtgtatgctgtacaggctctatctgcagcttgcaccaagttatgtaggataataaaagcatggattccaaatcttcatccttagttcaactagaagtggggttggtggatatatttgttaatctgtgccgatttgagtggcagacaggacatcgggaactagcaactgggctatttcaggcgcagatggagtttagcttatttgcccctcctttgtatctgacaacaagcagtaagcaaaggctctttgaacacttctggaacagtggtggtgccagaattggggaagatggagctcttggatggtctgaatggttagcaaaagacgaggagagtagacaaaagttgtctatgcaagaaaattcacaagagactgaaacaggaggctggagtggttggtttgatccttctctgggtaatactgagacaaatgatttatcaaacaaatcactggaaccatcattgaccgatggaaatgatgctgaagaccttgatgctgaggactcaccagcacaagatgatgttgaatccttgctgaaaaagcttggtatcgatgtagatgcagagtccaatagtgaagttaaagacgcagaaacctggaatagatgggcctcaatggagctgtcacgggacaatcagcaatggatgcctcttcatgaaaattatggatcaattcattgtggtgatgctccatctggggaagacaatgaccagctttccagagtaattttgtttgaggatgtaactgagttcttgttttctctatcttcagaggaggcccgcttttctctgatgtgccaatttattgatttttatggtggcaaaatctcaagatggacatcaacaaacagtccaagttggctcgatcgaatattgagcttagagaatattacagatgacatcctggaagatctaggtgctgtatctgacgttgtaaacaagaaccaaagttcatatagttgtaaatataaattggaatcattactgggaagcatgtgtgacctttcacaaaggccgggcctgatgaaatttctcaaaaatgcgatactgcttctgcttggtgttttccctcgtaatcatatcctggaggaagctgttcttgttactacccaaatgtttactcctcaagagaactcttcctccattcaaactaatgcatcacgggctttggccaaaagtatgttgaagaaagaccgacaggattttttgctttgtgggatatatggacgaactgaggcaatgaatgggaacattgaacaagcaaggaagatatttgacatggcactgttatcaactgaagcaacttctgaggatcttaggaagaaggttcccatcctttatctttggcttcaggtcttgagggctcgccaagggtttaaagagcagattagaagctcacgatctgcattttcctgtggtgctataaacaaagaatcagttgctctgatctgctcagcttctttgttcgaaagcatgacaacaggctgttactcgggtcttgaagtgatagaggagacttttccaatgacattttcagagagcaataatttggagtgtgaggatttgtgggtgtactacatcaaaatgcttcaaaaaaatcttaaccaattgaatctatcaagggtctggccaagcatatcacgcggagtgcacaaatatccctacaatccaaaatcatattcagcgacgttaaccctgagttatctttacagtgtatccaacaatctccgtctcacactcgacaaatgtagtcaaagggacccttctgtaatcaccttgctctttgctttgtcctttgaatggggtaaagctggatctgacaatagaatacacagcctgtttgagagagctctagctgatgataagttgcagaagtctgtcctattgtggcgctgttatctagcctatgaggcagaaatagtctgcaactcttctgcagcacggcgtgtgttcttcagagctatacatgcctgtccatggtctaaaagattatggcttgatggtttccaaaagttgggctctgttctgacattgaaggagttgtcagatctccaggaagtgatgcgtgacaaggaattaaacatccgcactgacatctatgagatactcctagaagaagaaacaaatacatgattctggtttgtgtgaagatcccgaaactgccccgcatgacatgctctgcagttataagtttccaaaggttcatgaaatattggttctgcattgctgttttgtggcctataagcatcgaactctgaagtctcaatcaagaacctgctatctatcatcaaataagatggatgggaagtacaatgggcatgccttggattgacaatcttgccaaatatgaccatgttttactatttttgttctttcaagatggaccttgttggctgccgttctgaatatctcacatgattcattatcggtatatagatagaagtggcttcagtgggcccttcaactgcacgataagatcaatgttaggaaggcctattacaaattcctgtacggaaatcatgccacgaacaaaaccgaaacatcaaaagcagcatatatttttgtttgactatcagtaaagcaactgcagccaggttaggggatcctgcagtgtgcttgagtgtccaaacaaaaaggcttcgaatgtatagcttcacctggcgttttgttgaaggtccccaaagttatggactttaagatgctggtatatactggctgggagcacagataagagaagtagcagcactgacatgacggcctcagattcgagccatctgttgttcatgtgtgcagtgtgcttgtgcatactgtattgagtgttcatttctggaggaatcaagccatctgtttatgtgtgctagctggataaagcgctgcttgatgtacctacagggatatggccacatggctatgtacgccataggtcaacctgcattacagggttgttaatgtatctcatcctgggttgcgccttgataatgtgacaggcacgaaatggtagtgtaatttgatttaagtagttgagttttgtagaaacacagttcctggcacgatggtttgttgagtgcatgacagcatgagacaccaagctcagggatgcaggcatcctcatgaaattatgaaaccacgctgctgtggtagctggtatgttggacaaagttccgaggctgcagcttatgtacgtccaattta

SEQ ID NO: 51616 - DNA, 4713 bp, Zea Mays
ctcattgcttattcccccgccacccccgcccaaaaaagaaaaagaaaaaaaacaccctcccttctccttgcttgtcagctcgcacccatggaaccctcgtcgccggccaccacggccaccttccctgctgccgtagaagaacatgagacgtaccctcccatggtgtcatcctctctattcccacttttccccttcgccgcctccacctcctctgctccccccgccgaatcccaatggctttcaaaccctagcttctccttcgatgcctcctccctgaacatcccggctaccacctcatcgtcgctcccgtcgccgcagagccactcgtccgatgaggacacgccgctgcaggccgctcctgcgaaatacgagctggtgccttcttcgccgtcctccgacgaggagagggggtcgcggaggaagagaagtgggaggaggaaacggaagcgcgagaaggagcgctatgatggggcagcgacatcgcggaaggctgggattcgtgcctgggctggattggagacgaagccagccaaggattactatgtcgacgcgaagggcgaccatgataacctggcttttggatccctctacagaatggatgttgcacgctacagatcccagaatatgatggaggcatttggtttaaatcatctgaggtttggttcatcacatattgatttggattcagacttggatggaatggataacaaagtaagagctggaggccgttactattctgcaaaaaatgcagtttctgaaagaaataaaggtttcaaacatctgaaaatatttaagggaaacacctctgtaatgctcgctgaagattttgtcccatttggtacacaatcacttcctttgaaaagcacaactgtggaacaagagctagaggagtcttgggaagatgaaatacttcgccggactagggaattcaataagatgtctcgtgaacgccctcacgatgaaaaagtttggctggctttcgctcaatttcaggacaaagttgctagcactcagccacaaaaggctgctcgtttacaaactaccgaaaggaaaattagcatattggagaaagctgtggagctcaatccagatagtgaggaattattgctttgccttctgaagtcatatggcaagagggacaacactgagactctattgactaaatgggagcaaatacttacgaagcacccagatagctctacgttgtggaaacagtatctgcttctgtgccaaggggaattctccagattcaaagtttctgaaattcggaagtcctacgtgtatgctgtacaggctctatctgcagcttgcaccaagttatgtaggcaggataataaaagcatggattccaaatcttcatccttagttcaactagaagtggggttggtggatatatttgttaatctgtgccgatttgagtggcagacaggacatcgggaactagcaactgggctatttcaggcgcagatggagtttagcttatttgcccctcctttgtatctgacaacaagcagtaagcaaaggctctttgaacacttctggaacagtggtggtgccagaattggggaagatggagctcttggatggtctgaatggttagcaaaagacgaggagagtagacaaaagttgtctatgcaagaaaattcacaagagactgaaacaggaggctggagtggttggtttgatccttctctgggtaatactgagacaaatgatttatcaaacaaatcactggaaccatcattgaccgatggaaatgatgctgaagaccttgatgctgaggactcaccagcacaagatgatgttgaatccttgctgaaaaagcttggtatcgatgtagatgcagagtccaatagtgaagttaaagacgcagaaacctggaatagatgggcctcaatggagctgtcacgggacaatcagcaatggatgcctcttcatgaaaattatggatcaattcattgtggtgatgctccatctggggaagacaatgaccagctttccagagtaattttgtttgaggatgtaactgagttcttgttttctctatcttcagaggaggcccgcttttctctgatgtgccaatttattgatttttatggtggcaaaatctcaagatggacatcaacaaacagtccaagttggctcgatcgaatattgagcttagagaatattacagatgacatcctggaagatctaggtgctgtatctgacgttgtaaacaagaaccaaagttcatatagttgtaaatataaattggaatcattactgggaagcatgtgtgacctttcacaaaggccgggcctgatgaaatttctcaaaaatgcgatactgcttctgcttggtgttttccctcgtaatcatatcctggaggaagctgttcttgttactacccaaatgtttactcctcaagagaactcttcctccattcaaactaatgcatcacgggctttggccaaaagtatgttgaagaaagaccgacaggattttttgctttgtgggatatatggacgaactgaggcaatgaatgggaacattgaacaagcaaggaagatatttgacatggcactgttatcaactgaagcaacttctgaggatcttaggaagaaggttcccatcctttatctttggtacgccgagatggagattacagtgtccgcttcaagaaacaactctgactcaatgcatcgtgcagtttacatcctatcctgcttagggagcaatctaaaatattctccttttgttggccctatttcaaggcttcaggtcttgagggctcgccaagggtttaaagagcagattagaagctcacgatctgcattttcctgtggtgctataaacaaagaatcagttgctctgatctgctcagcttctttgttcgaaagcatgacaacaggctgttactcgggtcttgaagtgatagaggagacttttccaatgacattttcagagagcaataatttggagtgtgaggatttgtgggtgtactacatcaaaatgcttcaaaaaaatcttaaccaattgaatctatcaagggtctggccaagcatatcacgcggagtgcacaaatatccctacaatccaaaatcatattcagcgacgttaaccctgagttatctttacagtgtatccaacaatctccgtctcacactcgacaaatgtagtcaaagggacccttctgtaatcaccttgctctttgctttgtcctttgaatggggtaaagctggatctgacaatagaatacacagcctgtttgagagagctctagctgatgataagttgcagaagtctgtcctattgtggcgctgttatctagcctatgaggcagaaatagtctgcaactcttctgcagcacggcgtgtgttcttcagagctatacatgcctgtccatgcacttcaaattttcaggtctaaaagattatggcttgatggtttccaaaagttgggctctgttctgacattgaaggagttgtcagatctccaggaagtgatgcgtgacaaggaattaaacatccgcactgacatctatgagatactcctagaagaagaaacaaatacatgattctggtttgtgtgaagatcccgaaactgccccgcatgacatgctctgcagttataagtttccaaaggttcatgaaatattggttctgcattgctgttttgtggcctataagcatcgaactctgaagtctcaatcaagaacctgctatctatcatcaaataagatggatgggaagtacaatgggcatgccttggattgacaatcttgccaaatatgaccatgttttactatttttgttctttcaagatggaccttgttggctgccgttctgaatatctcacatgattcattatcggtatatagatagaagtggcttcagtgggcccttcaactgcacgataagatcaatgttaggaaggcctattacaaattcctgtacggaaatcatgccacgaacaaaaccgaaacatcaaaagcagcatatatttttgtttgactatcagtaaagcaactgcagccaggttaggggatcctgcagtgtgcttgagtgtccaaacaaaaaggcttcgaatgtatagcttcacctggcgttttgttgaaggtccccaaagttatggactttaagatgctggtatatactggctgggagcacagataagagaagtagcagcactgacatgacggcctcagtaagtaataatgttagttttcattcgctgaggatgggtattattgctagctgtgttttgtttgtgcatactgtattgactgttcatttctcgaggattcgagccatctgttgttcatgtgtgcagtgtgcttgtgcatactgtattgagtgttcatttctggaggaatcaagccatctgtttatgtgtgctagctggataaagcgctgcttgatgtacctacagggatatggccacatggctatgtacgccataggtcaacctgcattacagggttgttaatgtatctcatcctgggttgcgccttgataatgtgacaggcacgaaatggtagtgtaatttgatttaagtagttgagttttgtagaaacacagttcctggcacgatggtttgttgagtgcatgacagcatgagacaccaagctcagggatgcaggcatcctcatgaaattatgaaaccacgctgctgtggtagctggtatgttggacaaagttccgaggctgcagcttatgtacgtccaattta

SEQ ID NO: 51617 - DNA, 4607 bp, Zea Mays
ctcattgcttattcccccgccacccccgcccaaaaaagaaaaagaaaaaaaacaccctcccttctccttgcttgtcagctcgcacccatggaaccctcgtcgccggccaccacggccaccttccctgctgccgtagaagaacatgagacgtaccctcccatggtgtcatcctctctattcccacttttccccttcgccgcctccacctcctctgctccccccgccgaatcccaatggctttcaaaccctagcttctccttcgatgcctcctccctgaacatcccggctaccacctcatcgtcgctcccgtcgccgcagagccactcgtccgatgaggacacgccgctgcaggccgctcctgcgaaatacgagctggtgccttcttcgccgtcctccgacgaggagagggggtcgcggaggaagagaagtgggaggaggaaacggaagcgcgagaaggagcgctatgatggggcagcgacatcgcggaaggctgggattcgtgcctgggctggattggagacgaagccagccaaggattactatgtcgacgcgaagggcgaccatgataacctggcttttggatccctctacagaatggatgttgcacgctacagatcccagaatatgatggaggcatttggtttaaatcatctgaggtttggttcatcacatattgatttggattcagacttggatggaatggataacaaagtaagagctggaggccgttactattctgcaaaaaatgcagtttctgaaagaaataaaggtttcaaacatctgaaaatatttaagggaaacacctctgtaatgctcgctgaagattttgtcccatttggtacacaatcacttcctttgaaaagcacaactgtggaacaagagctagaggagtcttgggaagatgaaatacttcgccggactagggaattcaataagatgtctcgtgaacgccctcacgatgaaaaagtttggctggctttcgctcaatttcaggacaaagttgctagcactcagccacaaaaggctgctcgtttacaaactaccgaaaggaaaattagcatattggagaaagctgtggagctcaatccagatagtgaggaattattgctttgccttctgaagtcatatggcaagagggacaacactgagactctattgactaaatgggagcaaatacttacgaagcacccagatagctctacgttgtggaaacagtatctgcttctgtgccaaggggaattctccagattcaaagtttctgaaattcggaagtcctacgtgtatgctgtacaggctctatctgcagcttgcaccaagttatgtaggcaggataataaaagcatggattccaaatcttcatccttagttcaactagaagtggggttggtggatatatttgttaatctgtgccgatttgagtggcagacaggacatcgggaactagcaactgggctatttcaggcgcagatggagtttagcttatttgcccctcctttgtatctgacaacaagcagtaagcaaaggctctttgaacacttctggaacagtggtggtgccagaattggggaagatggagctcttggatggtctgaatggttagcaaaagacgaggagagtagacaaaagttgtctatgcaagaaaattcacaagagactgaaacaggaggctggagtggttggtttgatccttctctgggtaatactgagacaaatgatttatcaaacaaatcactggaaccatcattgaccgatggaaatgatgctgaagaccttgatgctgaggactcaccagcacaagatgatgttgaatccttgctgaaaaagcttggtatcgatgtagatgcagagtccaatagtgaagttaaagacgcagaaacctggaatagatgggcctcaatggagctgtcacgggacaatcagcaatggatgcctcttcatgaaaattatggatcaattcattgtggtgatgctccatctggggaagacaatgaccagctttccagagtaattttgtttgaggatgtaactgagttcttgttttctctatcttcagaggaggcccgcttttctctgatgtgccaatttattgatttttatggtggcaaaatctcaagatggacatcaacaaacagtccaagttggctcgatcgaatattgagcttagagaatattacagatgacatcctggaagatctaggtgctgtatctgacgttgtaaacaagaaccaaagttcatatagttgtaaatataaattggaatcattactgggaagcatgtgtgacctttcacaaaggccgggcctgatgaaatttctcaaaaatgcgatactgcttctgcttggtgttttccctcgtaatcatatcctggaggaagctgttcttgttactacccaaatgtttactcctcaagagaactcttcctccattcaaactaatgcatcacgggctttggccaaaagtatgttgaagaaagaccgacaggattttttgctttgtgggatatatggacgaactgaggcaatgaatgggaacattgaacaagcaaggaagatatttgacatggcactgttatcaactgaagcaacttctgaggcttcaggtcttgagggctcgccaagggtttaaagagcagattagaagctcacgatctgcattttcctgtggtgctataaacaaagaatcagttgctctgatctgctcagcttctttgttcgaaagcatgacaacaggctgttactcgggtcttgaagtgatagaggagacttttccaatgacattttcagagagcaataatttggagtgtgaggatttgtgggtgtactacatcaaaatgcttcaaaaaaatcttaaccaattgaatctatcaagggtctggccaagcatatcacgcggagtgcacaaatatccctacaatccaaaatcatattcagcgacgttaaccctgagttatctttacagtgtatccaacaatctccgtctcacactcgacaaatgtagtcaaagggacccttctgtaatcaccttgctctttgctttgtcctttgaatggggtaaagctggatctgacaatagaatacacagcctgtttgagagagctctagctgatgataagttgcagaagtctgtcctattgtggcgctgttatctagcctatgaggcagaaatagtctgcaactcttctgcagcacggcgtgtgttcttcagagctatacatgcctgtccatggtctaaaagattatggcttgatggtttccaaaagttgggctctgttctgacattgaaggagttgtcagatctccaggaagtgatgcgtgacaaggaattaaacatccgcactgacatctatgagatactcctagaagaagaaacaaatacatgattctggtttgtgtgaagatcccgaaactgccccgcatgacatgctctgcagttataagtttccaaaggttcatgaaatattggttctgcattgctgttttgtggcctataagcatcgaactctgaagtctcaatcaagaacctgctatctatcatcaaataagatggatgggaagtacaatgggcatgccttggattgacaatcttgccaaatatgaccatgttttactatttttgttctttcaagatggaccttgttggctgccgttctgaatatctcacatgattcattatcggtatatagatagaagtggcttcagtgggcccttcaactgcacgataagatcaatgttaggaaggcctattacaaattcctgtacggaaatcatgccacgaacaaaaccgaaacatcaaaagcagcatatatttttgtttgactatcagtaaagcaactgcagccaggttaggggatcctgcagtgtgcttgagtgtccaaacaaaaaggcttcgaatgtatagcttcacctggcgttttgttgaaggtagaaggggacacgttcctgcaccctacactagcttgctgtactaaacatttactgtggtttgttttttaaaggtccccaaagttatggactttaagatgctggtatatactggctgggagcacagataagagaagtagcagcactgacatgacggcctcagtaagtaataatgttagttttcattcgctgaggatgggtattattgctagctgtgttttgtttgtgcatactgtattgactgttcatttctcgaggattcgagccatctgttgttcatgtgtgcagtgtgcttgtgcatactgtattgagtgttcatttctggaggaatcaagccatctgtttatgtgtgctagctggataaagcgctgcttgatgtacctacagggatatggccacatggctatgtacgccataggtcaacctgcattacagggttgttaatgtatctcatcctgggttgcgccttgataatgtgacaggcacgaaatggtagtgtaatttgatttaagtagttgagttttgtagaaacacagttcctggcacgatggtttgttgagtgcatgacagcatgagacaccaagctcagggatgcaggcatcctcatgaaattatgaaaccacgctgctgtggtagctggtatgttggacaaagttccgaggctgcagcttatgtacgtccaattta

SEQ ID NO: 51618 - DNA, 4602 bp, Zea Mays
ctcattgcttattcccccgccacccccgcccaaaaaagaaaaagaaaaaaaacaccctcccttctccttgcttgtcagctcgcacccatggaaccctcgtcgccggccaccacggccaccttccctgctgccgtagaagaacatgagacgtaccctcccatggtgtcatcctctctattcccacttttccccttcgccgcctccacctcctctgctccccccgccgaatcccaatggctttcaaaccctagcttctccttcgatgcctcctccctgaacatcccggctaccacctcatcgtcgctcccgtcgccgcagagccactcgtccgatgaggacacgccgctgcaggccgctcctgcgaaatacgagctggtgccttcttcgccgtcctccgacgaggagagggggtcgcggaggaagagaagtgggaggaggaaacggaagcgcgagaaggagcgctatgatggggcagcgacatcgcggaaggctgggattcgtgcctgggctggattggagacgaagccagccaaggattactatgtcgacgcgaagggcgaccatgataacctggcttttggatccctctacagaatggatgttgcacgctacagatcccagaatatgatggaggcatttggtttaaatcatctgaggtttggttcatcacatattgatttggattcagacttggatggaatggataacaaagtaagagctggaggccgttactattctgcaaaaaatgcagtttctgaaagaaataaaggtttcaaacatctgaaaatatttaagggaaacacctctgtaatgctcgctgaagattttgtcccatttggtacacaatcacttcctttgaaaagcacaactgtggaacaagagctagaggagtcttgggaagatgaaatacttcgccggactagggaattcaataagatgtctcgtgaacgccctcacgatgaaaaagtttggctggctttcgctcaatttcaggacaaagttgctagcactcagccacaaaaggctgctcgtttacaaactaccgaaaggaaaattagcatattggagaaagctgtggagctcaatccagatagtgaggaattattgctttgccttctgaagtcatatggcaagagggacaacactgagactctattgactaaatgggagcaaatacttacgaagcacccagatagctctacgttgtggaaacagtatctgcttctgtgccaaggggaattctccagattcaaagtttctgaaattcggaagtcctacgtgtatgctgtacaggctctatctgcagcttgcaccaagttatgtaggcaggataataaaagcatggattccaaatcttcatccttagttcaactagaagtggggttggtggatatatttgttaatctgtgccgatttgagtggcagacaggacatcgggaactagcaactgggctatttcaggcgcagatggagtttagcttatttgcccctcctttgtatctgacaacaagcagtaagcaaaggctctttgaacacttctggaacagtggtggtgccagaattggggaagatggagctcttggatggtctgaatggttagcaaaagacgaggagagtagacaaaagttgtctatgcaagaaaattcacaagagactgaaacaggaggctggagtggttggtttgatccttctctgggtaatactgagacaaatgatttatcaaacaaatcactggaaccatcattgaccgatggaaatgatgctgaagaccttgatgctgaggactcaccagcacaagatgatgttgaatccttgctgaaaaagcttggtatcgatgtagatgcagagtccaatagtgaagttaaagacgcagaaacctggaatagatgggcctcaatggagctgtcacgggacaatcagcaatggatgcctcttcatgaaaattatggatcaattcattgtggtgatgctccatctggggaagacaatgaccagctttccagagtaattttgtttgaggatgtaactgagttcttgttttctctatcttcagaggaggcccgcttttctctgatgtgccaatttattgatttttatggtggcaaaatctcaagatggacatcaacaaacagtccaagttggctcgatcgaatattgagcttagagaatattacagatgacatcctggaagatctaggtgctgtatctgacgttgtaaacaagaaccaaagttcatatagttgtaaatataaattggaatcattactgggaagcatgtgtgacctttcacaaaggccgggcctgatgaaatttctcaaaaatgcgatactgcttctgcttggtgttttccctcgtaatcatatcctggaggaagctgttcttgttactacccaaatgtttactcctcaagagaactcttcctccattcaaactaatgcatcacgggctttggccaaaagtatgttgaagaaagaccgacaggattttttgctttgtgggatatatggacgaactgaggcaatgaatgggaacattgaacaagcaaggaagatatttgacatggcactgttatcaactgaagcaacttctgaggatcttaggaagaaggttcccatcctttatctttggtacgccgagatggagattacagtgtccgcttcaagaaacaactctgactcaatgcatcgtgcagtttacatcctatcctgcttagggagcaatctaaaatattctccttttgttggccctatttcaaggcttcaggtcttgagggctcgccaagggtttaaagagcagattagaagctcacgatctgcattttcctgtggtgctataaacaaagaatcagttgctctgatctgctcagcttctttgttcgaaagcatgacaacaggctgttactcgggtcttgaagtgatagaggagacttttccaatgacattttcagagagcaataatttggagtgtgaggatttgtgggtgtactacatcaaaatgcttcaaaaaaatcttaaccaattgaatctatcaagggtctggccaagcatatcacgcggagtgcacaaatatccctacaatccaaaatcatattcagcgacgttaaccctgagttatctttacagtgtatccaacaatctccgtctcacactcgacaaatgtagtcaaagggacccttctgtaatcaccttgctctttgctttgtcctttgaatggggtaaagctggatctgacaatagaatacacagcctgtttgagagagctctagctgatgataagttgcagaagtctgtcctattgtggcgctgttatctagcctatgaggcagaaatagtctgcaactcttctgcagcacggcgtgtgttcttcagagctatacatgcctgtccatggtctaaaagattatggcttgatggtttccaaaagttgggctctgttctgacattgaaggagttgtcagatctccaggaagtgatgcgtgacaaggaattaaacatccgcactgacatctatgagatactcctagaagaagaaacaaatacatgattctggtttgtgtgaagatcccgaaactgccccgcatgacatgctctgcagttataagtttccaaaggttcatgaaatattggttctgcattgctgttttgtggcctataagcatcgaactctgaagtctcaatcaagaacctgctatctatcatcaaataagatggatgggaagtacaatgggcatgccttggattgacaatcttgccaaatatgaccatgttttactatttttgttctttcaagatggaccttgttggctgccgttctgaatatctcacatgattcattatcggtatatagatagaagtggcttcagtgggcccttcaactgcacgataagatcaatgttaggaaggcctattacaaattcctgtacggaaatcatgccacgaacaaaaccgaaacatcaaaagcagcatatatttttgtttgactatcagtaaagcaactgcagccaggttaggggatcctgcagtgtgcttgagtgtccaaacaaaaaggcttcgaatgtatagcttcacctggcgttttgttgaaggtccccaaagttatggactttaagatgctggtatatactggctgggagcacagataagagaagtagcagcactgacatgacggcctcagattcgagccatctgttgttcatgtgtgcagtgtgcttgtgcatactgtattgagtgttcatttctggaggaatcaagccatctgtttatgtgtgctagctggataaagcgctgcttgatgtacctacagggatatggccacatggctatgtacgccataggtcaacctgcattacagggttgttaatgtatctcatcctgggttgcgccttgataatgtgacaggcacgaaatggtagtgtaatttgatttaagtagttgagttttgtagaaacacagttcctggcacgatggtttgttgagtgcatgacagcatgagacaccaagctcagggatgcaggcatcctcatgaaattatgaaaccacgctgctgtggtagctggtatgttggacaaagttccgaggctgcagcttatgtacgtccaattta

SEQ ID NO: 51619 - DNA, 4594 bp, Zea Mays
ctcattgcttattcccccgccacccccgcccaaaaaagaaaaagaaaaaaaacaccctcccttctccttgcttgtcagctcgcacccatggaaccctcgtcgccggccaccacggccaccttccctgctgccgtagaagaacatgagacgtaccctcccatggtgtcatcctctctattcccacttttccccttcgccgcctccacctcctctgctccccccgccgaatcccaatggctttcaaaccctagcttctccttcgatgcctcctccctgaacatcccggctaccacctcatcgtcgctcccgtcgccgcagagccactcgtccgatgaggacacgccgctgcaggccgctcctgcgaaatacgagctggtgccttcttcgccgtcctccgacgaggagagggggtcgcggaggaagagaagtgggaggaggaaacggaagcgcgagaaggagcgctatgatggggcagcgacatcgcggaaggctgggattcgtgcctgggctggattggagacgaagccagccaaggattactatgtcgacgcgaagggcgaccatgataacctggcttttggatccctctacagaatggatgttgcacgctacagatcccagaatatgatggaggcatttggtttaaatcatctgaggtttggttcatcacatattgatttggattcagacttggatggaatggataacaaagtaagagctggaggccgttactattctgcaaaaaatgcagtttctgaaagaaataaaggtttcaaacatctgaaaatatttaagggaaacacctctgtaatgctcgctgaagattttgtcccatttggtacacaatcacttcctttgaaaagcacaactgtggaacaagagctagaggagtcttgggaagatgaaatacttcgccggactagggaattcaataagatgtctcgtgaacgccctcacgatgaaaaagtttggctggctttcgctcaatttcaggacaaagttgctagcactcagccacaaaaggctgctcgtttacaaactaccgaaaggaaaattagcatattggagaaagctgtggagctcaatccagatagtgaggaattattgctttgccttctgaagtcatatggcaagagggacaacactgagactctattgactaaatgggagcaaatacttacgaagcacccagatagctctacgttgtggaaacagtatctgcttctgtgccaaggggaattctccagattcaaagtttctgaaattcggaagtcctacgtgtatgctgtacaggctctatctgcagcttgcaccaagttatgtaggcaggataataaaagcatggattccaaatcttcatccttagttcaactagaagtggggttggtggatatatttgttaatctgtgccgatttgagtggcagacaggacatcgggaactagcaactgggctatttcaggcgcagatggagtttagcttatttgcccctcctttgtatctgacaacaagcagtaagcaaaggctctttgaacacttctggaacagtggtggtgccagaattggggaagatggagctcttggatggtctgaatggttagcaaaagacgaggagagtagacaaaagttgtctatgcaagaaaattcacaagagactgaaacaggaggctggagtggttggtttgatccttctctgggtaatactgagacaaatgatttatcaaacaaatcactggaaccatcattgaccgatggaaatgatgctgaagaccttgatgctgaggactcaccagcacaagatgatgttgaatccttgctgaaaaagcttggtatcgatgtagatgcagagtccaatagtgaagttaaagacgcagaaacctggaatagatgggcctcaatggagctgtcacgggacaatcagcaatggatgcctcttcatgaaaattatggatcaattcattgtggtgatgctccatctggggaagacaatgaccagctttccagagtaattttgtttgaggatgtaactgagttcttgttttctctatcttcagaggaggcccgcttttctctgatgtgccaatttattgatttttatggtggcaaaatctcaagatggacatcaacaaacagtccaagttggctcgatcgaatattgagcttagagaatattacagatgacatcctggaagatctaggtgctgtatctgacgttgtaaacaagaaccaaagttcatatagttgtaaatataaattggaatcattactgggaagcatgtgtgacctttcacaaaggccgggcctgatgaaatttctcaaaaatgcgatactgcttctgcttggtgttttccctcgtaatcatatcctggaggaagctgttcttgttactacccaaatgtttactcctcaagagaactcttcctccattcaaactaatgcatcacgggctttggccaaaagtatgttgaagaaagaccgacaggattttttgctttgtgggatatatggacgaactgaggcaatgaatgggaacattgaacaagcaaggaagatatttgacatggcactgttatcaactgaagcaacttctgaggatcttaggaagaaggttcccatcctttatctttggtacgccgagatggagattacagtgtccgcttcaagaaacaactctgactcaatgcatcgtgcagtttacatcctatcctgcttagggagcaatctaaaatattctccttttgttggccctatttcaaggcttcaggtcttgagggctcgccaagggtttaaagagcagattagaagctcacgatctgcattttcctgtggtgctataaacaaagaatcagttgctctgatctgctcagcttctttgttcgaaagcatgacaacaggctgttactcgggtcttgaagtgatagaggagacttttccaatgacattttcagagagcaataatttggagtgtgaggatttgtgggtgtactacatcaaaatgcttcaaaaaaatcttaaccaattgaatctatcaagggtctggccaagcatatcacgcggagtgcacaaatatccctacaatccaaaatcatattcagcgacgttaaccctgagttatctttacagtgtatccaacaatctccgtctcacactcgacaaatgtagtcaaagggacccttctgtaatcaccttgctctttgctttgtcctttgaatggggtaaagctggatctgacaatagaatacacagcctgtttgagagagctctagctgatgataagttgcagaagtctgtcctattgtggcgctgttatctagcctatgaggcagaaatagtctgcaactcttctgcagcacggcgtgtgttcttcagagctatacatgcctgtccatggtctaaaagattatggcttgatggtttccaaaagttgggctctgttctgacattgaaggagttgtcagatctccaggaagtgatgcgtgacaaggaattaaacatccgcactgacatctatgagatactcctagaagaagaaacaaatacatgattctggtttgtgtgaagatcccgaaactgccccgcatgacatgctctgcagttataagtttccaaaggttcatgaaatattggttctgcattgctgttttgtggcctataagcatcgaactctgaagtctcaatcaagaacctgctatctatcatcaaataagatggatgggaagtacaatgggcatgccttggattgacaatcttgccaaatatgaccatgttttactatttttgttctttcaagatggaccttgttggctgccgttctgaatatctcacatgattcattatcggtatatagatagaagtggcttcagtgggcccttcaactgcacgataagatcaatgttaggaaggcctattacaaattcctgtacggaaatcatgccacgaacaaaaccgaaacatcaaaagcagcatatatttttgtttgactatcagtaaagcaactgcagccaggttaggggatcctgcagtgtgcttgagtgtccaaacaaaaaggcttcgaatgtatagcttcacctggcgttttgttgaaggtccccaaagttatggactttaagatgctggtatatactggctgggagcacagataagagaagtagcagcactgacatgacggcctcaccatctgttgttcatgtgtgcagtgtgcttgtgcatactgtattgagtgttcatttctggaggaatcaagccatctgtttatgtgtgctagctggataaagcgctgcttgatgtacctacagggatatggccacatggctatgtacgccataggtcaacctgcattacagggttgttaatgtatctcatcctgggttgcgccttgataatgtgacaggcacgaaatggtagtgtaatttgatttaagtagttgagttttgtagaaacacagttcctggcacgatggtttgttgagtgcatgacagcatgagacaccaagctcagggatgcaggcatcctcatgaaattatgaaaccacgctgctgtggtagctggtatgttggacaaagttccgaggctgcagcttatgtacgtccaattta

SEQ ID NO: 51620 - DNA, 4273 bp, Zea Mays
ctcattgcttattcccccgccacccccgcccaaaaaagaaaaagaaaaaaaacaccctcccttctccttgcttgtcagctcgcacccatggaaccctcgtcgccggccaccacggccaccttccctgctgccgtagaagaacatgagacgtaccctcccatggtgtcatcctctctattcccacttttccccttcgccgcctccacctcctctgctccccccgccgaatcccaatggctttcaaaccctagcttctccttcgatgcctcctccctgaacatcccggctaccacctcatcgtcgctcccgtcgccgcagagccactcgtccgatgaggacacgccgctgcaggccgctcctgcgaaatacgagctggtgccttcttcgccgtcctccgacgaggagagggggtcgcggaggaagagaagtgggaggaggaaacggaagcgcgagaaggagcgctatgatggggcagcgacatcgcggaaggctgggattcgtgcctgggctggattggagacgaagccagccaaggattactatgtcgacgcgaagggcgaccatgataacctggcttttggatccctctacagaatggatgttgcacgctacagatcccagaatatgatggaggcatttggtttaaatcatctgaggtttggttcatcacatattgatttggattcagacttggatggaatggataacaaagtaagagctggaggccgttactattctgcaaaaaatgcagtttctgaaagaaataaaggtttcaaacatctgaaaatatttaagggaaacacctctgtaatgctcgctgaagattttgtcccatttggtacacaatcacttcctttgaaaagcacaactgtggaacaagagctagaggagtcttgggaagatgaaatacttcgccggactagggaattcaataagatgtctcgtgaacgccctcacgatgaaaaagtttggctggctttcgctcaatttcaggacaaagttgctagcactcagccacaaaaggctgctcgtttacaaactaccgaaaggaaaattagcatattggagaaagctgtggagctcaatccagatagtgaggaattattgctttgccttctgaagtcatatggcaagagggacaacactgagactctattgactaaatgggagcaaatacttacgaagcacccagatagctctacgttgtggaaacagtatctgcttctgtgccaaggggaattctccagattcaaagtttctgaaattcggaagtcctacgtgtatgctgtacaggctctatctgcagcttgcaccaagttatgtaggcaggataataaaagcatggattccaaatcttcatccttagttcaactagaagtggggttggtggatatatttgttaatctgtgccgatttgagtggcagacaggacatcgggaactagcaactgggctatttcaggcgcagatggagtttagcttatttgcccctcctttgtatctgacaacaagcagtaagcaaaggctctttgaacacttctggaacagtggtggtgccagaattggggaagatggagctcttggatggtctgaatggttagcaaaagacgaggagagtagacaaaagttgtctatgcaagaaaattcacaagagactgaaacaggaggctggagtggttggtttgatccttctctgggtaatactgagacaaatgatttatcaaacaaatcactggaaccatcattgaccgatggaaatgatgctgaagaccttgatgctgaggactcaccagcacaagatgatgttgaatccttgctgaaaaagcttggtatcgatgtagatgcagagtccaatagtgaagttaaagacgcagaaacctggaatagatgggcctcaatggagctgtcacgggacaatcagcaatggatgcctcttcatgaaaattatggatcaattcattgtggtgatgctccatctggggaagacaatgaccagctttccagagtaattttgtttgaggatgtaactgagttcttgttttctctatcttcagaggaggcccgcttttctctgatgtgccaatttattgatttttatggtggcaaaatctcaagatggacatcaacaaacagtccaagttggctcgatcgaatattgagcttagagaatattacagatgacatcctggaagatctaggtgctgtatctgacgttgtaaacaagaaccaaagttcatatagttgtaaatataaattggaatcattactgggaagcatgtgtgacctttcacaaaggccgggcctgatgaaatttctcaaaaatgcgatactgcttctgcttggtgttttccctcgtaatcatatcctggaggaagctgttcttgttactacccaaatgtttactcctcaagagaactcttcctccattcaaactaatgcatcacgggctttggccaaaagtatgttgaagaaagaccgacaggattttttgctttgtgggatatatggacgaactgaggcaatgaatgggaacattgaacaagcaaggaagatatttgacatggcactgttatcaactgaagcaacttctgaggatcttaggaagaaggttcccatcctttatctttggtacgccgagatggagattacagtgtccgcttcaagaaacaactctgactcaatgcatcgtgcagtttacatcctatcctgcttagggagcaatctaaaatattctccttttgttggccctatttcaaggcttcaggtcttgagggctcgccaagggtttaaagagcagattagaagctcacgatctgcattttcctgtggtgctataaacaaagaatcagttgctctgatctgctcagcttctttgttcgaaagcatgacaacaggctgttactcgggtcttgaagtgatagaggagacttttccaatgacattttcagtcagagagcaataatttggagtgtgaggatttgtgggtgtactacatcaaaatgcttcaaaaaaatcttaaccaattgaatctatcaagggtctggccaagcatatcacgcggagtgcacaaatatccctacaatccaaaatcatattcagcgacgttaaccctgagttatctttacagtgtatccaacaatctccgtctcacactcgacaaatgtagtcaaagggacccttctgtaatcaccttgctctttgctttgtcctttgaatggggtaaagctggatctgacaatagaatacacagcctgtttgagagagctctagctgatgataagttgcagaagtctgtcctattgtggcgctgttatctagcctatgaggcagaaatagtctgcaactcttctgcagcacggcgtgtgttcttcagagctatacatgcctgtccatggtctaaaagattatggcttgatggtttccaaaagttgggctctgttctgacattgaaggagttgtcagatctccaggaagtgatgcgtgacaaggaattaaacatccgcactgacatctatgagatactcctagaagaagaaacaaatacatgattctggtttgtgtgaagatcccgaaactgccccgcatgacatgctctgcagttataagtttccaaaggttcatgaaatattggttctgcattgctgttttgtggcctataagcatcgaactctgaagtctcaatcaagaacctgctatctatcatcaaataagatggatgggaagtacaatgggcatgccttggattgacaatcttgccaaatatgaccatgttttactatttttgttctttcaagatggaccttgttggctgccgttctgaatatctcacatgattcattatcggtatatagatagaagtggcttcagtgggcccttcaactgcacgataagatcaatgttaggaaggcctattacaaattcctgtacggaaatcatgccacgaacaaaaccgaaacatcaaaagcagcatatatttttgtttgactatcagtaaagcaactgcagccaggttaggggatcctgcagtgtgcttgagtgtccaaacaaaaaggcttcgaatgtatagcttcacctggcgttttgttgaaggtagaaggggacacgttcctgcaccctacactagcttgctgtactaaacatttactgtggtttgttttttaaaggtccccaaagttatggactttaagatgctggtatatactggctgggagcacagataagagaagtagcagcactgacatgacggcctcagctaacgactgccttgccggaca

SEQ ID NO: 51621 - DNA, 4212 bp, Zea Mays
ctcattgcttattcccccgccacccccgcccaaaaaagaaaaagaaaaaaaacaccctcccttctccttgcttgtcagctcgcacccatggaaccctcgtcgccggccaccacggccaccttccctgctgccgtagaagaacatgagacgtaccctcccatggtgtcatcctctctattcccacttttccccttcgccgcctccacctcctctgctccccccgccgaatcccaatggctttcaaaccctagcttctccttcgatgcctcctccctgaacatcccggctaccacctcatcgtcgctcccgtcgccgcagagccactcgtccgatgaggacacgccgctgcaggccgctcctgcgaaatacgagctggtgccttcttcgccgtcctccgacgaggagagggggtcgcggaggaagagaagtgggaggaggaaacggaagcgcgagaaggagcgctatgatggggcagcgacatcgcggaaggctgggattcgtgcctgggctggattggagacgaagccagccaaggattactatgtcgacgcgaagggcgaccatgataacctggcttttggatccctctacagaatggatgttgcacgctacagatcccagaatatgatggaggcatttggtttaaatcatctgaggtttggttcatcacatattgatttggattcagacttggatggaatggataacaaagtaagagctggaggccgttactattctgcaaaaaatgcagtttctgaaagaaataaaggtttcaaacatctgaaaatatttaagggaaacacctctgtaatgctcgctgaagattttgtcccatttggtacacaatcacttcctttgaaaagcacaactgtggaacaagagctagaggagtcttgggaagatgaaatacttcgccggactagggaattcaataagatgtctcgtgaacgccctcacgatgaaaaagtttggctggctttcgctcaatttcaggacaaagttgctagcactcagccacaaaaggctgctcgtttacaaactaccgaaaggaaaattagcatattggagaaagctgtggagctcaatccagatagtgaggaattattgctttgccttctgaagtcatatggcaagagggacaacactgagactctattgactaaatgggagcaaatacttacgaagcacccagatagctctacgttgtggaaacagtatctgcttctgtgccaaggggaattctccagattcaaagtttctgaaattcggaagtcctacgtgtatgctgtacaggctctatctgcagcttgcaccaagttatgtaggcaggataataaaagcatggattccaaatcttcatccttagttcaactagaagtggggttggtggatatatttgttaatctgtgccgatttgagtggcagacaggacatcgggaactagcaactgggctatttcaggcgcagatggagtttagcttatttgcccctcctttgtatctgacaacaagcagtaagcaaaggctctttgaacacttctggaacagtggtggtgccagaattggggaagatggagctcttggatggtctgaatggttagcaaaagacgaggagagtagacaaaagttgtctatgcaagaaaattcacaagagactgaaacaggaggctggagtggttggtttgatccttctctgggtaatactgagacaaatgatttatcaaacaaatcactggaaccatcattgaccgatggaaatgatgctgaagaccttgatgctgaggactcaccagcacaagatgatgttgaatccttgctgaaaaagcttggtatcgatgtagatgcagagtccaatagtgaagttaaagacgcagaaacctggaatagatgggcctcaatggagctgtcacgggacaatcagcaatggatgcctcttcatgaaaattatggatcaattcattgtggtgatgctccatctggggaagacaatgaccagctttccagagtaattttgtttgaggatgtaactgagttcttgttttctctatcttcagaggaggcccgcttttctctgatgtgccaatttattgatttttatggtggcaaaatctcaagatggacatcaacaaacagtccaagttggctcgatcgaatattgagcttagagaatattacagatgacatcctggaagatctaggtgctgtatctgacgttgtaaacaagaaccaaagttcatatagttgtaaatataaattggaatcattactgggaagcatgtgtgacctttcacaaaggccgggcctgatgaaatttctcaaaaatgcgatactgcttctgcttggtgttttccctcgtaatcatatcctggaggaagctgttcttgttactacccaaatgtttactcctcaagagaactcttcctccattcaaactaatgcatcacgggctttggccaaaagtatgttgaagaaagaccgacaggattttttgctttgtgggatatatggacgaactgaggcaatgaatgggaacattgaacaagcaaggaagatatttgacatggcactgttatcaactgaagcaacttctgaggatcttaggaagaaggttcccatcctttatctttggtacgccgagatggagattacagtgtccgcttcaagaaacaactctgactcaatgcatcgtgcagtttacatcctatcctgcttagggagcaatctaaaatattctccttttgttggccctatttcaaggcttcaggtcttgagggctcgccaagggtttaaagagcagattagaagctcacgatctgcattttcctgtggtgctataaacaaagaatcagttgctctgatctgctcagcttctttgttcgaaagcatgacaacaggctgttactcgggtcttgaagtgatagaggagacttttccaatgacattttcagagagcaataatttggagtgtgaggatttgtgggtgtactacatcaaaatgcttcaaaaaaatcttaaccaattgaatctatcaagggtctggccaagcatatcacgcggagtgcacaaatatccctacaatccaaaatcatattcagcgacgttaaccctgagttatctttacagtgtatccaacaatctccgtctcacactcgacaaatgtagtcaaagggacccttctgtaatcaccttgctctttgctttgtcctttgaatggggtaaagctggatctgacaatagaatacacagcctgtttgagagagctctagctgatgataagttgcagaagtctgtcctattgtggcgctgttatctagcctatgaggcagaaatagtctgcaactcttctgcagcacggcgtgtgttcttcagagctatacatgcctgtccatggtctaaaagattatggcttgatggtttccaaaagttgggctctgttctgacattgaaggagttgtcagatctccaggaagtgatgcgtgacaaggaattaaacatccgcactgacatctatgagatactcctagaagaagaaacaaatacatgattctggtttgtgtgaagatcccgaaactgccccgcatgacatgctctgcagttataagtttccaaaggttcatgaaatattggttctgcattgctgttttgtggcctataagcatcgaactctgaagtctcaatcaagaacctgctatctatcatcaaataagatggatgggaagtacaatgggcatgccttggattgacaatcttgccaaatatgaccatgttttactatttttgttctttcaagatggaccttgttggctgccgttctgaatatctcacatgattcattatcggtatatagatagaagtggcttcagtgggcccttcaactgcacgataagatcaatgttaggaaggcctattacaaattcctgtacggaaatcatgccacgaacaaaaccgaaacatcaaaagcagcatatatttttgtttgactatcagtaaagcaactgcagccaggttaggggatcctgcagtgtgcttgagtgtccaaacaaaaaggcttcgaatgtatagcttcacctggcgttttgttgaaggtccccaaagttatggactttaagatgctggtatatactggctgggagcacagataagagaagtagcagcactgacatgacggcctcaactcaggccgtgagccgacacggcggggccgaacgcgaac

SEQ ID NO: 51622 - DNA, 1234 bp, Zea Mays
cgacactttccaccacaccgtgttaaaaaaacttcaaaccttcaccagacactgactagaccgtccccacacatacacacatccctcgtgccctggtgtcagtgacacaaagagttcacaaacctaacacgccacgctccgcctccgctcctgctaaacgagacgtctttttgactcctcgtctcttctccgttctgccatctcactatccgtctctgcttagcggcgaagccagagaaacgggagtaaattaggaaaacccgctgtgcgaatcgaacatctcgaaagcgatttactgctgcgtgcgtttcggccgctgatcccgaacacttcctggcttcgtgaggataagttcagggccagccagagttttagatgaagacttgatttctcctctcagataatagagtgtttcaaaatgactgatcaggagcgagatgatgttcccatgttgctaagaaatgttgagctaccaagatttcctctaagaagtacttcaatgtgtataccagtcagggatgatgattatgaagaagacacctttgtgccccatactggtcctctattcgtccagccatcaactcagacggcaccgggaatttcatttacaggtagagacacacctgataggcttcctaaaccttcacagggaaaacaagtcagcaagccacatgcaatcatgccagaagaaataagaggaaataagtggtcttacagtgggcaggttccaaagaatgaacacttgatgatgtctgggcctttggggcaatgtgataatcccgactgtgtgaattgccctcctgcttgtaaaaacagaagacattttcagagaggttcaaatgctttagacaataagatccataatattctttatggtcacagtcgtggatggaagaagaagattgagcaaatcatggcatgcattccgattatgaacccacatgcaaagcctgttcagcggtggaatcaattctttgtcatatcatgcctgattgccattttcattgatcccctgttcttcttcttactatcagtacgacaggatggcaactgcatagtgttaaattgggaaattgctacagcgcttgctgttgtgagaagtgtgactgatgctatttatttcctccacatgttgcttcagattggcttatgttgcaccagagtcacgagtggtgggagctggagacttggttgatgagccaaaaaaagttgctatccattatcttcgtggtta

SEQ ID NO: 51623 - DNA, 1131 bp, Zea Mays
aaagagttcacaaacctaacacgccacgctccgcctccgctcctgctaaacgagacgtctttttgactcctcgtctcttctccgttctgccatctcactatccgtctctgcttagcggcgaagccagagaaacgggagtaaattaggaaaacccgctgtgcgaatcgaacatctcgaaagcgatttactgctgcgtgcgtttcggccgctgatcccgaacacttcctggcttcgtgaggataagttcagggccagccagagttttagatgaagacttgatttctcctctcagataatagagtgtttcaaaatgactgatcaggagcgagatgatgttcccatgttgctaagaaatgttgagctaccaagatttcctctaagaagtacttcaatgtgtataccagtcagggatgatgattatgaagaagacacctttgtgccccatactggtcctctattcgtccagccatcaactcagacggcaccgggaatttcatttacaggtagagacacacctgataggcttcctaaaccttcacagggaaaacaagtcagcaagccacatgcaatcatgccagaagaaataagaggaaataagtggtcttacagtgggcaggttccaaagaatgaacacttgatgatgtctgggcctttggggcaatgtgataatcccgactgtgtgaattgccctcctgcttgtaaaaacagaagacattttcagagaggttcaaatgctttagacaataagatccataatattctttatggtcacagtcgtggatggaagaagaagattgagcaaatcatggcatgcattccgattatgaacccacatgcaaagcctgttcagcggtggaatcaattctttgtcatatcatgcctgattgccattttcattgatcccctgttcttcttcttactatcagtacgacaggatggcaactgcatagtgttaaattgggaaattgctacagcgcttgctgttgtgagaagtgtgactgatgctatttatttcctccacatgttgcttcagttcagattggcttatgttgcaccagagtcacgagtggtgggagctggagacttggttgatgagccaaaaaaagttgctatccattatcttcgtggtta

SEQ ID NO: 51624 - DNA, 919 bp, Zea Mays
atcggaattcgggacttcgtttgtttggtgcatctcacagctggccagccagagttttagatgaagacttgatttctcctctcagataatagagtgtttcaaaatgactgatcaggagcgagatgatgttcccatgttgctaagaaatgttgagctaccaagatttcctctaagaagtacttcaatgtgtataccagtcagggatgatgattatgaagaagacacctttgtgccccatactggtcctctattcgtccagccatcaactcagacggcaccgggaatttcatttacaggtagagacacacctgataggcttcctaaaccttcacagggaaaacaagtcagcaagccacatgcaatcatgccagaagaaataagaggaaataagtggtcttacagtgggcaggttccaaagaatgaacacttgatgatgtctgggcctttggggcaatgtgataatcccgactgtgtgaattgccctcctgcttgtaaaaacagaagacattttcagagaggttcaaatgctttagacaataagatccataatattctttatggtcacagtcgtggatggaagaagaagattgagcaaatcatggcatgcattccgattatgaacccacatgcaaagcctgttcagcggtggaatcaattctttgtcatatcatgcctgattgccattttcattgatcccctgttcttcttcttactatcagtacgacaggatggcaactgcatagtgttaaattgggaaattgctacagcgcttgctgttgtgagaagtgtgactgatgctatttatttcctccacatgttgcttcagattggcttatgttgcaccagagtcacgagtggtgggagctggagacttggttgatgagccaaaaaaagttgctatccattatcttcgtggtta

SEQ ID NO: 51625 - DNA, 894 bp, Zea Mays
gtcttttcatacccctgggccagccagagttttagatgaagacttgatttctcctctcagataatagagtgtttcaaaatgactgatcaggagcgagatgatgttcccatgttgctaagaaatgttgagctaccaagatttcctctaagaagtacttcaatgtgtataccagtcagggatgatgattatgaagaagacacctttgtgccccatactggtcctctattcgtccagccatcaactcagacggcaccgggaatttcatttacaggtagagacacacctgataggcttcctaaaccttcacagggaaaacaagtcagcaagccacatgcaatcatgccagaagaaataagaggaaataagtggtcttacagtgggcaggttccaaagaatgaacacttgatgatgtctgggcctttggggcaatgtgataatcccgactgtgtgaattgccctcctgcttgtaaaaacagaagacattttcagagaggttcaaatgctttagacaataagatccataatattctttatggtcacagtcgtggatggaagaagaagattgagcaaatcatggcatgcattccgattatgaacccacatgcaaagcctgttcagcggtggaatcaattctttgtcatatcatgcctgattgccattttcattgatcccctgttcttcttcttactatcagtacgacaggatggcaactgcatagtgttaaattgggaaattgctacagcgcttgctgttgtgagaagtgtgactgatgctatttatttcctccacatgttgcttcagattggcttatgttgcaccagagtcacgagtggtgggagctggagacttggttgatgagccaaaaaaagttgctatccattatcttcgtggtta

SEQ ID NO: 51626 - DNA, 912 bp, Zea Mays
ctcagctgcaacttctcttgcagcttccaatgcttggccagccagagttttagatgaagacttgatttctcctctcagataatagagtgtttcaaaatgactgatcaggagcgagatgatgttcccatgttgctaagaaatgttgagctaccaagatttcctctaagaagtacttcaatgtgtataccagtcagggatgatgattatgaagaagacacctttgtgccccatactggtcctctattcgtccagccatcaactcagacggcaccgggaatttcatttacaggtagagacacacctgataggcttcctaaaccttcacagggaaaacaagtcagcaagccacatgcaatcatgccagaagaaataagaggaaataagtggtcttacagtgggcaggttccaaagaatgaacacttgatgatgtctgggcctttggggcaatgtgataatcccgactgtgtgaattgccctcctgcttgtaaaaacagaagacattttcagagaggttcaaatgctttagacaataagatccataatattctttatggtcacagtcgtggatggaagaagaagattgagcaaatcatggcatgcattccgattatgaacccacatgcaaagcctgttcagcggtggaatcaattctttgtcatatcatgcctgattgccattttcattgatcccctgttcttcttcttactatcagtacgacaggatggcaactgcatagtgttaaattgggaaattgctacagcgcttgctgttgtgagaagtgtgactgatgctatttatttcctccacatgttgcttcagattggcttatgttgcaccagagtcacgagtggtgggagctggagacttggttgatgagccaaaaaaagttgctatccattatcttcgtggtta

SEQ ID NO: 51627 - DNA, 1465 bp, Zea Mays
tgatactgctagtagttcctaaagttgggttatctgctgcaaactatgctaagaatttattgcgtgtcactgttcttcttcaatatgtcccccgtatcatcagattcgtaccacttcttgatggtcagtccaccaatggattcatatttgagtcagcatgggctaattttgtgatcaaccttctaatgtttattttggcgggacatgtggttggttcatgttggtatctctttggcttacagagggttaaccaatgtctacgagatgcttgttctatatcgaccattccatattgtgattcttttatagactgtggacgtggcattgggagtggactgtacagacagcagtggttcaatgactcgggtgcagaagcttgttttaacactggaaatgatgctactttccaatatggaatttatgagcaggctgttttgctcactacagaagacagtgctgtaaaacgatatatatattcattattttgggggtttcagcaaataagtaccttagcaggaaaccttgtcccgagttactttatatgggaagttctgttcacgatggctattattggtctgggactgttgctttttgcattgcttattggaaacatgcaaaattttctgcaagctcttggaagaaggaggttggaaatgcaactcaggcgccgtgatgttgaaaagtggatgagccataggcgattgcctgaagatttgagaaggtccgattattcaccttgatggattggcctatattggatgcaatatgtgacaaattaagacaaaacttgtatattagtggaagtgacattctttaccaaggtggcactgttgaaaagatggtcttcatagtgagagggaagctggaaagcatcagtgcagatggcagcaaggctccattacatgatggagatgtatgtggagaggagctcctcacgtggtacttggaacactcttcagcgaacagagatggtgggaaaattaaattccaaggtatgcggttggttgctatacgtacagtaagatgtttaacaaatgttgaagcttttgtactcagagcaagtgatctggaagaagtcacctcgcagtttgctcgattcctgcgtaatccacgagtgcagggagcgatcaggtatgaatccccctactggcgaaccattgctgcaactcgtattcaggttgcatggaggtatcgtaaaaggcggctgaagcgagctgagaagtcgaggttgagcgaagagacttatgcctcacttggatcttgacacatgattcttttcagcgtagacggaggggatgattgatcgctacctgactaggcactaacttttcagtttcagttcagcatctaaagcttctagagctgtgaaatttctccgaacatgtctacttggtggaacctaacggggcaaatatttttggctttggtgttccgtgtacataataagaggaaagttttttttttc

SEQ ID NO: 51628 - DNA, 1412 bp, Zea Mays
cagcggataagccacccgcttccgatccgattccacagctcgaccaactctccgcctcccgtcaccacctcgcggctcgcgctctccgatcccgcgcatattctccaccccgtcctctgctccgccccatcagtacatcaccacgcactactaggacgccgcgccgcagccccaccatctccgagaccgagttctgatcgccgccggaaccggtacacggaaagccgtaaaccaatggcgctcctcgcgccgagcccgcgcgcgctctgcgtgcgggaggccgcggcggcgtcgccgcacccgcactcgttggcgaccgccgcctgctcgaccgttggcggcggggtggctgggcgggcgctgtggctgtggaacggcggcgggacggggaggaggaggagggagcgccgggagaggttccgggcggaggcatacttctgggacgtgtccaagccggtggagatggaggagatcgacagcatggagaagctcgacgacgcgctcaggtggtccgtcgagaacaaccagcccatcatcatcgactggtacgagtgattttgcacatgttgcccgacctgcataggtcactctaacttccattggcttgtctggtgtctgtggccattgattcggatgttgattgtcattatagtagaatcgagatgactttttccgcttttatcatatctatctgcatgcttagataatactatcatatctcatcagaagtcgagacgttgtctattgcttccaggatggcaagttggtgtcggaaatgcatatacctggtgcccagaatggagaagatagcaggagaatatcctggagtcaggttttacttcgtcgatgtcaacaaagttccacaggcggtggtgaaaagaggaaatgtaactaaaatgcccactattcagctctggaaggacggagagtggaaagcagaagtaataggtggtcacaaagcttggcttgtgatggatgaggtcagagaaatgatccagaagaacaagtgacttagcacccatgttatgcaatggccaatggatattgtaccgtgttcaatgtaaatagagatatcagacgatctcttcatatactaagctgaaatcaaacacaaatagagcaaccatgttggaaataaccaaccaaataatactgctccctactccctacgttcagttctctttgtatatgtatgttggaacaagatggatttttatgccagcacaaggaagcaaggagcacattcatattcagttacgcaactacgcaagtatgaagaatagaaagcagaattaataggaaaggcatatggcttgtgaatttgttatccagaagaacctgactcgtgcattgatatagagagatgcgtccaattgatatagattatagagagatgtgtgacgatatcttcg

SEQ ID NO: 51629 - DNA, 443 bp, Zea Mays
gttagcaacttgtagcattaggttgacatcgaactagcggaagatatgcggctgagagaggcgcacgccatcggtgaatcgctgcaggagagaatcgagaagttgcctcaagtcgagcgggcgtttgttcatatcgatttcgagagcacgcataagcctgagcacaaagtcaggagcagactgccgtctactgatccctgacagatttccgaatgctcatgcatgtagtacattgttaagagatagtagctaatagcccggcgttttcttcgagggttacgagcaacgattcccttcacctgtaaaataaaggtacaggatcaacttttccagtttactgatcctaaccacgcatttgatcgttgactcgatgggtagcctgattgttatataccttcagtttttgcatgcagtatatatgatactgaatggtactatgatgt

SEQ ID NO: 51630 - DNA, 823 bp, Zea Mays
cacgcggccggagacttctaggctgcttccatatgcgtgcgagtgccagccgttatggagcaaaaaagctctgccagccttaccgtccctacggcacgacgcctctaacgtcggcgaccgcgacgacgatgaccccgcgtatcccctcctcgtgtgctccgttcgcaatcgctgcctccatctcctacaggttccatgttgacgctgtgtgccccggcctgtcccaagcttcaataggtccatacatgcatgcgcagagtttgccggccggacttgggatggaagaattatcatttgtgttttttatacagaaatgtagcttgtaaactattagtaaagttatatacaagttttattctgaaccaggacagagcactctgtaacaaattcggtgcatttccgttcctttcgctgatcaaatgcctttgttccctatggttcttgtagagcggttgtgtcgtccgagcattgatctgaaccagcacagtttatcagggacgtagcagtgagttggttatagagaactcagatttgatggctaaacataaaagcgacttagaaggattcaagttatatgtatactaaagtggtgaggactcgcaagaagttcaatccactgccagaaggttagatttgagtctcaattattttcaagggaagagatcatgctgataattcactccatgggtacgaggttttcaaaaatccgagcattagtgatgtcctgtgcacaacaacagcagaggctcttgcaatggggaaattcgtgatttgcgcagaacatccatcaaatgagttttttcatgtcatttccgaactgttt

SEQ ID NO: 51631 - DNA, 361 bp, Zea Mays
ccggagacttctaggctgcttccatatgcgtgcgagtgccagccgttatggagcaaaaaagctctgccagccttaccgtccctacggcacgacgcctctaacgtcggcgaccgcgacgacgatgaccccgcgtatcccctcctcgtgtgctccgttcgcaatcgctgcctccatctcctacagagcggttgtgtcgtccgagcattgatctgaaccagcacagtttatcagggacgtagcagtgagttggttatagagaactcagatttgatggctaaacataaaagcgacttagaaggattcaagttatatgtatactaaagtggtgaggactcgcaagaagttcaatccactgccagaa

SEQ ID NO: 51632 - DNA, 5581 bp, Zea Mays
cttctaggctgcttccatatgcgtgcgagtgccagccgttatggagcaaaaaagctctgccagccttaccgtccctacggcacgacgcctctaacgtcggcgaccgcgacgacgatgaccccgcgtatcccctcctcgtgtgctccgttcgcaatcgctgcctccatctcctacagcttgatgcaatatccgacgacaaagaaaaaggtccaaagacacaattgaattgccgtccaaaagatcacattctgcaacataatctcctacatgaattattttatgcttgccatgatatcatcattccatttttccttcttaattactgagaccatatacctgatcttctttgtactacatttcaatgacatgtttttatcttcatgtacaacatgttatacaatgttctctattctattcaagtgcatcccaaacgtaataccatataaaaattcagataaaggaaataggttaaatgtgatggacacttatactaaacgtatcaatctctgcattttccctgtttctttgttttttgattatttgttgcaacgatctggcattatttgtgaaaatatatataaataacttgctaattttttaaaatatgtgcccaaaatgatacaaatacaactcactccataaatgaaggtacaaataatagttcattaacattttttacaattcggctgaaggttcaagcaaggacccttgcgcatcagtgaagaaacgaacaataaaatcttccaagaactaaagattccctcgtatcaccgccagtcttttgagttgtgggatatttattttgtattatctatgtaatgatatgtatatatgttttttaaacaatttgtttaaatataacaaactaactccagatattgcaacagacatattaacccttggtatgtctcacctaactttattttagataaacctatctattctagactctactcatatgttctgtgtttggtgtgagtatattaattacaataagtacaaatagtttgcttacaatcaatataacatatttaatattaaaattacaaaacatttgtgttatgttgtaaatagattatattgaacaaacctgttcacttattgtaaacagattcattttgtccctgtattacaatatttagcaaattaaataaactaaaatttttacagtttgtttaacctgtaaacagatttaaatatcgtttttgcaccagatttgtttcctcattaattcaaaggtccatatacactaaaattatttttcccttaattcaaagagacttagttctcttgtgtttttttgggaaaacaaagatgtctaaaattttgcactttgttgccaggactgttttgtagtcttagtgctttgttgtaatcagattcatcttgtccttatattatagccgttagcaaagtaattcaaataaaattttgcagtttgtttgcaatctgtaaacagttttaacatcatttttttgctctaaatatgttctctcattagttcaaaggtcaatgtgcactgaatatgttttaccttaattcaaggagattatgttcttctttatttttgggaaaacaaagattatctcagatttgaccttcatccgttttccatgcttctatatacaattgtgctttggaaaaatttgggagcccttaaaaccaaactaacccacttcggccaatgtttttttttcttattttagtttttaggtgaaatgaacaagcttgtatgctttaaccatgctatttcattgatgttggctaaccactccataaagtcagcttaatgtcctttgcgtccaaactgaaaaatgtttgcttgctaattggtgccttggcgctagctagaaaagtgggggatgcctgtgatatacattgctcaatttgatgatcctgtttcaaaattcttaaaccattatgtatatcaacttccatttagcattgatgctaccctctcttggtagtatatgaatactagcaggataaatgaactggaattttgcagacaatgttttcctttttttggtttgttttaagacgaggtgaacacacatgtatgtatgttgtaaccatgcgacaagtttctaacaaaacatatcattaatgtagtctaactgctcatatgttagcttgttgatgtcatttgcgtccaacaaaaaagaaaaaaacttgcttcttcggaaaatatctcatgaatgtaggctaagcactccataatatcaactttgctgacctttcatatgcaaaagaaaaaaacccgcttacttgctaattgatggcttggcgctagctagaaaggtggaatgcctgtgatagacattgttcagttttccgattttatttcagtatacttaatgcattatgtatatcaatatccaattttgaaactatctttttggatggaatctttgtcttcgtgtgtccgcttggaaaaaaatagggaccttttttgatctcttgctttagcatcataggtagttccagagaagcaactgcttgcctcctcggctccatgatgcaatgtaggcctctccttcacatatttccatcccaccaagctcgcttggtcagatgaacatgtcaagtgttttttatgtagtagctaattgtcactaactttttgtaaaaccagcggagctttaaagagttacatattcttatcaaacatgtaactctctacgaattatgtttctttctttacatattcgtttatttttcctaaatcacatctatttccttttttgtttatatagtacatagttgaccaaccttacaaaagagactacttacacagacatcatatttgtacttcattgtctaatgattggtaatattattgaaattttacctttcatttcacaggcttaaacaagaaccagtgcacatcaaagattccacacgccaaaaagatcaccataaatgatatatacaaaaaacatgaaaccaattgagatttggcccttgaatgcagtgtcacatcttttcttattggtcctgccattttacaactaaacataattctctcgtatgttcttaaccctctagccatgttctgaccgctaaaaccatttgatgcactgtaacttatgatagttttagatgatgacccacttagatatggaacgaagattctacatatgttgtcgtttgtaaactagatacaatgcatgcatatatatatatatatatatatatatatatatatatatatatatatatatatatatatatatatatatatatatatatatatccaacctttagattttgctacctactcactaaaagtacctgatcattgcaacttatatttatatattttggatgacgaacaacttagaaatgatatcaaggttatatataatatcatatcttgtgtttgttcccgtaaaaaataaccaccaatatctttactactctataagcctttattgtaggcctccacacccgtgcgccggttctgcctctcgatgcccgtctgcccgcgcgccccactccctcttccctggcgcgagatggatccgccgcgaatcgcccacaaatcatggcagtacttctctggttcacgcatctgtcggtccacaaatcacgcatccgtcatggcagcgacagacagacaagatttaacttgcatccatggcagccgccgcgcatctgtcggtccacaaatcacgcatccgtcggtcccaaatcacgcgccagggaaggtgctttccaaatcatgcgccagagaaggcgccttcccaaaacacacatccatggcagccgtcgcgcccgcgccagggaaggtgcttcccaaatcacgcgtcagggaaggtccttcccagatcacgcattcatggcagccgcgcccgtaaaccgcgcctcccccacgacgctcttccatccacagcgtcgcccccttccatccatggcagtcgcgctccctctgcgagcctatacgtgcggggatgttgggaggcgctaccaccaatcgagcggcattagccccgacctgaagcacacatggccggaatccagaggatatcgtgcccccgcccccatccggagtctgccccgcatcgtgcgatgctcgttgctgagctcccgatgaccgcccgatggtgtcgaaccccgcaccgtcgtcggcaccgcgctactcggcgtactcgctaccgtcgacccacctccccggagaggacatcctcttctgcatcgacgccgacctcgaggtccacgccaagatgaagtccgctgccgtagcatcctcgggatccacgtccactgcgtcgccgcagtccgtaggagctgatggtgccccggcggtggggacccggactgtggtcgcccgagaaccacccacgttgagactgacgcatcccaagccagataaggatggataccctcacatcttcgattatttcgccgtccaaacacatgatttcctggttcccctttggcttcctccagatcttgccttcgcccgcatcgaccatcgcgccgctgccgtgacctaccatggagctctgcctcgccgcgcgcgccgggacgatggcggccgcgtgccggaggatggcaccgacgataggcgtgccgaagaagaggcacgacggtggcactgtgcgcgtacgttgcgtggtgacgacgcccatgggggagaagacggagtaccgggacggcccgctggagcgtgcgttcatggggctgttcgcgcgaagatggagaagtacgcggcgaagaagtcggcggcgcaggcgaaggagaagagggcggtgtgggagtgggactacgagagcttcgtggacgtgtcgtggcggttccggcggctgttcccgccgacgcggtgggcctgcgagttcaacacggcgctgaccgtgcccttcttccgatggctcgtgggcccctcggaggtggaggtcggcggcctccggcagcgcagcgaggtgcgcatcgagaagtgccggtacctggagagcagcggctgcgtggggatgtgcgtcaacatgtgcaaggtccccacacaggacttcttcaccaacgagttcgggctccccctcaccatggacccaaacatgagttgcgagatgatatacggctaggtgcctcctccgttggaagaggacccggcgtcgaagcaagcttgctacccgagcctctgtgagtggttccatgttgacgctgtgtgccccggcctgtcccaagcttcaataggtccatacatgcatgcgcagagtttgccggccggacttgggatggaagaattatcatttgtgttttttatacagaaatgtagcttgtaaactattagtaaagttatatacaagttttattctgaaccaggacagagcactctgtaacaaattcggtgcatttccgttcctttcgctgatcaaatgcctttgttccctatggttcttgtagagcggttgtgtcgtccgagcattgatctgaaccagcacagtttatcagggacgtagcagtgagttggttatagagaactcagatttgatggctaaacataaaagcgacttagaaggattcaagttatatgtatactaaagtggtgaggactcgcaagaagttcaatccactgccagaa

SEQ ID NO: 51633 - DNA, 6804 bp, Zea Mays
cttctaggctgcttccatatgcgtgcgagtgccagccgttatggagcaaaaaagctctgccagccttaccgtccctacggcacgacgcctctaacgtcggcgaccgcgacgacgatgaccccgcgtatcccctcctcgtgtgctccgttcgcaatcgctgcctccatctcctacaggtgcggccatcctgtcacccccaaaaatctcagattcgtagctattagggtttctacctgtcgatctggaaataaaccatccatccgaacgcgctgcggaggttggtggcacggcgaggctgtggctattcgtgtccggagacgagcagcgtgagacaacgcggttccacctcctacccctcccaatcgacgcaagcctctaccgcaaacctgtgaagaaatgcgcggacgacaccgaagccacgccgccgcgctcatgcacccgcacgaccgacgatggccggtgaggcgccgccgtcatccttaccatctcgcctgcgcatccgctcttcttcatctcatccgacctccactcttcttcacaaatatgcatggcggtcttcgcagaccgtccacgacgcctctgtgctcattcctctctttcgattcttcgatgcccagtttacttgcaaatgcagctgctgacaaacactctccctaagttactctgtagaggataacaaaaggatgctctcctcctggttccagtagcagcaatgcaatagaagattcagtttctactttgctttgttgatcctctccaaaagcccaaccaaacttaatttgtctacacacacgtcgttacttttctattttcccatcaaacaataccatacagaataaaacttgatttttttattccaaatattgtaggttctctcaacgcttgcacccatcacaaatctcttttcatgtcatgcggcttctaccagaccatgtttgactatccaaaaaaaacactttgttcttccacatttatgtgatacatacacgacattacttttcctttttcccgtcatttcttaacatatatacaacaaattttaatatgcatgtttttgctgctccgagctgccttctgtacataatgaccactgtgttgaaatttaatagctcaatagaatgtcatttgctttctttcttcttgcctatcttcgaatatctataacttatttacacaacaatttctagatgcatctgttacaatagaatcctatgtcctgctatagttttatttacaattaacaaagatcattacatatttttccccatatgtacagcttgatgcaatatccgacgacaaagaaaaaggtccaaagacacaattgaattgccgtccaaaagatcacattctgcaacataatctcctacatgaattattttatgcttgccatgatatcatcattccatttttccttcttaattactgagaccatatacctgatcttctttgtactacatttcaatgacatgtttttatcttcatgtacaacatgttatacaatgttctctattctattcaagtgcatcccaaacgtaataccatataaaaattcagataaaggaaataggttaaatgtgatggacacttatactaaacgtatcaatctctgcattttccctgtttctttgttttttgattatttgttgcaacgatctggcattatttgtgaaaatatatataaataacttgctaattttttaaaatatgtgcccaaaatgatacaaatacaactcactccataaatgaaggtacaaataatagttcattaacattttttacaattcggctgaaggttcaagcaaggacccttgcgcatcagtgaagaaacgaacaataaaatcttccaagaactaaagattccctcgtatcaccgccagtcttttgagttgtgggatatttattttgtattatctatgtaatgatatgtatatatgttttttaaacaatttgtttaaatataacaaactaactccagatattgcaacagacatattaacccttggtatgtctcacctaactttattttagataaacctatctattctagactctactcatatgttctgtgtttggtgtgagtatattaattacaataagtacaaatagtttgcttacaatcaatataacatatttaatattaaaattacaaaacatttgtgttatgttgtaaatagattatattgaacaaacctgttcacttattgtaaacagattcattttgtccctgtattacaatatttagcaaattaaataaactaaaatttttacagtttgtttaacctgtaaacagatttaaatatcgtttttgcaccagatttgtttcctcattaattcaaaggtccatatacactaaaattatttttcccttaattcaaagagacttagttctcttgtgtttttttgggaaaacaaagatgtctaaaattttgcactttgttgccaggactgttttgtagtcttagtgctttgttgtaatcagattcatcttgtccttatattatagccgttagcaaagtaattcaaataaaattttgcagtttgtttgcaatctgtaaacagttttaacatcatttttttgctctaaatatgttctctcattagttcaaaggtcaatgtgcactgaatatgttttaccttaattcaaggagattatgttcttctttatttttgggaaaacaaagattatctcagatttgaccttcatccgttttccatgcttctatatacaattgtgctttggaaaaatttgggagcccttaaaaccaaactaacccacttcggccaatgtttttttttcttattttagtttttaggtgaaatgaacaagcttgtatgctttaaccatgctatttcattgatgttggctaaccactccataaagtcagcttaatgtcctttgcgtccaaactgaaaaatgtttgcttgctaattggtgccttggcgctagctagaaaagtgggggatgcctgtgatatacattgctcaatttgatgatcctgtttcaaaattcttaaaccattatgtatatcaacttccatttagcattgatgctaccctctcttggtagtatatgaatactagcaggataaatgaactggaattttgcagacaatgttttcctttttttggtttgttttaagacgaggtgaacacacatgtatgtatgttgtaaccatgcgacaagtttctaacaaaacatatcattaatgtagtctaactgctcatatgttagcttgttgatgtcatttgcgtccaacaaaaaagaaaaaaacttgcttcttcggaaaatatctcatgaatgtaggctaagcactccataatatcaactttgctgacctttcatatgcaaaagaaaaaaacccgcttacttgctaattgatggcttggcgctagctagaaaggtggaatgcctgtgatagacattgttcagttttccgattttatttcagtatacttaatgcattatgtatatcaatatccaattttgaaactatctttttggatggaatctttgtcttcgtgtgtccgcttggaaaaaaatagggaccttttttgatctcttgctttagcatcataggtagttccagagaagcaactgcttgcctcctcggctccatgatgcaatgtaggcctctccttcacatatttccatcccaccaagctcgcttggtcagatgaacatgtcaagtgttttttatgtagtagctaattgtcactaactttttgtaaaaccagcggagctttaaagagttacatattcttatcaaacatgtaactctctacgaattatgtttctttctttacatattcgtttatttttcctaaatcacatctatttccttttttgtttatatagtacatagttgaccaaccttacaaaagagactacttacacagacatcatatttgtacttcattgtctaatgattggtaatattattgaaattttacctttcatttcacaggcttaaacaagaaccagtgcacatcaaagattccacacgccaaaaagatcaccataaatgatatatacaaaaaacatgaaaccaattgagatttggcccttgaatgcagtgtcacatcttttcttattggtcctgccattttacaactaaacataattctctcgtatgttcttaaccctctagccatgttctgaccgctaaaaccatttgatgcactgtaacttatgatagttttagatgatgacccacttagatatggaacgaagattctacatatgttgtcgtttgtaaactagatacaatgcatgcatatatatatatatatatatatatatatatatatatatatatatatatatatatatatatatatatatatatatatatatatccaacctttagattttgctacctactcactaaaagtacctgatcattgcaacttatatttatatattttggatgacgaacaacttagaaatgatatcaaggttatatataatatcatatcttgtgtttgttcccgtaaaaaataaccaccaatatctttactactctataagcctttattgtaggcctccacacccgtgcgccggttctgcctctcgatgcccgtctgcccgcgcgccccactccctcttccctggcgcgagatggatccgccgcgaatcgcccacaaatcatggcagtacttctctggttcacgcatctgtcggtccacaaatcacgcatccgtcatggcagcgacagacagacaagatttaacttgcatccatggcagccgccgcgcatctgtcggtccacaaatcacgcatccgtcggtcccaaatcacgcgccagggaaggtgctttccaaatcatgcgccagagaaggcgccttcccaaaacacacatccatggcagccgtcgcgcccgcgccagggaaggtgcttcccaaatcacgcgtcagggaaggtccttcccagatcacgcattcatggcagccgcgcccgtaaaccgcgcctcccccacgacgctcttccatccacagcgtcgcccccttccatccatggcagtcgcgctccctctgcgagcctatacgtgcggggatgttgggaggcgctaccaccaatcgagcggcattagccccgacctgaagcacacatggccggaatccagaggatatcgtgcccccgcccccatccggagtctgccccgcatcgtgcgatgctcgttgctgagctcccgatgaccgcccgatggtgtcgaaccccgcaccgtcgtcggcaccgcgctactcggcgtactcgctaccgtcgacccacctccccggagaggacatcctcttctgcatcgacgccgacctcgaggtccacgccaagatgaagtccgctgccgtagcatcctcgggatccacgtccactgcgtcgccgcagtccgtaggagctgatggtgccccggcggtggggacccggactgtggtcgcccgagaaccacccacgttgagactgacgcatcccaagccagataaggatggataccctcacatcttcgattatttcgccgtccaaacacatgatttcctggttcccctttggcttcctccagatcttgccttcgcccgcatcgacgtgtgttgcaacgtaggatagttgtggccatcatggcacccgctgcagaggctctctctctctctcgacagcatcgcgccgctgccgtgacctaccatggagctctgcctcgccgcgcgcgccgggacgatggcggccgcgtgccggaggatggcaccgacgataggcgtgccgaagaagaggcacgacggtggcactgtgcgcgtacgttgcgtggtgacgacgcccatgggggagaagacggagtaccgggacggcccgctggagcgtgcgttcatggggctgttcgcgcgaagatggagaagtacgcggcgaagaagtcggcggcgcaggcgaaggagaagagggcggtgtgggagtgggactacgagagcttcgtggacgtgtcgtggcggttccggcggctgttcccgccgacgcggtgggcctgcgagttcaacacggcgctgaccgtgcccttcttccgatggctcgtgggcccctcggaggtggaggtcggcggcctccggcagcgcagcgaggtgcgcatcgagaagtgccggtacctggagagcagcggctgcgtggggatgtgcgtcaacatgtgcaaggtccccacacaggacttcttcaccaacgagttcgggctccccctcaccatggacccaagtacgaggttttcaaaaatccgagcattagtgatgtcctgtgcacaacaacagcagaggctcttgcaatggggaaattcgtgatttgcgcagaacatccatcaaatgagttttttcatgtcatttccgaactgtttgacatacaagacttcagaggagtttgttgcgagagtgaaagaggcaatggatagagaaccctaaccgctaacccctgagcaaagatacaacctttcgtggaggcagcgactgagagattcatggagtactcagaccttgacaaggttctgaacaatgaggctgctcagcctaaacaaggctggcaaccgaagccattcctggtacccgggactactataagcagcactgtgtggatattagtctcttgcctccttaagtagcaccctgtatatggctggtgatatggctggtgatgactaatcgtaggtatatatgtacataatacaccatgtcgctcttatgtcgactaatgtttggagtattgtaattgtagcacgcatgacgacctttggccattgttttgtactctgtaataaggttctttctccttaaatttggagtttt

SEQ ID NO: 51634 - DNA, 8354 bp, Zea Mays
cttctaggctgcttccatatgcgtgcgagtgccagccgttatggagcaaaaaagctctgccagccttaccgtccctacggcacgacgcctctaacgtcggcgaccgcgacgacgatgaccccgcgtatcccctcctcgtgtgctccgttcgcaatcgctgcctccatctcctacaggtgcggccatcctgtcacccccaaaaatctcagattcgtagctattagggtttctacctgtcgatctggaaataaaccatccatccgaacgcgctgcggaggttggtggcacggcgaggctgtggctattcgtgtccggagacgagcagcgtgagacaacgcggttccacctcctacccctcccaatcgacgcaagcctctaccgcaaacctgtgaagaaatgcgcggacgacaccgaagccacgccgccgcgctcatgcacccgcacgaccgacgatggccggtgaggcgccgccgtcatccttaccatctcgcctgcgcatccgctcttcttcatctcatccgacctccactcttcttcacaaatatgcatggcggtcttcgcagaccgtccacgacgcctctgtgctcattcctctctttcgattcttcgatgcccagtttacttgcaaatgcagctgctgacaaacactctccctaagttactctgtagaggataacaaaaggatgctctcctcctggttccagtagcagcaatgcaatagaagattcagtttctactttgctttgttgatcctctccaaaagcccaaccaaacttaatttgtctacacacacgtcgttacttttctattttcccatcaaacaataccatacagaataaaacttgatttttttattccaaatattgtaggttctctcaacgcttgcacccatcacaaatctcttttcatgtcatgcggcttctaccagaccatgtttgactatccaaaaaaaacactttgttcttccacatttatgtgatacatacacgacattacttttcctttttcccgtcatttcttaacatatatacaacaaattttaatatgcatgtttttgctgctccgagctgccttctgtacataatgaccactgtgttgaaatttaatagctcaatagaatgtcatttgctttctttcttcttgcctatcttcgaatatctataacttatttacacaacaatttctagatgcatctgttacaatagaatcctatgtcctgctatagttttatttacaattaacaaagatcattacatatttttccccatatgtacagcttgatgcaatatccgacgacaaagaaaaaggtccaaagacacaattgaattgccgtccaaaagatcacattctgcaacataatctcctacatgaattattttatgcttgccatgatatcatcattccatttttccttcttaattactgagaccatatacctgatcttctttgtactacatttcaatgacatgtttttatcttcatgtacaacatgttatacaatgttctctattctattcaagtgcatcccaaacgtaataccatataaaaattcagataaaggaaataggttaaatgtgatggacacttatactaaacgtatcaatctctgcattttccctgtttctttgttttttgattatttgttgcaacgatctggcattatttgtgaaaatatatataaataacttgctaattttttaaaatatgtgcccaaaatgatacaaatacaactcactccataaatgaaggtacaaataatagttcattaacattttttacaattcggctgaaggttcaagcaaggacccttgcgcatcagtgaagaaacgaacaataaaatcttccaagaactaaagattccctcgtatcaccgccagtcttttgagttgtgggatatttattttgtattatctatgtaatgatatgtatatatgttttttaaacaatttgtttaaatataacaaactaactccagatattgcaacagacatattaacccttggtatgtctcacctaactttattttagataaacctatctattctagactctactcatatgttctgtgtttggtgtgagtatattaattacaataagtacaaatagtttgcttacaatcaatataacatatttaatattaaaattacaaaacatttgtgttatgttgtaaatagattatattgaacaaacctgttcacttattgtaaacagattcattttgtccctgtattacaatatttagcaaattaaataaactaaaatttttacagtttgtttaacctgtaaacagatttaaatatcgtttttgcaccagatttgtttcctcattaattcaaaggtccatatacactaaaattatttttcccttaattcaaagagacttagttctcttgtgtttttttgggaaaacaaagatgtctaaaattttgcactttgttgccaggactgttttgtagtcttagtgctttgttgtaatcagattcatcttgtccttatattatagccgttagcaaagtaattcaaataaaattttgcagtttgtttgcaatctgtaaacagttttaacatcatttttttgctctaaatatgttctctcattagttcaaaggtcaatgtgcactgaatatgttttaccttaattcaaggagattatgttcttctttatttttgggaaaacaaagattatctcagatttgaccttcatccgttttccatgcttctatatacaattgtgctttggaaaaatttgggagcccttaaaaccaaactaacccacttcggccaatgtttttttttcttattttagtttttaggtgaaatgaacaagcttgtatgctttaaccatgctatttcattgatgttggctaaccactccataaagtcagcttaatgtcctttgcgtccaaactgaaaaatgtttgcttgctaattggtgccttggcgctagctagaaaagtgggggatgcctgtgatatacattgctcaatttgatgatcctgtttcaaaattcttaaaccattatgtatatcaacttccatttagcattgatgctaccctctcttggtagtatatgaatactagcaggataaatgaactggaattttgcagacaatgttttcctttttttggtttgttttaagacgaggtgaacacacatgtatgtatgttgtaaccatgcgacaagtttctaacaaaacatatcattaatgtagtctaactgctcatatgttagcttgttgatgtcatttgcgtccaacaaaaaagaaaaaaacttgcttcttcggaaaatatctcatgaatgtaggctaagcactccataatatcaactttgctgacctttcatatgcaaaagaaaaaaacccgcttacttgctaattgatggcttggcgctagctagaaaggtggaatgcctgtgatagacattgttcagttttccgattttatttcagtatacttaatgcattatgtatatcaatatccaattttgaaactatctttttggatggaatctttgtcttcgtgtgtccgcttggaaaaaaatagggaccttttttgatctcttgctttagcatcataggtagttccagagaagcaactgcttgcctcctcggctccatgatgcaatgtaggcctctccttcacatatttccatcccaccaagctcgcttggtcagatgaacatgtcaagtgttttttatgtagtagctaattgtcactaactttttgtaaaaccagcggagctttaaagagttacatattcttatcaaacatgtaactctctacgaattatgtttctttctttacatattcgtttatttttcctaaatcacatctatttccttttttgtttatatagtacatagttgaccaaccttacaaaagagactacttacacagacatcatatttgtacttcattgtctaatgattggtaatattattgaaattttacctttcatttcacaggcttaaacaagaaccagtgcacatcaaagattccacacgccaaaaagatcaccataaatgatatatacaaaaaacatgaaaccaattgagatttggcccttgaatgcagtgtcacatcttttcttattggtcctgccattttacaactaaacataattctctcgtatgttcttaaccctctagccatgttctgaccgctaaaaccatttgatgcactgtaacttatgatagttttagatgatgacccacttagatatggaacgaagattctacatatgttgtcgtttgtaaactagatacaatgcatgcatatatatatatatatatatatatatatatatatatatatatatatatatatatatatatatatatatatatatatatatatccaacctttagattttgctacctactcactaaaagtacctgatcattgcaacttatatttatatattttggatgacgaacaacttagaaatgatatcaaggttatatataatatcatatcttgtgtttgttcccgtaaaaaataaccaccaatatctttactactctataagcctttattgtaggcctccacacccgtgcgccggttctgcctctcgatgcccgtctgcccgcgcgccccactccctcttccctggcgcgagatggatccgccgcgaatcgcccacaaatcatggcagtacttctctggttcacgcatctgtcggtccacaaatcacgcatccgtcatggcagcgacagacagacaagatttaacttgcatccatggcagccgccgcgcatctgtcggtccacaaatcacgcatccgtcggtcccaaatcacgcgccagggaaggtgctttccaaatcatgcgccagagaaggcgccttcccaaaacacacatccatggcagccgtcgcgcccgcgccagggaaggtgcttcccaaatcacgcgtcagggaaggtccttcccagatcacgcattcatggcagccgcgcccgtaaaccgcgcctcccccacgacgctcttccatccacagcgtcgcccccttccatccatggcagtcgcgctccctctgcgagcctatacgtgcggggatgttgggaggcgctaccaccaatcgagcggcattagccccgacctgaagcacacatggccggaatccagaggatatcgtgcccccgcccccatccggagtctgccccgcatcgtgcgatgctcgttgctgagctcccgatgaccgcccgatggtgtcgaaccccgcaccgtcgtcggcaccgcgctactcggcgtactcgctaccgtcgacccacctccccggagaggacatcctcttctgcatcgacgccgacctcgaggtccacgccaagatgaagtccgctgccgtagcatcctcgggatccacgtccactgcgtcgccgcagtccgtaggagctgatggtgccccggcggtggggacccggactgtggtcgcccgagaaccacccacgttgagactgacgcatcccaagccagataaggatggataccctcacatcttcgattatttcgccgtccaaacacatgatttcctggttcccctttggcttcctccagatcttgccttcgcccgcatcgaccatcgcgccgctgccgtgacctaccatggagctctgcctcgccgcgcgcgccgggacgatggcggccgcgtgccggaggatggcaccgacgataggcgtgccgaagaagaggcacgacggtggcactgtgcgcgtacgttgcgtggtgacgacgcccatgggggagaagacggagtaccgggacggcccgctggagcgtgcgttcatggggctgttcgcgcgaagatggagaagtacgcggcgaagaagtcggcggcgcaggcgaaggagaagagggcggtgtgggagtgggactacgagagcttcgtggacgtgtcgtggcggttccggcggctgttcccgccgacgcggtgggcctgcgagttcaacacggcgctgaccgtgcccttcttccgatggctcgtgggcccctcggaggtggaggtcggcggcctccggcagcgcagcgaggtgcgcatcgagaagtgccggtacctggagagcagcggctgcgtggggatgtgcgtcaacatgtgcaaggtccccacacaggacttcttcaccaacgagttcgggctccccctcaccatggacccaatgcatatttcgaagacatgagttgcgagatgatatacggctaggtgcctcctccgttggaagaggacccggcgtcgaagcaagcttgctacccgagcctctgttccatgttgacgctgtgtgccccggcctgtcccaagcttcaataggtccatacatgcatgcgcagagtttgccggccggacttgggatggaagaattatcatttgtgttttttatacagaaatgtagcttgtaaactattagtaaagttatatacaagttttattctgaaccaggacagagcactctgtaacaaattcggtgcatttccgttcctttcgctgatcaaatgcctttgttccctatggttcttgtagagcggttgtgtcgtccgagcattgatctgaaccagcacagtttatcagggacgtagcagtgagttggttatagagaactcagatttgatggctaaacataaaagcgacttagaaggattcaagttatatgtatactaaagtggtgaggactcgcaagaagttcaatccactgccagaaggttagatttgagtctcaattattttcaagggaagagatcatgctgataattcactccatgggtacgaggttttcaaaaatccgagcattagtgatgtcctgtgcacaacaacagcagaggctcttgcaatggggaaattcgtgatttgcgcagaacatccatcaaatgagttttttcatgtcatttccgaactgtttgacatacaagacttcagaggagtttgttgcgagagtgaaagaggcaatggatagagaaccctaaccgctaacccctgagcaaagatacaacctttcgtggaggcagcgactgagagattcatggagtactcagaccttgacaaggttctgaacaatgaggctgctcagcctaaacaaggtaggaaaagaaagaataaaaaaacctcacagcataatttgtccgacatcatggatggcggtctagcgttggcccatcgatgcttaactggcaatgaggttctcaggctggcaaccgaagccattcctggtacccgggactactataagcagcactgtgtggatattagtctcttgcctccttaagtagcaccctgtatatggctggtgatatggctggtgatgactaatcgtaggtatatatgtacataatacaccatgtcgctcttatgtcgactaatgtttggagtattgtaattgtagcacgcatgacgacctttggccattgttttgtactctgtaataaggttctttctccttaaatttggagttttattgcagaaatttgtagtacatggatatcaaaagttcataactccagaagactgtcagcacaatatttatctgcttttgccactgaattagagaaacatagtcttaaaaagttaagagactaatatccacacaatgctgcttatagtagtcccgggtaccaagatggcggtctagcattggccgcgcccgcaacatggcgtcattcatccacacccaccatctgcgcgctgcacctcgtcgagctcctcgtcttcgaggtcaccccggtgctgacctccacgtttccccgatcatcaccaactacaccatcgagatgttgtcgtgcaggttcgagggatcagaggcacttgagcagcagaatggactcttctcaggcatctttgccgaggtagtttggctcgcaatctccctctgttgcgccctcgctccctcccaccccaggggacagcttccgttcccgcgcttcctcccgctccagaatcgtcgctgtcgcgacttggctgcggcttctagcgcccgcgccctcactaccgtcctgctaccatgccgcctcctgctcatcggccacgaagttttacctcggcgtcgcctcctgctcgtcggccacgaagtttccctcggcgtcgctcaccatgcacaaaaccgctgcaaccccattcattgtcgagtgaagaaattgactactggagtgcatccgcagacaacgttcctctttctcagcttgtggcagcaaggaagggtgaatccggagacatcacatcccagggagggagatttgcaccaatccagcgttgaatcgatgcacaggcgtgtggttcctccaacaaacttcgaaggcccgattctagaggatttgccctatgctaaacgaatcaatgcggagttgcggacgaatgctacaccgctgagatcctaa

SEQ ID NO: 51635 - DNA, 5229 bp, Zea Mays
ttctaggctgcttccatatgcgtgcgagtgccagccgttatggagcaaaaaagctctgccagccttaccgtccctacggcacgacgcctctaacgtcggcgaccgcgacgacgatgaccccgcgtatcccctcctcgtgtgctccgttcgcaatcgctgcctccatctcctacagcttgatgcaatatccgacgacaaagaaaaaggtccaaagacacaattgaattgccgtccaaaagatcacattctgcaacataatctcctacatgaattattttatgcttgccatgatatcatcattccatttttccttcttaattactgagaccatatacctgatcttctttgtactacatttcaatgacatgtttttatcttcatgtacaacatgttatacaatgttctctattctattcaagtgcatcccaaacgtaataccatataaaaattcagataaaggaaataggttaaatgtgatggacacttatactaaacgtatcaatctctgcattttccctgtttctttgttttttgattatttgttgcaacgatctggcattatttgtgaaaatatatataaataacttgctaattttttaaaatatgtgcccaaaatgatacaaatacaactcactccataaatgaaggtacaaataatagttcattaacattttttacaattcggctgaaggttcaagcaaggacccttgcgcatcagtgaagaaacgaacaataaaatcttccaagaactaaagattccctcgtatcaccgccagtcttttgagttgtgggatatttattttgtattatctatgtaatgatatgtatatatgttttttaaacaatttgtttaaatataacaaactaactccagatattgcaacagacatattaacccttggtatgtctcacctaactttattttagataaacctatctattctagactctactcatatgttctgtgtttggtgtgagtatattaattacaataagtacaaatagtttgcttacaatcaatataacatatttaatattaaaattacaaaacatttgtgttatgttgtaaatagattatattgaacaaacctgttcacttattgtaaacagattcattttgtccctgtattacaatatttagcaaattaaataaactaaaatttttacagtttgtttaacctgtaaacagatttaaatatcgtttttgcaccagatttgtttcctcattaattcaaaggtccatatacactaaaattatttttcccttaattcaaagagacttagttctcttgtgtttttttgggaaaacaaagatgtctaaaattttgcactttgttgccaggactgttttgtagtcttagtgctttgttgtaatcagattcatcttgtccttatattatagccgttagcaaagtaattcaaataaaattttgcagtttgtttgcaatctgtaaacagttttaacatcatttttttgctctaaatatgttctctcattagttcaaaggtcaatgtgcactgaatatgttttaccttaattcaaggagattatgttcttctttatttttgggaaaacaaagattatctcagatttgaccttcatccgttttccatgcttctatatacaattgtgctttggaaaaatttgggagcccttaaaaccaaactaacccacttcggccaatgtttttttttcttattttagtttttaggtgaaatgaacaagcttgtatgctttaaccatgctatttcattgatgttggctaaccactccataaagtcagcttaatgtcctttgcgtccaaactgaaaaatgtttgcttgctaattggtgccttggcgctagctagaaaagtgggggatgcctgtgatatacattgctcaatttgatgatcctgtttcaaaattcttaaaccattatgtatatcaacttccatttagcattgatgctaccctctcttggtagtatatgaatactagcaggataaatgaactggaattttgcagacaatgttttcctttttttggtttgttttaagacgaggtgaacacacatgtatgtatgttgtaaccatgcgacaagtttctaacaaaacatatcattaatgtagtctaactgctcatatgttagcttgttgatgtcatttgcgtccaacaaaaaagaaaaaaacttgcttcttcggaaaatatctcatgaatgtaggctaagcactccataatatcaactttgctgacctttcatatgcaaaagaaaaaaacccgcttacttgctaattgatggcttggcgctagctagaaaggtggaatgcctgtgatagacattgttcagttttccgattttatttcagtatacttaatgcattatgtatatcaatatccaattttgaaactatctttttggatggaatctttgtcttcgtgtgtccgcttggaaaaaaatagggaccttttttgatctcttgctttagcatcataggtagttccagagaagcaactgcttgcctcctcggctccatgatgcaatgtaggcctctccttcacatatttccatcccaccaagctcgcttggtcagatgaacatgtcaagtgttttttatgtagtagctaattgtcactaactttttgtaaaaccagcggagctttaaagagttacatattcttatcaaacatgtaactctctacgaattatgtttctttctttacatattcgtttatttttcctaaatcacatctatttccttttttgtttatatagtacatagttgaccaaccttacaaaagagactacttacacagacatcatatttgtacttcattgtctaatgattggtaatattattgaaattttacctttcatttcacaggcttaaacaagaaccagtgcacatcaaagattccacacgccaaaaagatcaccataaatgatatatacaaaaaacatgaaaccaattgagatttggcccttgaatgcagtgtcacatcttttcttattggtcctgccattttacaactaaacataattctctcgtatgttcttaaccctctagccatgttctgaccgctaaaaccatttgatgcactgtaacttatgatagttttagatgatgacccacttagatatggaacgaagattctacatatgttgtcgtttgtaaactagatacaatgcatgcatatatatatatatatatatatatatatatatatatatatatatatatatatatatatatatatatatatatatatatatatccaacctttagattttgctacctactcactaaaagtacctgatcattgcaacttatatttatatattttggatgacgaacaacttagaaatgatatcaaggttatatataatatcatatcttgtgtttgttcccgtaaaaaataaccaccaatatctttactactctataagcctttattgtaggcctccacacccgtgcgccggttctgcctctcgatgcccgtctgcccgcgcgccccactccctcttccctggcgcgagatggatccgccgcgaatcgcccacaaatcatggcagtacttctctggttcacgcatctgtcggtccacaaatcacgcatccgtcatggcagcgacagacagacaagatttaacttgcatccatggcagccgccgcgcatctgtcggtccacaaatcacgcatccgtcggtcccaaatcacgcgccagggaaggtgctttccaaatcatgcgccagagaaggcgccttcccaaaacacacatccatggcagccgtcgcgcccgcgccagggaaggtgcttcccaaatcacgcgtcagggaaggtccttcccagatcacgcattcatggcagccgcgcccgtaaaccgcgcctcccccacgacgctcttccatccacagcgtcgcccccttccatccatggcagtcgcgctccctctgcgagcctatacgtgcggggatgttgggaggcgctaccaccaatcgagcggcattagccccgacctgaagcacacatggccggaatccagaggatatcgtgcccccgcccccatccggagtctgccccgcatcgtgcgatgctcgttgctgagctcccgatgaccgcccgatggtgtcgaaccccgcaccgtcgtcggcaccgcgctactcggcgtactcgctaccgtcgacccacctccccggagaggacatcctcttctgcatcgacgccgacctcgaggtccacgccaagatgaagtccgctgccgtagcatcctcgggatccacgtccactgcgtcgccgcagtccgtaggagctgatggtgccccggcggtggggacccggactgtggtcgcccgagaaccacccacgttgagactgacgcatcccaagccagataaggatggataccctcacatcttcgattatttcgccgtccaaacacatgatttcctggttcccctttggcttcctccagatcttgccttcgcccgcatcgaccatcgcgccgctgccgtgacctaccatggagctctgcctcgccgcgcgcgccgggacgatggcggccgcgtgccggaggatggcaccgacgataggcgtgccgaagaagaggcacgacggtggcactgtgcgcgtacgttgcgtggtgacgacgcccatgggggagaagacggagtaccgggacggcccgctggagcgtgcgttcatggggctgttcgcgcgaagatggagaagtacgcggcgaagaagtcggcggcgcaggcgaaggagaagagggcggtgtgggagtgggactacgagagcttcgtggacgtgtcgtggcggttccggcggctgttcccgccgacgcggtgggcctgcgagttcaacacggcgctgaccgtgcccttcttccgatggctcgtgggcccctcggaggtggaggtcggcggcctccggcagcgcagcgaggtgcgcatcgagaagtgccggtacctggagagcagcggctgcgtggggatgtgcgtcaacatgtgcaaggtccccacacaggacttcttcaccaacgagttcgggctccccctcaccatggacccaaagcggttgtgtcgtccgagcattgatctgaaccagcacagtttatcagggacgtagcagtgagttggttatagagaactcagatttgatggctaaacataaaagcgacttagaaggattcaagttatatgtatactaaagtggtgaggactcgcaagaagttcaatccactgccagaa

SEQ ID NO: 51636 - DNA, 4716 bp, Zea Mays
tgccagccgttatggagcaaaaaagctctgccagccttaccgtccctacggcacgacgcctctaacgtcggcgaccgcgacgacgatgaccccgcgtatcccctcctcgtgtgctccgttcgcaatcgctgcctccatctcctacagcttgatgcaatatccgacgacaaagaaaaaggttcaagcaaggacccttgcgcatcagtgaagaaacgaacaataaaatcttccaagaactaaagattccctcgtatcaccgccagtcttttgagttgtgggatatttattttgtattatctatgtaatgatatgtatatatgttttttaaacaatttgtttaaatataacaaactaactccagatattgcaacagacatattaacccttggtatgtctcacctaactttattttagataaacctatctattctagactctactcatatgttctgtgtttggtgtgagtatattaattacaataagtacaaatagtttgcttacaatcaatataacatatttaatattaaaattacaaaacatttgtgttatgttgtaaatagattatattgaacaaacctgttcacttattgtaaacagattcattttgtccctgtattacaatatttagcaaattaaataaactaaaatttttacagtttgtttaacctgtaaacagatttaaatatcgtttttgcaccagatttgtttcctcattaattcaaaggtccatatacactaaaattatttttcccttaattcaaagagacttagttctcttgtgtttttttgggaaaacaaagatgtctaaaattttgcactttgttgccaggactgttttgtagtcttagtgctttgttgtaatcagattcatcttgtccttatattatagccgttagcaaagtaattcaaataaaattttgcagtttgtttgcaatctgtaaacagttttaacatcatttttttgctctaaatatgttctctcattagttcaaaggtcaatgtgcactgaatatgttttaccttaattcaaggagattatgttcttctttatttttgggaaaacaaagattatctcagatttgaccttcatccgttttccatgcttctatatacaattgtgctttggaaaaatttgggagcccttaaaaccaaactaacccacttcggccaatgtttttttttcttattttagtttttaggtgaaatgaacaagcttgtatgctttaaccatgctatttcattgatgttggctaaccactccataaagtcagcttaatgtcctttgcgtccaaactgaaaaatgtttgcttgctaattggtgccttggcgctagctagaaaagtgggggatgcctgtgatatacattgctcaatttgatgatcctgtttcaaaattcttaaaccattatgtatatcaacttccatttagcattgatgctaccctctcttggtagtatatgaatactagcaggataaatgaactggaattttgcagacaatgttttcctttttttggtttgttttaagacgaggtgaacacacatgtatgtatgttgtaaccatgcgacaagtttctaacaaaacatatcattaatgtagtctaactgctcatatgttagcttgttgatgtcatttgcgtccaacaaaaaagaaaaaaacttgcttcttcggaaaatatctcatgaatgtaggctaagcactccataatatcaactttgctgacctttcatatgcaaaagaaaaaaacccgcttacttgctaattgatggcttggcgctagctagaaaggtggaatgcctgtgatagacattgttcagttttccgattttatttcagtatacttaatgcattatgtatatcaatatccaattttgaaactatctttttggatggaatctttgtcttcgtgtgtccgcttggaaaaaaatagggaccttttttgatctcttgctttagcatcataggtagttccagagaagcaactgcttgcctcctcggctccatgatgcaatgtaggcctctccttcacatatttccatcccaccaagctcgcttggtcagatgaacatgtcaagtgttttttatgtagtagctaattgtcactaactttttgtaaaaccagcggagctttaaagagttacatattcttatcaaacatgtaactctctacgaattatgtttctttctttacatattcgtttatttttcctaaatcacatctatttccttttttgtttatatagtacatagttgaccaaccttacaaaagagactacttacacagacatcatatttgtacttcattgtctaatgattggtaatattattgaaattttacctttcatttcacaggcttaaacaagaaccagtgcacatcaaagattccacacgccaaaaagatcaccataaatgatatatacaaaaaacatgaaaccaattgagatttggcccttgaatgcagtgtcacatcttttcttattggtcctgccattttacaactaaacataattctctcgtatgttcttaaccctctagccatgttctgaccgctaaaaccatttgatgcactgtaacttatgatagttttagatgatgacccacttagatatggaacgaagattctacatatgttgtcgtttgtaaactagatacaatgcatgcatatatatatatatatatatatatatatatatatatatatatatatatatatatatatatatatatatatatatatatatatccaacctttagattttgctacctactcactaaaagtacctgatcattgcaacttatatttatatattttggatgacgaacaacttagaaatgatatcaaggttatatataatatcatatcttgtgtttgttcccgtaaaaaataaccaccaatatctttactactctataagcctttattgtaggcctccacacccgtgcgccggttctgcctctcgatgcccgtctgcccgcgcgccccactccctcttccctggcgcgagatggatccgccgcgaatcgcccacaaatcatggcagtacttctctggttcacgcatctgtcggtccacaaatcacgcatccgtcatggcagcgacagacagacaagatttaacttgcatccatggcagccgccgcgcatctgtcggtccacaaatcacgcatccgtcggtcccaaatcacgcgccagggaaggtgctttccaaatcatgcgccagagaaggcgccttcccaaaacacacatccatggcagccgtcgcgcccgcgccagggaaggtgcttcccaaatcacgcgtcagggaaggtccttcccagatcacgcattcatggcagccgcgcccgtaaaccgcgcctcccccacgacgctcttccatccacagcgtcgcccccttccatccatggcagtcgcgctccctctgcgagcctatacgtgcggggatgttgggaggcgctaccaccaatcgagcggcattagccccgacctgaagcacacatggccggaatccagaggatatcgtgcccccgcccccatccggagtctgccccgcatcgtgcgatgctcgttgctgagctcccgatgaccgcccgatggtgtcgaaccccgcaccgtcgtcggcaccgcgctactcggcgtactcgctaccgtcgacccacctccccggagaggacatcctcttctgcatcgacgccgacctcgaggtccacgccaagatgaagtccgctgccgtagcatcctcgggatccacgtccactgcgtcgccgcagtccgtaggagctgatggtgccccggcggtggggacccggactgtggtcgcccgagaaccacccacgttgagactgacgcatcccaagccagataaggatggataccctcacatcttcgattatttcgccgtccaaacacatgatttcctggttcccctttggcttcctccagatcttgccttcgcccgcatcgaccatcgcgccgctgccgtgacctaccatggagctctgcctcgccgcgcgcgccgggacgatggcggccgcgtgccggaggatggcaccgacgataggcgtgccgaagaagaggcacgacggtggcactgtgcgcgtacgttgcgtggtgacgacgcccatgggggagaagacggagtaccgggacggcccgctggagcgtgcgttcatggggctgttcgcgcgaagatggagaagtacgcggcgaagaagtcggcggcgcaggcgaaggagaagagggcggtgtgggagtgggactacgagagcttcgtggacgtgtcgtggcggttccggcggctgttcccgccgacgcggtgggcctgcgagttcaacacggcgctgaccgtgcccttcttccgatggctcgtgggcccctcggaggtggaggtcggcggcctccggcagcgcagcgaggtgcgcatcgagaagtgccggtacctggagagcagcggctgcgtggggatgtgcgtcaacatgtgcaaggtccccacacaggacttcttcaccaacgagttcgggctccccctcaccatggacccaaagcggttgtgtcgtccgagcattgatctgaaccagcacagtttatcagggacgtagcagtgagttggttatagagaactcagatttgatggctaaacataaaagcgacttagaaggattcaagttatatgtatactaaagtggtgaggactcgcaagaagttcaatccactgccagaa

SEQ ID NO: 51637 - DNA, 5142 bp, Zea Mays
caaaaaagctctgccagccttaccgtccctacggcacgacgcctctaacgtcggcgaccgcgacgacgatgaccccgcgtatcccctcctcgtgtgctccgttcgcaatcgctgcctccatctcctacagcttgatgcaatatccgacgacaaagaaaaaggtccaaagacacaattgaattgccgtccaaaagatcacattctgcaacataatctcctacatgaattattttatgcttgccatgatatcatcattccatttttccttcttaattactgagaccatatacctgatcttctttgtactacatttcaatgacatgtttttatcttcatgtacaacatgttatacaatgttctctattctattcaagtgcatcccaaacgtaataccatataaaaattcagataaaggaaataggttaaatgtgatggacacttatactaaacgtatcaatctctgcattttccctgtttctttgttttttgattatttgttgcaacgatctggcattatttgtgaaaatatatataaataacttgctaattttttaaaatatgtgcccaaaatgatacaaatacaactcactccataaatgaaggtacaaataatagttcattaacattttttacaattcggctgaaggttcaagcaaggacccttgcgcatcagtgaagaaacgaacaataaaatcttccaagaactaaagattccctcgtatcaccgccagtcttttgagttgtgggatatttattttgtattatctatgtaatgatatgtatatatgttttttaaacaatttgtttaaatataacaaactaactccagatattgcaacagacatattaacccttggtatgtctcacctaactttattttagataaacctatctattctagactctactcatatgttctgtgtttggtgtgagtatattaattacaataagtacaaatagtttgcttacaatcaatataacatatttaatattaaaattacaaaacatttgtgttatgttgtaaatagattatattgaacaaacctgttcacttattgtaaacagattcattttgtccctgtattacaatatttagcaaattaaataaactaaaatttttacagtttgtttaacctgtaaacagatttaaatatcgtttttgcaccagatttgtttcctcattaattcaaaggtccatatacactaaaattatttttcccttaattcaaagagacttagttctcttgtgtttttttgggaaaacaaagatgtctaaaattttgcactttgttgccaggactgttttgtagtcttagtgctttgttgtaatcagattcatcttgtccttatattatagccgttagcaaagtaattcaaataaaattttgcagtttgtttgcaatctgtaaacagttttaacatcatttttttgctctaaatatgttctctcattagttcaaaggtcaatgtgcactgaatatgttttaccttaattcaaggagattatgttcttctttatttttgggaaaacaaagattatctcagatttgaccttcatccgttttccatgcttctatatacaattgtgctttggaaaaatttgggagcccttaaaaccaaactaacccacttcggccaatgtttttttttcttattttagtttttaggtgaaatgaacaagcttgtatgctttaaccatgctatttcattgatgttggctaaccactccataaagtcagcttaatgtcctttgcgtccaaactgaaaaatgtttgcttgctaattggtgccttggcgctagctagaaaagtgggggatgcctgtgatatacattgctcaatttgatgatcctgtttcaaaattcttaaaccattatgtatatcaacttccatttagcattgatgctaccctctcttggtagtatatgaatactagcaggataaatgaactggaattttgcagacaatgttttcctttttttggtttgttttaagacgaggtgaacacacatgtatgtatgttgtaaccatgcgacaagtttctaacaaaacatatcattaatgtagtctaactgctcatatgttagcttgttgatgtcatttgcgtccaacaaaaaagaaaaaaacttgcttcttcggaaaatatctcatgaatgtaggctaagcactccataatatcaactttgctgacctttcatatgcaaaagaaaaaaacccgcttacttgctaattgatggcttggcgctagctagaaaggtggaatgcctgtgatagacattgttcagttttccgattttatttcagtatacttaatgcattatgtatatcaatatccaattttgaaactatctttttggatggaatctttgtcttcgtgtgtccgcttggaaaaaaatagggaccttttttgatctcttgctttagcatcataggtagttccagagaagcaactgcttgcctcctcggctccatgatgcaatgtaggcctctccttcacatatttccatcccaccaagctcgcttggtcagatgaacatgtcaagtgttttttatgtagtagctaattgtcactaactttttgtaaaaccagcggagctttaaagagttacatattcttatcaaacatgtaactctctacgaattatgtttctttctttacatattcgtttatttttcctaaatcacatctatttccttttttgtttatatagtacatagttgaccaaccttacaaaagagactacttacacagacatcatatttgtacttcattgtctaatgattggtaatattattgaaattttacctttcatttcacaggcttaaacaagaaccagtgcacatcaaagattccacacgccaaaaagatcaccataaatgatatatacaaaaaacatgaaaccaattgagatttggcccttgaatgcagtgtcacatcttttcttattggtcctgccattttacaactaaacataattctctcgtatgttcttaaccctctagccatgttctgaccgctaaaaccatttgatgcactgtaacttatgatagttttagatgatgacccacttagatatggaacgaagattctacatatgttgtcgtttgtaaactagatacaatgcatgcatatatatatatatatatatatatatatatatatatatatatatatatatatatatatatatatatatatatatatatatatccaacctttagattttgctacctactcactaaaagtacctgatcattgcaacttatatttatatattttggatgacgaacaacttagaaatgatatcaaggttatatataatatcatatcttgtgtttgttcccgtaaaaaataaccaccaatatctttactactctataagcctttattgtaggcctccacacccgtgcgccggttctgcctctcgatgcccgtctgcccgcgcgccccactccctcttccctggcgcgagatggatccgccgcgaatcgcccacaaatcatggcagtacttctctggttcacgcatctgtcggtccacaaatcacgcatccgtcatggcagcgacagacagacaagatttaacttgcatccatggcagccgccgcgcatctgtcggtccacaaatcacgcatccgtcggtcccaaatcacgcgccagggaaggtgctttccaaatcatgcgccagagaaggcgccttcccaaaacacacatccatggcagccgtcgcgcccgcgccagggaaggtgcttcccaaatcacgcgtcagggaaggtccttcccagatcacgcattcatggcagccgcgcccgtaaaccgcgcctcccccacgacgctcttccatccacagcgtcgcccccttccatccatggcagtcgcgctccctctgcgagcctatacgtgcggggatgttgggaggcgctaccaccaatcgagcggcattagccccgacctgaagcacacatggccggaatccagaggatatcgtgcccccgcccccatccggagtctgccccgcatcgtgcgatgctcgttgctgagctcccgatgaccgcccgatggtgtcgaaccccgcaccgtcgtcggcaccgcgctactcggcgtactcgctaccgtcgacccacctccccggagaggacatcctcttctgcatcgacgccgacctcgaggtccacgccaagatgaagtccgctgccgtagcatcctcgggatccacgtccactgcgtcgccgcagtccgtaggagctgatggtgccccggcggtggggacccggactgtggtcgcccgagaaccacccacgttgagactgacgcatcccaagccagataaggatggataccctcacatcttcgattatttcgccgtccaaacacatgatttcctggttcccctttggcttcctccagatcttgccttcgcccgcatcgaccatcgcgccgctgccgtgacctaccatggagctctgcctcgccgcgcgcgccgggacgatggcggccgcgtgccggaggatggcaccgacgataggcgtgccgaagaagaggcacgacggtggcactgtgcgcgtacgttgcgtggtgacgacgcccatgggggagaagacggagtaccgggacggcccgctggagcgtgcgttcatggggctgttcgcgcgaagatggagaagtacgcggcgaagaagtcggcggcgcaggcgaaggagaagagggcggtgtgggagtgggactacgagagcttcgtggacgtgtcgtggcggttccggcggctgttcccgccgacgcggtgggcctgcgagttcaacacggcgctgaccgtgcccttcttccgatggctcgtgggcccctcggaggtggaggtcggcggcctccggcagcgcagcgaggtgcgcatcgagaagtgccggtacctggagagcagcggctgcgtggggatgtgcgtcaacatgtgcaaggtccccacacaggacttcttcaccaacgagttcgggctccccctcaccatggacccaagtacgaggttttcaaaaatccgagcattagtgatgtcctgtgcacaacaacagcagaggctcttgcaatggggaaattcgtgatttgcgcagaacatccatcaaatgagttttttcatgtcatttccgaactgttt

SEQ ID NO: 51638 - DNA, 4871 bp, Zea Mays
gacgcctctaacgtcggcgaccgcgacgacgatgaccccgcgtatcccctcctcgtgtgctccgttcgcaatcgctgcctccatctcctacaggttcaagcaaggacccttgcgcatcagtgaagaaacgaacaataaaatcttccaagaactaaagattccctcgtatcaccgccagtcttttgagttgtgggatatttattttgtattatctatgtaatgatatgtatatatgttttttaaacaatttgtttaaatataacaaactaactccagatattgcaacagacatattaacccttggtatgtctcacctaactttattttagataaacctatctattctagactctactcatatgttctgtgtttggtgtgagtatattaattacaataagtacaaatagtttgcttacaatcaatataacatatttaatattaaaattacaaaacatttgtgttatgttgtaaatagattatattgaacaaacctgttcacttattgtaaacagattcattttgtccctgtattacaatatttagcaaattaaataaactaaaatttttacagtttgtttaacctgtaaacagatttaaatatcgtttttgcaccagatttgtttcctcattaattcaaaggtccatatacactaaaattatttttcccttaattcaaagagacttagttctcttgtgtttttttgggaaaacaaagatgtctaaaattttgcactttgttgccaggactgttttgtagtcttagtgctttgttgtaatcagattcatcttgtccttatattatagccgttagcaaagtaattcaaataaaattttgcagtttgtttgcaatctgtaaacagttttaacatcatttttttgctctaaatatgttctctcattagttcaaaggtcaatgtgcactgaatatgttttaccttaattcaaggagattatgttcttctttatttttgggaaaacaaagattatctcagatttgaccttcatccgttttccatgcttctatatacaattgtgctttggaaaaatttgggagcccttaaaaccaaactaacccacttcggccaatgtttttttttcttattttagtttttaggtgaaatgaacaagcttgtatgctttaaccatgctatttcattgatgttggctaaccactccataaagtcagcttaatgtcctttgcgtccaaactgaaaaatgtttgcttgctaattggtgccttggcgctagctagaaaagtgggggatgcctgtgatatacattgctcaatttgatgatcctgtttcaaaattcttaaaccattatgtatatcaacttccatttagcattgatgctaccctctcttggtagtatatgaatactagcaggataaatgaactggaattttgcagacaatgttttcctttttttggtttgttttaagacgaggtgaacacacatgtatgtatgttgtaaccatgcgacaagtttctaacaaaacatatcattaatgtagtctaactgctcatatgttagcttgttgatgtcatttgcgtccaacaaaaaagaaaaaaacttgcttcttcggaaaatatctcatgaatgtaggctaagcactccataatatcaactttgctgacctttcatatgcaaaagaaaaaaacccgcttacttgctaattgatggcttggcgctagctagaaaggtggaatgcctgtgatagacattgttcagttttccgattttatttcagtatacttaatgcattatgtatatcaatatccaattttgaaactatctttttggatggaatctttgtcttcgtgtgtccgcttggaaaaaaatagggaccttttttgatctcttgctttagcatcataggtagttccagagaagcaactgcttgcctcctcggctccatgatgcaatgtaggcctctccttcacatatttccatcccaccaagctcgcttggtcagatgaacatgtcaagtgttttttatgtagtagctaattgtcactaactttttgtaaaaccagcggagctttaaagagttacatattcttatcaaacatgtaactctctacgaattatgtttctttctttacatattcgtttatttttcctaaatcacatctatttccttttttgtttatatagtacatagttgaccaaccttacaaaagagactacttacacagacatcatatttgtacttcattgtctaatgattggtaatattattgaaattttacctttcatttcacaggcttaaacaagaaccagtgcacatcaaagattccacacgccaaaaagatcaccataaatgatatatacaaaaaacatgaaaccaattgagatttggcccttgaatgcagtgtcacatcttttcttattggtcctgccattttacaactaaacataattctctcgtatgttcttaaccctctagccatgttctgaccgctaaaaccatttgatgcactgtaacttatgatagttttagatgatgacccacttagatatggaacgaagattctacatatgttgtcgtttgtaaactagatacaatgcatgcatatatatatatatatatatatatatatatatatatatatatatatatatatatatatatatatatatatatatatatatatccaacctttagattttgctacctactcactaaaagtacctgatcattgcaacttatatttatatattttggatgacgaacaacttagaaatgatatcaaggttatatataatatcatatcttgtgtttgttcccgtaaaaaataaccaccaatatctttactactctataagcctttattgtaggcctccacacccgtgcgccggttctgcctctcgatgcccgtctgcccgcgcgccccactccctcttccctggcgcgagatggatccgccgcgaatcgcccacaaatcatggcagtacttctctggttcacgcatctgtcggtccacaaatcacgcatccgtcatggcagcgacagacagacaagatttaacttgcatccatggcagccgccgcgcatctgtcggtccacaaatcacgcatccgtcggtcccaaatcacgcgccagggaaggtgctttccaaatcatgcgccagagaaggcgccttcccaaaacacacatccatggcagccgtcgcgcccgcgccagggaaggtgcttcccaaatcacgcgtcagggaaggtccttcccagatcacgcattcatggcagccgcgcccgtaaaccgcgcctcccccacgacgctcttccatccacagcgtcgcccccttccatccatggcagtcgcgctccctctgcgagcctatacgtgcggggatgttgggaggcgctaccaccaatcgagcggcattagccccgacctgaagcacacatggccggaatccagaggatatcgtgcccccgcccccatccggagtctgccccgcatcgtgcgatgctcgttgctgagctcccgatgaccgcccgatggtgtcgaaccccgcaccgtcgtcggcaccgcgctactcggcgtactcgctaccgtcgacccacctccccggagaggacatcctcttctgcatcgacgccgacctcgaggtccacgccaagatgaagtccgctgccgtagcatcctcgggatccacgtccactgcgtcgccgcagtccgtaggagctgatggtgccccggcggtggggacccggactgtggtcgcccgagaaccacccacgttgagactgacgcatcccaagccagataaggatggataccctcacatcttcgattatttcgccgtccaaacacatgatttcctggttcccctttggcttcctccagatcttgccttcgcccgcatcgaccatcgcgccgctgccgtgacctaccatggagctctgcctcgccgcgcgcgccgggacgatggcggccgcgtgccggaggatggcaccgacgataggcgtgccgaagaagaggcacgacggtggcactgtgcgcgtacgttgcgtggtgacgacgcccatgggggagaagacggagtaccgggacggcccgctggagcgtgcgttcatggggctgttcgcgcgaagatggagaagtacgcggcgaagaagtcggcggcgcaggcgaaggagaagagggcggtgtgggagtgggactacgagagcttcgtggacgtgtcgtggcggttccggcggctgttcccgccgacgcggtgggcctgcgagttcaacacggcgctgaccgtgcccttcttccgatggctcgtgggcccctcggaggtggaggtcggcggcctccggcagcgcagcgaggtgcgcatcgagaagtgccggtacctggagagcagcggctgcgtggggatgtgcgtcaacatgtgcaaggtccccacacaggacttcttcaccaacgagttcgggctccccctcaccatggacccaagtgagtgctctgcttggctctattattcaggggtgatgaacatggattgattggattgattgatccatggccatccgtggatctcaaccaagtgcatatttcgaagacatgagttgcgagatgatatacggctaggtgcctcctccgttggaagaggacccggcgtcgaagcaagcttgctacccgagcctctgttccatgttgacgctgtgtgccccggcctgtcccaagcttcaatagagcggttgtgtcgtccgagcattgatctgaaccagcacagtttatcagggacgtagcagtgagttggttatagagaactcagatttgatggctaaacataaaagcgacttagaaggattcaagttatatgtatactaaagtggtgaggactcgcaagaagttcaatccactgccagaa

SEQ ID NO: 51639 - DNA, 1413 bp, Zea Mays
gcctaaacaaggtaggaaaagaaagaataaaaaaacctcacagcataatttgtccgacatcatggatggcggtctagcgttggcccatcgatgcttaactggcaatgagactcatgactcaactgtaaaaaattcttcaccagcaaaaaggcctgcacatgatgaactgttaatgaacccgcgagtagcacctttcaatgagactggttctctgggcacaatctatcctactagaaaggatacctttggaggatttagtgtacacgttccttacgtttcaaggatgagaagggggcgccctaggaaggacttcatttcatttgcggtaacaatctacgataagggaccctcggttgaacctaaagggattcagccatcagttgagatgatattagtgaaggatggtgacaagggaaaccacctgaggaaagtacctgaggttccactaaaggttagttctgagaacgagcatgcagaagcagttgatagcaaaggggttcggaacctacaagcaaaggtctgcagtgctgtttccaagcctaaaataaagcatggtttaacgcggaagcatcatcgagcatggacattgagtgaggtcgtgaagctggtggatggtgtggctcggtatggagctggcaagtggtctgagattagaaaactgtccttcgcctcgtattcctaccgcacttcagtggatctcaaggataaatggcgtaatctgatcagagcaacccagacacagcttccggcgcaaaaagatggtgcctgtccacggaagactaacccttctatcataccaataccaccatccattttgttgcgagtgaaggagctacatgagctgcagtcgcaagggggtggcttcacagccccagtcaagttctctgggcaggacggcaaggttctacagggaaaaggctcgggttttttgtgatccgtgtaatgcagatatacgtgtacgcttctggacgatgtggtatatatgagtaaatattatttgaagtaggtgtaaccacgttatccatcacaatgttctctacacgctggaacatgtgtaactcaggacgtccagaaaatattgttatacttagataagggcagacgtctgtcgccatgttttccaaacgtgtcaggcgtacacaatttaaaaagcaaatgcaaatctagacaggaagaggaaagttagagtaaacggagtatttgcggtgcattacaggaaagttgttgcagcaataatgaactaaactagtatttgcgatgcattacagaatggaatccgcaattcccttgtaaatagaggcaaacagctttctcgtttcggcttgtgctttataaattgctttggctcaaaagacgacgttttctccagcactggttgattcatgtgcactgttggagcaaataggaatgtcc

SEQ ID NO: 51640 - DNA, 2798 bp, Zea Mays
gtgagcttgatcggtccgcatccgcaaggctcactcggcaatctttacgtgctcgataagttttgtgtttttccatccatccatacatacatatcgtcgtcgtcatccccgcccgcccctcgacacccagccgtacgatccgcatcccggatccatcccagccgcccgccggctctgccacccctccccggctggatcccctttcccttttcgaaaccacccttcctccgttcctcggctcctccttgcggtgagaaacacggtgtcgccctcgaggctcgaccccgaccttttcctcccctcttctctagatcgcgacgaggcggactccccactcctgctgcccggagcgaagcggaccgcgtccccgccgcgtggcctgatcgatccctcagctctgccggtcgggccaatgctgcgtgcatcgagctgccgctgatcacgtttgacttatctatggaaatggatgactcacatggcaccatggttaataaaagtgaagagaatgactttgaaaagaaaggcacttctgatcctgtggtttatcagctagttcgggttgaaggtgatggaacacttgttcctgctacagaggatgatgttttgcagtttgaacatttccttcacaacgagaaggttgatcttcctcctattgaagatgcagaccatgtggaagagtttttcaacaatgactgcatgttactgaagaagcctgacttggaagatggatcttccaaattggagactgtggaagcacacacacaaaaattgggtgccaacttagaggaaaacatattacagtcattggatgattcccttagtcctccctcagactttagaattcatagtcagcattcagataaattgcttacagaacaaggggcaaacgtcactcgacaggacaatgcttcaactgagactacaaaatcgacagtgttaaatgactcttgctgtgctgaaaaatataaggctgatgcctgctcaagatctgtatgcgacacatctacagatccatctgtttcgggagttaatagttccatgcctgatttttccatattaagaggagaagtctgtttggatgatcttactattagagaacttcaggaggcgtttagagccacgtttggccggcagactaatgtcaaagacaagatatggctcaaaagacggattacaatgggcttgactaattcctacgatgttccaagttcaggttgtgtagttaaagactacaaaattgttggcaaggatgccaaaaatgatatgtcagacatggatgaaagagctaagactgggcttagagctacttctgtggttatatatccaggaaacgaaggggactctccatctagctcttactatcagagcgaggaccaggaagattcttccaagagggtgccgatccataatgatgaaccacaaggaaatctgctaggcgagcaatgcactgacaagcgaactagaaagccaacaaaaagatacatagaggagctatcagacattgagactcatgactcaactgtaaaaaattcttcaccagcaaaaaggcctgcacatgatgaactgttaatgaacccgcgagtagcacctttcaatgagactggttctctgggcacaatctatcctactagaaaggatacctttggaggatttagtgtacacgttccttacgtttcaaggatgagaagggggcgccctaggaaggacttcatttcatttgcggataagggaccctcggttgaacctaaagggattcagccatcagttgagatgatattagtgaaggatggtgacaagggaaaccacctgaggaaagtacctgaggttccactaaaggttagttctgagaacgagcatgcagaagcagttgatagcaaaggggttcggaacctacaagcaaaggtctgcagtgctgtttccaagcctaaaataaagcatggtttaacgcggaagcatcatcgagcatggacattgagtgaggtcgtgaagctggtggatggtgtggctcggtatggagctggcaagtggtctgagattagaaaactgtccttcgcctcgtattcctaccgcacttcagtggatctcaaggataaatggcgtaatctgatcagagcaacccagacacagcttccggcgcaaaaagatggtgcctgtccacggaagactaacccttctatcataccaataccaccatccattttgttgcgagtgaaggagctacatgagctgcagtcgcaagggggtggcttcacagccccagtcaagttctctgggcaggacggcaaggttctacagggaaaaggctcgggttttttgtgatccgtgtaatgcagatatacgtgtacgcttctggacgatgtggtatatatgagtaaatattatttgaagtaggtgtaaccacgttatccatcacaatgttctctacacgctggaacatgtgtaactcaggacgtccagaaaatattgttatacttagataagggcagacgtctgtcgccatgttttccaaacgtgtcaggcgtacacaatttaaaaagcaaatgcaaatctagacaggaagaggaaagttagagtaaacggagtatttgcggtgcattacaggaaagttgttgcagcaataatgaactaaactagtatttgcgatgcattacagaatggaatccgcaattcccttgtaaatagaggcaaacagctttctcgtttcggcttgtgctttataaattgctttggctcaaaagacgacgttttctccagcactggttgattcatgtgcactgttggagcaaataggaatgtcc

SEQ ID NO: 51641 - DNA, 2815 bp, Zea Mays
cggcaatctttacgtgctcgataagttttgtgtttttccatccatccatacatacatatcgtcgtcgtcatccccgcccgcccctcgacacccagccgtacgatccgcatcccggatccatcccagccgcccgccggctctgccacccctccccggctggatcccctttcccttttcgaaaccacccttcctccgttcctcggctcctccttgcggtgagaaacacggtgtcgccctcgaggctcgaccccgaccttttcctcccctcttctctagatcgcgacgaggcggactccccactcctgctgcccggagcgaagcggaccgcgtccccgccgcgtggcctgatcgatccctcagctctgccggtcgggccaatgctgcgtgcatcgagctgccgctgatcacgattatagggtttaatacttgtatattttgattgtcacaaatgttggatgaagtttgacttatctatggaaatggatgactcacatggcaccatggttaataaaagtgaagagaatgactttgaaaagaaaggcacttctgatcctgtggtttatcagctagttcgggttgaaggtgatggaacacttgttcctgctacagaggatgatgttttgcagtttgaacatttccttcacaacgagaaggttgatcttcctcctattgaagatgcagaccatgtggaagagtttttcaacaatgactgcatgttactgaagaagcctgacttggaagatggatcttccaaattggagactgtggaagcacacacacaaaaattgggtgccaacttagaggaaaacatattacagtcattggatgattcccttagtcctccctcagactttagaattcatagtcagcattcagataaattgcttacagaacaaggggcaaacgtcactcgacaggacaatgcttcaactgagactacaaaatcgacagtgttaaatgactcttgctgtgctgaaaaatataaggctgatgcctgctcaagatctgtatgcgacacatctacagatccatctgtttcgggagttaatagttccatgcctgatttttccatattaagaggagaagtctgtttggatgatcttactattagagaacttcaggaggcgtttagagccacgtttggccggcagactaatgtcaaagacaagatatggctcaaaagacggattacaatgggcttgactaattcctacgatgttccaagttcaggttgtgtagttaaagactacaaaattgttggcaaggatgccaaaaatgatatgtcagacatggatgaaagagctaagactgggcttagagctacttctgtggttatatatccaggaaacgaaggggactctccatctagctcttactatcagagcgaggaccaggaagattcttccaagagggtgccgatccataatgatgaaccacaaggaaatctgctaggcgagcaatgcactgacaagcgaactagaaagccaacaaaaagatacatagaggagctatcagacattgagactcatgactcaactgtaaaaaattcttcaccagcaaaaaggcctgcacatgatgaactgttaatgaacccgcgagtagcacctttcaatgagactggttctctgggcacaatctatcctactagaaaggatacctttggaggatttagtgtacacgttccttacgtttcaaggatgagaagggggcgccctaggaaggacttcatttcatttgcggataagggaccctcggttgaacctaaagggattcagccatcagttgagatgatattagtgaaggatggtgacaagggaaaccacctgaggaaagtacctgaggttccactaaaggttagttctgagaacgagcatgcagaagcagttgatagcaaaggggttcggaacctacaagcaaaggtctgcagtgctgtttccaagcctaaaataaagcatggtttaacgcggaagcatcatcgagcatggacattgagtgaggtcgtgaagctggtggatggtgtggctcggtatggagctggcaagtggtctgagattagaaaactgtccttcgcctcgtattcctaccgcacttcagtggatctcaaggataaatggcgtaatctgatcagagcaacccagacacagcttccggcgcaaaaagatggtgcctgtccacggaagactaacccttctatcataccaataccaccatccattttgttgcgagtgaaggagctacatgagctgcagtcgcaagggggtggcttcacagccccagtcaagttctctgggcaggacggcaaggttctacagggaaaaggctcgggttttttgtgatccgtgtaatgcagatatacgtgtacgcttctggacgatgtggtatatatgagtaaatattatttgaagtaggtgtaaccacgttatccatcacaatgttctctacacgctggaacatgtgtaactcaggacgtccagaaaatattgttatacttagataagggcagacgtctgtcgccatgttttccaaacgtgtcaggcgtacacaatttaaaaagcaaatgcaaatctagacaggaagaggaaagttagagtaaacggagtatttgcggtgcattacaggaaagttgttgcagcaataatgaactaaactagtatttgcgatgcattacagaatggaatccgcaattcccttgtaaatagaggcaaacagctttctcgtttcggcttgtgctttataaattgctttggctcaaaagacgacgttttctccagcactggttgattcatgtgcactgttggagcaaataggaatgtcc

SEQ ID NO: 51642 - DNA, 2787 bp, Zea Mays
atcgtcgtcgtcatccccgcccgcccctcgacacccagccgtacgatccgcatcccggatccatcccagccgcccgccggctctgccacccctccccggctggatcccctttcccttttcgaaaccacccttcctccgttcctcggctcctccttgcggtgagaaacacggtgtcgccctcgaggctcgaccccgaccttttcctcccctcttctctagatcgcgacgaggcggactccccactcctgctgcccggagcgaagcggaccgcgtccccgccgcgtggcctgatcgatccctcagctctgccggtcgggccaatgctgcgtgcatcgagctgccgctgatcacgttcttcgcggttgcggcccccagtttgtgcggtgtggcgttggcggaaccttgtggaggctagttgctccaggactttgattttgacttatctatggaaatggatgactcacatggcaccatggttaataaaagtgaagagaatgactttgaaaagaaaggcacttctgatcctgtggtttatcagctagttcgggttgaaggtgatggaacacttgttcctgctacagaggatgatgttttgcagtttgaacatttccttcacaacgagaaggttgatcttcctcctattgaagatgcagaccatgtggaagagtttttcaacaatgactgcatgttactgaagaagcctgacttggaagatggatcttccaaattggagactgtggaagcacacacacaaaaattgggtgccaacttagaggaaaacatattacagtcattggatgattcccttagtcctccctcagactttagaattcatagtcagcattcagataaattgcttacagaacaaggggcaaacgtcactcgacaggacaatgcttcaactgagactacaaaatcgacagtgttaaatgactcttgctgtgctgaaaaatataaggctgatgcctgctcaagatctgtatgcgacacatctacagatccatctgtttcgggagttaatagttccatgcctgatttttccatattaagaggagaagtctgtttggatgatcttactattagagaacttcaggaggcgtttagagccacgtttggccggcagactaatgtcaaagacaagatatggctcaaaagacggattacaatgggcttgactaattcctacgatgttccaagttcaggttgtgtagttaaagactacaaaattgttggcaaggatgccaaaaatgatatgtcagacatggatgaaagagctaagactgggcttagagctacttctgtggttatatatccaggaaacgaaggggactctccatctagctcttactatcagagcgaggaccaggaagattcttccaagagggtgccgatccataatgatgaaccacaaggaaatctgctaggcgagcaatgcactgacaagcgaactagaaagccaacaaaaagatacatagaggagctatcagacattgagactcatgactcaactgtaaaaaattcttcaccagcaaaaaggcctgcacatgatgaactgttaatgaacccgcgagtagcacctttcaatgagactggttctctgggcacaatctatcctactagaaaggatacctttggaggatttagtgtacacgttccttacgtttcaaggatgagaagggggcgccctaggaaggacttcatttcatttgcggataagggaccctcggttgaacctaaagggattcagccatcagttgagatgatattagtgaaggatggtgacaagggaaaccacctgaggaaagtacctgaggttccactaaaggttagttctgagaacgagcatgcagaagcagttgatagcaaaggggttcggaacctacaagcaaaggtctgcagtgctgtttccaagcctaaaataaagcatggtttaacgcggaagcatcatcgagcatggacattgagtgaggtcgtgaagctggtggatggtgtggctcggtatggagctggcaagtggtctgagattagaaaactgtccttcgcctcgtattcctaccgcacttcagtggatctcaaggataaatggcgtaatctgatcagagcaacccagacacagcttccggcgcaaaaagatggtgcctgtccacggaagactaacccttctatcataccaataccaccatccattttgttgcgagtgaaggagctacatgagctgcagtcgcaagggggtggcttcacagccccagtcaagttctctgggcaggacggcaaggttctacagggaaaaggctcgggttttttgtgatccgtgtaatgcagatatacgtgtacgcttctggacgatgtggtatatatgagtaaatattatttgaagtaggtgtaaccacgttatccatcacaatgttctctacacgctggaacatgtgtaactcaggacgtccagaaaatattgttatacttagataagggcagacgtctgtcgccatgttttccaaacgtgtcaggcgtacacaatttaaaaagcaaatgcaaatctagacaggaagaggaaagttagagtaaacggagtatttgcggtgcattacaggaaagttgttgcagcaataatgaactaaactagtatttgcgatgcattacagaatggaatccgcaattcccttgtaaatagaggcaaacagctttctcgtttcggcttgtgctttataaattgctttggctcaaaagacgacgttttctccagcactggttgattcatgtgcactgttggagcaaataggaatgtcc

SEQ ID NO: 51643 - DNA, 2755 bp, Zea Mays
gccacccctccccggctggatcccctttcccttttcgaaaccacccttcctccgttcctcggctcctccttgcggtgagaaacacggtgtcgccctcgaggctcgaccccgaccttttcctcccctcttctctagatcgcgacgaggcggactccccactcctgctgcccggagcgaagcggaccgcgtccccgccgcgtggcctgatcgatccctcagctctgccggtcgggccaatgctgcgtgcatcgagctgccgctgatcacgttcttcgcggttgcggcccccagtttgtgcggtgtggcgttggcggaaccttgtggaggctagttgctccaggactttgatattatagggtttaatacttgtatattttgattgtcacaaatgttggatgaagtttgacttatctatggaaatggatgactcacatggcaccatggttaataaaagtgaagagaatgactttgaaaagaaaggcacttctgatcctgtggtttatcagctagttcgggttgaaggtgatggaacacttgttcctgctacagaggatgatgttttgcagtttgaacatttccttcacaacgagaaggttgatcttcctcctattgaagatgcagaccatgtggaagagtttttcaacaatgactgcatgttactgaagaagcctgacttggaagatggatcttccaaattggagactgtggaagcacacacacaaaaattgggtgccaacttagaggaaaacatattacagtcattggatgattcccttagtcctccctcagactttagaattcatagtcagcattcagataaattgcttacagaacaaggggcaaacgtcactcgacaggacaatgcttcaactgagactacaaaatcgacagtgttaaatgactcttgctgtgctgaaaaatataaggctgatgcctgctcaagatctgtatgcgacacatctacagatccatctgtttcgggagttaatagttccatgcctgatttttccatattaagaggagaagtctgtttggatgatcttactattagagaacttcaggaggcgtttagagccacgtttggccggcagactaatgtcaaagacaagatatggctcaaaagacggattacaatgggcttgactaattcctacgatgttccaagttcaggttgtgtagttaaagactacaaaattgttggcaaggatgccaaaaatgatatgtcagacatggatgaaagagctaagactgggcttagagctacttctgtggttatatatccaggaaacgaaggggactctccatctagctcttactatcagagcgaggaccaggaagattcttccaagagggtgccgatccataatgatgaaccacaaggaaatctgctaggcgagcaatgcactgacaagcgaactagaaagccaacaaaaagatacatagaggagctatcagacattgagactcatgactcaactgtaaaaaattcttcaccagcaaaaaggcctgcacatgatgaactgttaatgaacccgcgagtagcacctttcaatgagactggttctctgggcacaatctatcctactagaaaggatacctttggaggatttagtgtacacgttccttacgtttcaaggatgagaagggggcgccctaggaaggacttcatttcatttgcggataagggaccctcggttgaacctaaagggattcagccatcagttgagatgatattagtgaaggatggtgacaagggaaaccacctgaggaaagtacctgaggttccactaaaggttagttctgagaacgagcatgcagaagcagttgatagcaaaggggttcggaacctacaagcaaaggtctgcagtgctgtttccaagcctaaaataaagcatggtttaacgcggaagcatcatcgagcatggacattgagtgaggtcgtgaagctggtggatggtgtggctcggtatggagctggcaagtggtctgagattagaaaactgtccttcgcctcgtattcctaccgcacttcagtggatctcaaggataaatggcgtaatctgatcagagcaacccagacacagcttccggcgcaaaaagatggtgcctgtccacggaagactaacccttctatcataccaataccaccatccattttgttgcgagtgaaggagctacatgagctgcagtcgcaagggggtggcttcacagccccagtcaagttctctgggcaggacggcaaggttctacagggaaaaggctcgggttttttgtgatccgtgtaatgcagatatacgtgtacgcttctggacgatgtggtatatatgagtaaatattatttgaagtaggtgtaaccacgttatccatcacaatgttctctacacgctggaacatgtgtaactcaggacgtccagaaaatattgttatacttagataagggcagacgtctgtcgccatgttttccaaacgtgtcaggcgtacacaatttaaaaagcaaatgcaaatctagacaggaagaggaaagttagagtaaacggagtatttgcggtgcattacaggaaagttgttgcagcaataatgaactaaactagtatttgcgatgcattacagaatggaatccgcaattcccttgtaaatagaggcaaacagctttctcgtttcggcttgtgctttataaattgctttggctcaaaagacgacgttttctccagcactggttgattcatgtgcactgttggagcaaataggaatgtcc

SEQ ID NO: 51644 - DNA, 2451 bp, Zea Mays
ctcggctcctccttgcggtgagaaacacggtgtcgccctcgaggctcgaccccgaccttttcctcccctcttctctagatcgcgacgaggcggactccccactcctgctgcccggagcgaagcggaccgcgtccccgccgcgtggcctgatcgatccctcagctctgccggtcgggccaatgctgcgtgcatcgagctgccgctgatcacgtttgacttatctatggaaatggatgactcacatggcaccatggttaataaaagtgaagagaatgactttgaaaagaaaggcacttctgatcctgtggtttatcagctagttcgggttgaaggtgatggaacacttgttcctgctacagaggatgatgttttgcagtttgaacatttccttcacaacgagaaggttgatcttcctcctattgaagatgcagaccatgtggaagagtttttcaacaatgactgcatgttactgaagaagcctgacttggaagatggatcttccaaattggagactgtggaagcacacacacaaaaattgggtgccaacttagaggacaatgcttcaactgagactacaaaatcgacagtgttaaatgactcttgctgtgctgaaaaatataaggctgatgcctgctcaagatctgtatgcgacacatctacagatccatctgtttcgggagttaatagttccatgcctgatttttccatattaagaggagaagtctgtttggatgatcttactattagagaacttcaggaggcgtttagagccacgtttggccggcagactaatgtcaaagacaagatatggctcaaaagacggattacaatgggcttgactaattcctacgatgttccaagttcaggttgtgtagttaaagactacaaaattgttggcaaggatgccaaaaatgatatgtcagacatggatgaaagagctaagactgggcttagagctacttctgtggttatatatccaggaaacgaaggggactctccatctagctcttactatcagagcgaggaccaggaagattcttccaagagggtgccgatccataatgatgaaccacaaggaaatctgctaggcgagcaatgcactgacaagcgaactagaaagccaacaaaaagatacatagaggagctatcagacattgagactcatgactcaactgtaaaaaattcttcaccagcaaaaaggcctgcacatgatgaactgttaatgaacccgcgagtagcacctttcaatgagactggttctctgggcacaatctatcctactagaaaggatacctttggaggatttagtgtacacgttccttacgtttcaaggatgagaagggggcgccctaggaaggacttcatttcatttgcggataagggaccctcggttgaacctaaagggattcagccatcagttgagatgatattagtgaaggatggtgacaagggaaaccacctgaggaaagtacctgaggttccactaaaggttagttctgagaacgagcatgcagaagcagttgatagcaaaggggttcggaacctacaagcaaaggtctgcagtgctgtttccaagcctaaaataaagcatggtttaacgcggaagcatcatcgagcatggacattgagtgaggtcgtgaagctggtggatggtgtggctcggtatggagctggcaagtggtctgagattagaaaactgtccttcgcctcgtattcctaccgcacttcagtggatctcaaggataaatggcgtaatctgatcagagcaacccagacacagcttccggcgcaaaaagatggtgcctgtccacggaagactaacccttctatcataccaataccaccatccattttgttgcgagtgaaggagctacatgagctgcagtcgcaagggggtggcttcacagccccagtcaagttctctgggcaggacggcaaggttctacagggaaaaggctcgggttttttgtgatccgtgtaatgcagatatacgtgtacgcttctggacgatgtggtatatatgagtaaatattatttgaagtaggtgtaaccacgttatccatcacaatgttctctacacgctggaacatgtgtaactcaggacgtccagaaaatattgttatacttagataagggcagacgtctgtcgccatgttttccaaacgtgtcaggcgtacacaatttaaaaagcaaatgcaaatctagacaggaagaggaaagttagagtaaacggagtatttgcggtgcattacaggaaagttgttgcagcaataatgaactaaactagtatttgcgatgcattacagaatggaatccgcaattcccttgtaaatagaggcaaacagctttctcgtttcggcttgtgctttataaattgctttggctcaaaagacgacgttttctccagcactggttgattcatgtgcactgttggagcaaataggaatgtcc

SEQ ID NO: 51645 - DNA, 1596 bp, Zea Mays
ctcggctcctccttgcggtgagaaacacggtgtcgccctcgaggctcgaccccgaccttttcctcccctcttctctagatcgcgacgaggcggactccccactcctgctgcccggagcgaagcggaccgcgtccccgccgcgtggcctgatcgatccctcagctctgccggtcgggccaatgctgcgtgcatcgagctgccgctgatcacgttcttcgcggttgcggcccccagtttgtgcggtgtggcgttggcggaaccttgtggaggctagttgctccaggactttgattttgacttatctatggaaatggatgactcacatggcaccatggttaataaaagtgaagagaatgactttgaaaagaaaggcacttctgatcctgtggtttatcagctagttcgggttgaaggtgatggaacacttgttcctgctacagaggatgatgttttgcagtttgaacatttccttcacaacgagaaggttgatcttcctcctattgaagatgcagaccatgtggaagagtttttcaacaatgactgcatgttactgaagaagcctgacttggaagatggatcttccaaattggagactgtggaagcacacacacaaaaattgggtgccaacttagaggttagttctgagaacgagcatgcagaagcagttgatagcaaaggggttcggaacctacaagcaaaggtctgcagtgctgtttccaagcctaaaataaagcatggtttaacgcggaagcatcatcgagcatggacattgagtgaggtcgtgaagctggtggatggtgtggctcggtatggagctggcaagtggtctgagattagaaaactgtccttcgcctcgtattcctaccgcacttcagtggatctcaaggataaatggcgtaatctgatcagagcaacccagacacagcttccggcgcaaaaagatggtgcctgtccacggaagactaacccttctatcataccaataccaccatccattttgttgcgagtgaaggagctacatgagctgcagtcgcaagggggtggcttcacagccccagtcaagttctctgggcaggacggcaaggttctacagggaaaaggctcgggttttttgtgatccgtgtaatgcagatatacgtgtacgcttctggacgatgtggtatatatgagtaaatattatttgaagtaggtgtaaccacgttatccatcacaatgttctctacacgctggaacatgtgtaactcaggacgtccagaaaatattgttatacttagataagggcagacgtctgtcgccatgttttccaaacgtgtcaggcgtacacaatttaaaaagcaaatgcaaatctagacaggaagaggaaagttagagtaaacggagtatttgcggtgcattacaggaaagttgttgcagcaataatgaactaaactagtatttgcgatgcattacagaatggaatccgcaattcccttgtaaatagaggcaaacagctttctcgtttcggcttgtgctttataaattgctttggctcaaaagacgacgttttctccagcactggttgattcatgtgcactgttggagcaaataggaatgtcc

SEQ ID NO: 51646 - DNA, 1705 bp, Zea Mays
ctcctccttgcggtgagaaacacggtgtcgccctcgaggctcgaccccgaccttttcctcccctcttctctagatcgcgacgaggcggactccccactcctgctgcccggagcgaagcggaccgcgtccccgccgcgtggcctgatcgatccctcagctctgccggtcgggccaatgctgcgtgcatcgagctgccgctgatcacgttcttcgcggttgcggcccccagtttgtgcggtgtggcgttggcggaaccttgtggaggctagttgctccaggactttgattttgacttatctatggaaatggatgactcacatggcaccatggttaataaaagtgaagagaatgactttgaaaagaaaggcacttctgatcctgtggtttatcagctagttcgggttgaaggtgatggaacacttgttcctgctacagaggatgatgttttgcagtttgaacatttccttcacaacgagaaggttgatcttcctcctattgaagatgcagaccatgtggaagagtttttcaacaatgactgcatgttactgaagaagcctgacttggaagatggatcttccaaattggagactgtggaagcacacacacaaaaattgggtgccaacttagaggataagggaccctcggttgaacctaaagggattcagccatcagttgagatgatattagtgaaggatggtgacaagggaaaccacctgaggaaagtacctgaggttccactaaaggttagttctgagaacgagcatgcagaagcagttgatagcaaaggggttcggaacctacaagcaaaggtctgcagtgctgtttccaagcctaaaataaagcatggtttaacgcggaagcatcatcgagcatggacattgagtgaggtcgtgaagctggtggatggtgtggctcggtatggagctggcaagtggtctgagattagaaaactgtccttcgcctcgtattcctaccgcacttcagtggatctcaaggataaatggcgtaatctgatcagagcaacccagacacagcttccggcgcaaaaagatggtgcctgtccacggaagactaacccttctatcataccaataccaccatccattttgttgcgagtgaaggagctacatgagctgcagtcgcaagggggtggcttcacagccccagtcaagttctctgggcaggacggcaaggttctacagggaaaaggctcgggttttttgtgatccgtgtaatgcagatatacgtgtacgcttctggacgatgtggtatatatgagtaaatattatttgaagtaggtgtaaccacgttatccatcacaatgttctctacacgctggaacatgtgtaactcaggacgtccagaaaatattgttatacttagataagggcagacgtctgtcgccatgttttccaaacgtgtcaggcgtacacaatttaaaaagcaaatgcaaatctagacaggaagaggaaagttagagtaaacggagtatttgcggtgcattacaggaaagttgttgcagcaataatgaactaaactagtatttgcgatgcattacagaatggaatccgcaattcccttgtaaatagaggcaaacagctttctcgtttcggcttgtgctttataaattgctttggctcaaaagacgacgttttctccagcactggttgattcatgtgcactgttggagcaaataggaatgtcc

SEQ ID NO: 51647 - DNA, 2559 bp, Zea Mays
cctccttgcggtgagaaacacggtgtcgccctcgaggctcgaccccgaccttttcctcccctcttctctagatcgcgacgaggcggactccccactcctgctgcccggagcgaagcggaccgcgtccccgccgcgtggcctgatcgatccctcagctctgccggtcgggccaatgctgcgtgcatcgagctgccgctgatcacgattatagggtttaatacttgtatattttgattgtcacaaatgttggatgaagtttgacttatctatggaaatggatgactcacatggcaccatggttaataaaagtgaagagaatgactttgaaaagaaaggcacttctgatcctgtggtttatcagctagttcggtttgaacatttccttcacaacgagaaggttgatcttcctcctattgaagatgcagaccatgtggaagagtttttcaacaatgactgcatgttactgaagaagcctgacttggaagatggatcttccaaattggagactgtggaagcacacacacaaaaattgggtgccaacttagaggaaaacatattacagtcattggatgattcccttagtcctccctcagactttagaattcatagtcagcattcagataaattgcttacagaacaaggggcaaacgtcactcgacaggacaatgcttcaactgagactacaaaatcgacagtgttaaatgactcttgctgtgctgaaaaatataaggctgatgcctgctcaagatctgtatgcgacacatctacagatccatctgtttcgggagttaatagttccatgcctgatttttccatattaagaggagaagtctgtttggatgatcttactattagagaacttcaggaggcgtttagagccacgtttggccggcagactaatgtcaaagacaagatatggctcaaaagacggattacaatgggcttgactaattcctacgatgttccaagttcaggttgtgtagttaaagactacaaaattgttggcaaggatgccaaaaatgatatgtcagacatggatgaaagagctaagactgggcttagagctacttctgtggttatatatccaggaaacgaaggggactctccatctagctcttactatcagagcgaggaccaggaagattcttccaagagggtgccgatccataatgatgaaccacaaggaaatctgctaggcgagcaatgcactgacaagcgaactagaaagccaacaaaaagatacatagaggagctatcagacattgagactcatgactcaactgtaaaaaattcttcaccagcaaaaaggcctgcacatgatgaactgttaatgaacccgcgagtagcacctttcaatgagactggttctctgggcacaatctatcctactagaaaggatacctttggaggatttagtgtacacgttccttacgtttcaaggatgagaagggggcgccctaggaaggacttcatttcatttgcggataagggaccctcggttgaacctaaagggattcagccatcagttgagatgatattagtgaaggatggtgacaagggaaaccacctgaggaaagtacctgaggttccactaaaggttagttctgagaacgagcatgcagaagcagttgatagcaaaggggttcggaacctacaagcaaaggtctgcagtgctgtttccaagcctaaaataaagcatggtttaacgcggaagcatcatcgagcatggacattgagtgaggtcgtgaagctggtggatggtgtggctcggtatggagctggcaagtggtctgagattagaaaactgtccttcgcctcgtattcctaccgcacttcagtggatctcaaggataaatggcgtaatctgatcagagcaacccagacacagcttccggcgcaaaaagatggtgcctgtccacggaagactaacccttctatcataccaataccaccatccattttgttgcgagtgaaggagctacatgagctgcagtcgcaagggggtggcttcacagccccagtcaagttctctgggcaggacggcaaggttctacagggaaaaggctcgggttttttgtgatccgtgtaatgcagatatacgtgtacgcttctggacgatgtggtatatatgagtaaatattatttgaagtaggtgtaaccacgttatccatcacaatgttctctacacgctggaacatgtgtaactcaggacgtccagaaaatattgttatacttagataagggcagacgtctgtcgccatgttttccaaacgtgtcaggcgtacacaatttaaaaagcaaatgcaaatctagacaggaagaggaaagttagagtaaacggagtatttgcggtgcattacaggaaagttgttgcagcaataatgaactaaactagtatttgcgatgcattacagaatggaatccgcaattcccttgtaaatagaggcaaacagctttctcgtttcggcttgtgctttataaattgctttggctcaaaagacgacgttttctccagcactggttgattcatgtgcactgttggagcaaataggaatgtcc

SEQ ID NO: 51648 - DNA, 1565 bp, Zea Mays
cttgcggtgagaaacacggtgtcgccctcgaggctcgaccccgaccttttcctcccctcttctctagatcgcgacgaggcggactccccactcctgctgcccggagcgaagcggaccgcgtccccgccgcgtggcctgatcgatccctcagctctgccggtcgggccaatgctgcgtgcatcgagctgccgctgatcacgtgaagagaatgactttgaaaagaaaggcacttctgatcctgtggtttatcagctagttcgggttgaaggtgatggaacacttgttcctgctacagaggatgatgttttgcagtttgaacatttccttcacaacgagaaggttgatcttcctcctattgaagatgcagaccatgtggaagagtttttcaacaatgactgcatgttactgaagaagcctgacttggaagatggatcttccaaattggagactgtggaagcacacacacaaaaattgggtgccaacttagaggataagggaccctcggttgaacctaaagggattcagccatcagttgagatgatattagtgaaggatggtgacaagggaaaccacctgaggaaagtacctgaggttccactaaaggttagttctgagaacgagcatgcagaagcagttgatagcaaaggggttcggaacctacaagcaaaggtctgcagtgctgtttccaagcctaaaataaagcatggtttaacgcggaagcatcatcgagcatggacattgagtgaggtcgtgaagctggtggatggtgtggctcggtatggagctggcaagtggtctgagattagaaaactgtccttcgcctcgtattcctaccgcacttcagtggatctcaaggataaatggcgtaatctgatcagagcaacccagacacagcttccggcgcaaaaagatggtgcctgtccacggaagactaacccttctatcataccaataccaccatccattttgttgcgagtgaaggagctacatgagctgcagtcgcaagggggtggcttcacagccccagtcaagttctctgggcaggacggcaaggttctacagggaaaaggctcgggttttttgtgatccgtgtaatgcagatatacgtgtacgcttctggacgatgtggtatatatgagtaaatattatttgaagtaggtgtaaccacgttatccatcacaatgttctctacacgctggaacatgtgtaactcaggacgtccagaaaatattgttatacttagataagggcagacgtctgtcgccatgttttccaaacgtgtcaggcgtacacaatttaaaaagcaaatgcaaatctagacaggaagaggaaagttagagtaaacggagtatttgcggtgcattacaggaaagttgttgcagcaataatgaactaaactagtatttgcgatgcattacagaatggaatccgcaattcccttgtaaatagaggcaaacagctttctcgtttcggcttgtgctttataaattgctttggctcaaaagacgacgttttctccagcactggttgattcatgtgcactgttggagcaaataggaatgtcc

SEQ ID NO: 51649 - DNA, 1618 bp, Zea Mays
cttgcggtgagaaacacggtgtcgccctcgaggctcgaccccgaccttttcctcccctcttctctagatcgcgacgaggcggactccccactcctgctgcccggagcgaagcggaccgcgtccccgccgcgtggcctgatcgatccctcagctctgccggtcgggccaatgctgcgtgcatcgagctgccgctgatcacgtttgacttatctatggaaatggatgactcacatggcaccatggttaataaaagtgaagagaatgactttgaaaagaaaggcacttctgatcctgtggtttatcagctagttcgggttgaaggtgatggaacacttgttcctgctacagaggatgatgttttgcagtttgaacatttccttcacaacgagaaggttgatcttcctcctattgaagatgcagaccatgtggaagagtttttcaacaatgactgcatgttactgaagaagcctgacttggaagatggatcttccaaattggagactgtggaagcacacacacaaaaattgggtgccaacttagaggataagggaccctcggttgaacctaaagggattcagccatcagttgagatgatattagtgaaggatggtgacaagggaaaccacctgaggaaagtacctgaggttccactaaaggttagttctgagaacgagcatgcagaagcagttgatagcaaaggggttcggaacctacaagcaaaggtctgcagtgctgtttccaagcctaaaataaagcatggtttaacgcggaagcatcatcgagcatggacattgagtgaggtcgtgaagctggtggatggtgtggctcggtatggagctggcaagtggtctgagattagaaaactgtccttcgcctcgtattcctaccgcacttcagtggatctcaaggataaatggcgtaatctgatcagagcaacccagacacagcttccggcgcaaaaagatggtgcctgtccacggaagactaacccttctatcataccaataccaccatccattttgttgcgagtgaaggagctacatgagctgcagtcgcaagggggtggcttcacagccccagtcaagttctctgggcaggacggcaaggttctacagggaaaaggctcgggttttttgtgatccgtgtaatgcagatatacgtgtacgcttctggacgatgtggtatatatgagtaaatattatttgaagtaggtgtaaccacgttatccatcacaatgttctctacacgctggaacatgtgtaactcaggacgtccagaaaatattgttatacttagataagggcagacgtctgtcgccatgttttccaaacgtgtcaggcgtacacaatttaaaaagcaaatgcaaatctagacaggaagaggaaagttagagtaaacggagtatttgcggtgcattacaggaaagttgttgcagcaataatgaactaaactagtatttgcgatgcattacagaatggaatccgcaattcccttgtaaatagaggcaaacagctttctcgtttcggcttgtgctttataaattgctttggctcaaaagacgacgttttctccagcactggttgattcatgtgcactgttggagcaaataggaatgtcc

SEQ ID NO: 51650 - DNA, 3740 bp, Zea Mays
aagtgacgaccaatgtggcagtgaaccacatggacgtggcccccttccaccgtctgtcttcacagcacagggcagggctcctcctcccacgaggagaaaccaaccaaaaaccccgagcccattaaaaccgcgccaccccgcctcgcctcgcgagcgagtgccactgctgccacgaccccgacgcggctccggccatggcccgcctcctccgggccctcgctgccctcctcgtcctcctcctcgcggccgcctccgtcgccgtcgccgacgacggagaaacactgctggagatcaagaaatccttccgcgacggcggcaacgcgctgtacgattggtccggcgacggcgcgtcgccgggctactgctcgtggcgcggcgtgctatgcgacaacgtcaccttcgctgtcgcggcgctcaacctctctgggctcaatctcgagggtgaaatctcagcggccatcgggagtctgcaacgtcttgtctcaatcgatttgaagtcgaatggactctctggacagatccccgatgagattggtgattgttctttgctcgaaactttggatttgtcatctaacaatctagaaggagacataccattctccatgtccaagctgaagcaccttgagaacttgattttgaagaacaacaaactggtgggagtgatcccatcgacactctctcaacttccaaatttgaagatattggacttggctcaaaacaagttaagtggtgaaattccgaatctaatatattggaatgaggttcttcaatacttgggattgcgaagcaatagtttagaaggaagcctctctcccgatatgtgccagttaactggtctgtggtactttgatgtgaagaacaatagcttgacgggtgcaataccagaaaccatagggaactgtacgagctttcagagatttgtcaaacaatcatcttactggagaaatcccgttcaatattggtttcctgcaagtggctacgttatctttgcaagggaacaagttctctggtcctataccatcagtgattggccttatgcaggcgcttgcagtgctagatctgagtttcaatgagctatctggcccaataccctctatactgggcaacttgacatacactgagaaattatacctgcaaggcaataggttaactggattgataccgccagagcttggtaatatgtcgacactgcattacctggaactgaacgacaatctgttgactgggttcattcctcctgatcttggaaaacttacagaattgtttgaattgaaccttgcaaacaacaaccttataggacctatccctgagaatttaagttcatgtgcaaatctcattagtttcaatgcttatggcaataaattgaatggaaccattccacgttcatttcacaagcttgagagtctgacttatctgaatctgtcatcaaatcatctcagtggagcacttccaattgaggttgcaagaatgagaaatttggacactctggacttatcctgtaacatgatcactggttcaattccctcggctattgggaaactagagcatcttttgaggctcaacttaagcaaaaataatgtggctggacacattcctgctgaatttgggaacttaaggagcatcatggagattgatttgtcttacaaccacctcagtggcctgattcctcaagaggttgggatgctacaaaatttgatactgttaaaattagaaagcaataatattactggagatgtctcttcacttatttactgcttgagtctcaatatcttaaatgtatcatacaaccatctttatggtactgtacctacagacaacaacttctcacgattttcacccgacagcttcttgggtaaccctggactttgtggctattggcttcactctgcttcatgcacacaattatccaatgcagagcaaatgaagagatcctctagcgcaaaggcctcaatgtttgcagctattggtgttggtgccgtattgcttgttattatgctcgttatcctagtagttatttgctggccacataactctccagtgctcaaagatgtctctgtaaacaaaccagataaccttgcttcagcatcaaacaacattcatcccaagcttgtgatcctccacatgaacatggccctctatgtatatgatgatataatgaggatgactgaaaacttgagcgaaaaatacattattggttatggagcctcaagtacagtctacagatgcgacctgaagaactgcaagccaattgcgattaaaaagctgtatgctcactaccctcagagcttgaaggaattcgagactgaacttgagactgttggaagcatcaaacaccggaatcttgtaagccttcaggggtactccctgtcaccatctgggaatctcctcttctatgattacatggaaaatggcagcctctgggacattttacatgcagcttcatcgaagaaaaagaaactcgattgggaggctcgcctcaagattgctctcggagctgctcaaggcctggcttatcttcaccatgaatgcagtccacgaataatccacagggatgtgaagtcaaagaatatcctcctagacaaagactacgaggctcatcttgctgacttcggtattgccaagagcttgtgtgtgtcgaagacgcacacatcaacgtacgtgatgggcaccattggctacattgaccctgagtatgcacggacatcccggatcaacgagaaatcggatgtgtacagctacggcattgtcttgctggagctgcttaccggcaaaaagcctgtcgacgacgagtgcaaccttcaccacttgatcctatccaaagccgcagagaacacggtcatggagacggtagaccaggacatcaccgacacgtgcaaggacctcggcgaggtcaagaaggtgttccagctggcgctcctttgcagcaagaggcagccgtcggatcgaccgaccatgcacgaggtcgcgcgcgtcctggacagcctcgtctgcccagcaggcccgcccccgaagcaggcgcaggcgcaggcacaggcacaggcgtcggagaagccgtccaccacggcgccgagctatgtcagcgagtacgtcggcctacgaggcggcggcggcggcagcgccctctcctgcaccaactcgtcgagcgcgtccgacgccgagctcttcatgaagtttggcgaggtgatctcgcggagcacggaatagtccaatagatcgacgatcattttgtgttacagtttacaataggtgtctggccggcgccctgtgatgtgactcgctgtaaatatgctgctgccttctcgttgggactccactaggcactagtagctatttttctccgttatgcacgtctctctctttttttttgctgggaaactcgaactgtaactaaaggaatggatttatgtgcaggctgcgtttactgacatgttttgtgattcagctgggacggttatgctattgctctgctcgatcggagcacactgttcaaggctggctggagatcatctgggcactgttactgttacgttatccttcctgggcttcctactcctggatcatgccactgctgcgctgcactgtcgcatgtattaccgtaccgacaaccgctgctgtaaaaaaacaaaaaaaaaactctcttgcttctcgggtttccctgttgaatccatggggaccgatggcaaggccgtgcccatgcagcgcatggaggcccgtctcatggagtgtcagggatgagtaca

SEQ ID NO: 51651 - DNA, 3745 bp, Zea Mays
aagtgacgaccaatgtggcagtgaaccacatggacgtggcccccttccaccgtctgtcttcacagcacagggcagggctcctcctcccacgaggagaaaccaaccaaaaaccccgagcccattaaaaccgcgccaccccgcctcgcctcgcgagcgagtgccactgctgccacgaccccgacgcggctccggccatggcccgcctcctccgggccctcgctgccctcctcgtcctcctcctcgcggccgcctccgtcgccgtcgccgacgacggagaaacactgctggagatcaagaaatccttccgcgacggcggcaacgcgctgtacgattggtccggcgacggcgcgtcgccgggctactgctcgtggcgcggcgtgctatgcgacaacgtcaccttcgctgtcgcggcgctcaacctctctgggctcaatctcgagggtgaaatctcagcggccatcgggagtctgcaacgtcttgtctcaatcgatttgaagtcgaatggactctctggacagatccccgatgagattggtgattgttctttgctcgaaactttggatttgtcatctaacaatctagaaggagacataccattctccatgtccaagctgaagcaccttgagaacttgattttgaagaacaacaaactggtgggagtgatcccatcgacactctctcaacttccaaatttgaagatattggacttggctcaaaacaagttaagtggtgaaattccgaatctaatatattggaatgaggttcttcaatacttgggattgcgaagcaatagtttagaaggaagcctctctcccgatatgtgccagttaactggtctgtggtactttgatgtgaagaacaatagcttgacgggtgcaataccagaaaccatagggaactgtacgagctttcaggtcttagatttgtcaaacaatcatcttactggagaaatcccgttcaatattggtttcctgcaagtggctacgttatctttgcaagggaacaagttctctggtcctataccatcagtgattggccttatgcaggcgcttgcagtgctagatctgagtttcaatgagctatctggcccaataccctctatactgggcaacttgacatacactgagaaattatacctgcaaggcaataggttaactggattgataccgccagagcttggtaatatgtcgacactgcattacctggaactgaacgacaatctgttgactgggttcattcctcctgatcttggaaaacttacagaattgtttgaattgaaccttgcaaacaacaaccttataggacctatccctgagaatttaagttcatgtgcaaatctcattagtttcaatgcttatggcaataaattgaatggaaccattccacgttcatttcacaagcttgagagtctgacttatctgaatctgtcatcaaatcatctcagtggagcacttccaattgaggttgcaagaatgagaaatttggacactctggacttatcctgtaacatgatcactggttcaattccctcggctattgggaaactagagcatcttttgaggctcaacttaagcaaaaataatgtggctggacacattcctgctgaatttgggaacttaaggagcatcatggagattgatttgtcttacaaccacctcagtggcctgattcctcaagaggttgggatgctacaaaatttgatactgttaaaattagaaagcaataatattactggagatgtctcttcacttatttactgcttgagtctcaatatcttaaatgtatcatacaaccatctttatggtactgtacctacagacaacaacttctcacgattttcacccgacagcttcttgggtaaccctggactttgtggctattggcttcactctgcttcatgcacacaattatccaatgcagagcaaatgaagagatcctctagcgcaaaggcctcaatgtttgcagctattggtgttggtgccgtattgcttgttattatgctcgttatcctagtagttatttgctggccacataactctccagtgctcaaagatgtctctgtaaacaaaccagataaccttgcttcagcatcaaacaacattcatcccaagcttgtgatcctccacatgaacatggccctctatgtatatgatgatataatgaggatgactgaaaacttgagcgaaaaatacattattggttatggagcctcaagtacagtctacagatgcgacctgaagaactgcaagccaattgcgattaaaaagctgtatgctcactaccctcagagcttgaaggaattcgagactgaacttgagactgttggaagcatcaaacaccggaatcttgtaagccttcaggggtactccctgtcaccatctgggaatctcctcttctatgattacatggaaaatggcagcctctgggacattttacatgcagcttcatcgaagaaaaagaaactcgattgggaggctcgcctcaagattgctctcggagctgctcaaggcctggcttatcttcaccatgaatgcagtccacgaataatccacagggatgtgaagtcaaagaatatcctcctagacaaagactacgaggctcatcttgctgacttcggtattgccaagagcttgtgtgtgtcgaagacgcacacatcaacgtacgtgatgggcaccattggctacattgaccctgagtatgcacggacatcccggatcaacgagaaatcggatgtgtacagctacggcattgtcttgctggagctgcttaccggcaaaaagcctgtcgacgacgagtgcaaccttcaccacttgatcctatccaaagccgcagagaacacggtcatggagacggtagaccaggacatcaccgacacgtgcaaggacctcggcgaggtcaagaaggtgttccagctggcgctcctttgcagcaagaggcagccgtcggatcgaccgaccatgcacgaggtcgcgcgcgtcctggacagcctcgtctgcccagcaggcccgcccccgaagcaggcgcaggcgcaggcacaggcacaggcgtcggagaagccgtccaccacggcgccgagctatgtcagcgagtacgtcggcctacgaggcggcggcggcggcagcgccctctcctgcaccaactcgtcgagcgcgtccgacgccgagctcttcatgaagtttggcgaggtgatctcgcggagcacggaatagtccaatagatcgacgatcattttgtgttacagtttacaataggtgtctggccggcgccctgtgatgtgactcgctgtaaatatgctgctgccttctcgttgggactccactaggcactagtagctatttttctccgttatgcacgtctctctctttttttttgctgggaaactcgaactgtaactaaaggaatggatttatgtgcaggctgcgtttactgacatgttttgtgattcagctgggacggttatgctattgctctgctcgatcggagcacactgttcaaggctggctggagatcatctgggcactgttactgttacgttatccttcctgggcttcctactcctggatcatgccactgctgcgctgcactgtcgcatgtattaccgtaccgacaaccgctgctgtaaaaaaacaaaaaaaaaactctcttgcttctcgggtttccctgttgaatccatggggaccgatggcaaggccgtgcccatgcagcgcatggaggcccgtctcatggagtgtcagggatgagtaca

SEQ ID NO: 51652 - DNA, 3555 bp, Zea Mays
cgaccccgacgcggctccggccatggcccgcctcctccgggccctcgctgccctcctcgtcctcctcctcgcggccgcctccgtcgccgtcgccgacgacggagaaacactgctggagatcaagaaatccttccgcgacggcggcaacgcgctgtacgattggtccggcgacggcgcgtcgccgggctactgctcgtggcgcggcgtgctatgcgacaacgtcaccttcgctgtcgcggcgctcaacctctctgggctcaatctcgagggtgaaatctcagcggccatcgggagtctgcaacgtcttgtctcaatcgatttgaagtcgaatggactctctggacagatccccgatgagattggtgattgttctttgctcgaaactttggatttgtcatctaacaatctagaaggagacataccattctccatgtccaagctgaagcaccttgagaacttgattttgaagaacaacaaactggtgggagtgatcccatcgacactctctcaacttccaaatttgaagatattggacttggctcaaaacaagttaagtggtgaaattccgaatctaatatattggaatgaggttcttcaatacttgggattgcgaagcaatagtttagaaggaagcctctctcccgatatgtgccagttaactgtgatgtgaagaacaatagcttgacgggtgcaataccagaaaccatagggaactgtacgagctttcagagatttgtcaaacaatcatcttactggagaaatcccgttcaatattggtttcctgcaagtggctacgttatctttgcaagggaacaagttctctggtcctataccatcagtgattggccttatgcaggcgcttgcagtgctagatctgagtttcaatgagctatctggcccaataccctctatactgggcaacttgacatacactgagaaattatacctgcaaggcaataggttaactggattgataccgccagagcttggtaatatgtcgacactgcattacctggaactgaacgacaatctgttgactgggttcattcctcctgatcttggaaaacttacagaattgtttgaattgaaccttgcaaacaacaaccttataggacctatccctgagaatttaagttcatgtgcaaatctcattagtttcaatgcttatggcaataaattgaatggaaccattccacgttcatttcacaagcttgagagtctgacttatctgaatctgtcatcaaatcatctcagtggagcacttccaattgaggttgcaagaatgagaaatttggacactctggacttatcctgtaacatgatcactggttcaattccctcggctattgggaaactagagcatcttttgaggctcaacttaagcaaaaataatgtggctggacacattcctgctgaatttgggaacttaaggagcatcatggagattgatttgtcttacaaccacctcagtggcctgattcctcaagaggttgggatgctacaaaatttgatactgttaaaattagaaagcaataatattactggagatgtctcttcacttatttactgcttgagtctcaatatcttaaatgtatcatacaaccatctttatggtactgtacctacagacaacaacttctcacgattttcacccgacagcttcttgggtaaccctggactttgtggctattggcttcactctgcttcatgcacacaattatccaatgcagagcaaatgaagagatcctctagcgcaaaggcctcaatgtttgcagctattggtgttggtgccgtattgcttgttattatgctcgttatcctagtagttatttgctggccacataactctccagtgctcaaagatgtctctgtaaacaaaccagataaccttgcttcagcatcaaacaacattcatcccaagcttgtgatcctccacatgaacatggccctctatgtatatgatgatataatgaggatgactgaaaacttgagcgaaaaatacattattggttatggagcctcaagtacagtctacagatgcgacctgaagaactgcaagccaattgcgattaaaaagctgtatgctcactaccctcagagcttgaaggaattcgagactgaacttgagactgttggaagcatcaaacaccggaatcttgtaagccttcaggggtactccctgtcaccatctgggaatctcctcttctatgattacatggaaaatggcagcctctgggacattttacatgcagcttcatcgaagaaaaagaaactcgattgggaggctcgcctcaagattgctctcggagctgctcaaggcctggcttatcttcaccatgaatgcagtccacgaataatccacagggatgtgaagtcaaagaatatcctcctagacaaagactacgaggctcatcttgctgacttcggtattgccaagagcttgtgtgtgtcgaagacgcacacatcaacgtacgtgatgggcaccattggctacattgaccctgagtatgcacggacatcccggatcaacgagaaatcggatgtgtacagctacggcattgtcttgctggagctgcttaccggcaaaaagcctgtcgacgacgagtgcaaccttcaccacttgatcctatccaaagccgcagagaacacggtcatggagacggtagaccaggacatcaccgacacgtgcaaggacctcggcgaggtcaagaaggtgttccagctggcgctcctttgcagcaagaggcagccgtcggatcgaccgaccatgcacgaggtcgcgcgcgtcctggacagcctcgtctgcccagcaggcccgcccccgaagcaggcgcaggcgcaggcacaggcacaggcgtcggagaagccgtccaccacggcgccgagctatgtcagcgagtacgtcggcctacgaggcggcggcggcggcagcgccctctcctgcaccaactcgtcgagcgcgtccgacgccgagctcttcatgaagtttggcgaggtgatctcgcggagcacggaatagtccaatagatcgacgatcattttgtgttacagtttacaataggtgtctggccggcgccctgtgatgtgactcgctgtaaatatgctgctgccttctcgttgggactccactaggcactagtagctatttttctccgttatgcacgtctctctctttttttttgctgggaaactcgaactgtaactaaaggaatggatttatgtgcaggctgcgtttactgacatgttttgtgattcagctgggacggttatgctattgctctgctcgatcggagcacactgttcaaggctggctggagatcatctgggcactgttactgttacgttatccttcctgggcttcctactcctggatcatgccactgctgcgctgcactgtcgcatgtattaccgtaccgacaaccgctgctgtaaaaaaacaaaaaaaaaactctcttgcttctcgggtttccctgttgaatccatggggaccgatggcaaggccgtgcccatgcagcgcatggaggcccgtctcatggagtgtcagggatgagtaca

SEQ ID NO: 51653 - DNA, 3550 bp, Zea Mays
gcggctccggccatggcccgcctcctccgggccctcgctgccctcctcgtcctcctcctcgcggccgcctccgtcgccgtcgccgacgacggagaaacactgctggagatcaagaaatccttccgcgacggcggcaacgcgctgtacgattggtccggcgacggcgcgtcgccgggctactgctcgtggcgcggcgtgctatgcgacaacgtcaccttcgctgtcgcggcgctcaacctctctgggctcaatctcgagggtgaaatctcagcggccatcgggagtctgcaacgtcttgtctcaatcgatttgaagtcgaatggactctctggacagatccccgatgagattggtgattgttctttgctcgaaactttggatttgtcatctaacaatctagaaggagacataccattctccatgtccaagctgaagcaccttgagaacttgattttgaagaacaacaaactggtgggagtgatcccatcgacactctctcaacttccaaatttgaagatattggacttggctcaaaacaagttaagtggtgaaattccgaatctaatatattggaatgaggttcttcaatacttgggattgcgaagcaatagtttagaaggaagcctctctcccgatatgtgccagttaactgtgatgtgaagaacaatagcttgacgggtgcaataccagaaaccatagggaactgtacgagctttcaggtcttagatttgtcaaacaatcatcttactggagaaatcccgttcaatattggtttcctgcaagtggctacgttatctttgcaagggaacaagttctctggtcctataccatcagtgattggccttatgcaggcgcttgcagtgctagatctgagtttcaatgagctatctggcccaataccctctatactgggcaacttgacatacactgagaaattatacctgcaaggcaataggttaactggattgataccgccagagcttggtaatatgtcgacactgcattacctggaactgaacgacaatctgttgactgggttcattcctcctgatcttggaaaacttacagaattgtttgaattgaaccttgcaaacaacaaccttataggacctatccctgagaatttaagttcatgtgcaaatctcattagtttcaatgcttatggcaataaattgaatggaaccattccacgttcatttcacaagcttgagagtctgacttatctgaatctgtcatcaaatcatctcagtggagcacttccaattgaggttgcaagaatgagaaatttggacactctggacttatcctgtaacatgatcactggttcaattccctcggctattgggaaactagagcatcttttgaggctcaacttaagcaaaaataatgtggctggacacattcctgctgaatttgggaacttaaggagcatcatggagattgatttgtcttacaaccacctcagtggcctgattcctcaagaggttgggatgctacaaaatttgatactgttaaaattagaaagcaataatattactggagatgtctcttcacttatttactgcttgagtctcaatatcttaaatgtatcatacaaccatctttatggtactgtacctacagacaacaacttctcacgattttcacccgacagcttcttgggtaaccctggactttgtggctattggcttcactctgcttcatgcacacaattatccaatgcagagcaaatgaagagatcctctagcgcaaaggcctcaatgtttgcagctattggtgttggtgccgtattgcttgttattatgctcgttatcctagtagttatttgctggccacataactctccagtgctcaaagatgtctctgtaaacaaaccagataaccttgcttcagcatcaaacaacattcatcccaagcttgtgatcctccacatgaacatggccctctatgtatatgatgatataatgaggatgactgaaaacttgagcgaaaaatacattattggttatggagcctcaagtacagtctacagatgcgacctgaagaactgcaagccaattgcgattaaaaagctgtatgctcactaccctcagagcttgaaggaattcgagactgaacttgagactgttggaagcatcaaacaccggaatcttgtaagccttcaggggtactccctgtcaccatctgggaatctcctcttctatgattacatggaaaatggcagcctctgggacattttacatgcagcttcatcgaagaaaaagaaactcgattgggaggctcgcctcaagattgctctcggagctgctcaaggcctggcttatcttcaccatgaatgcagtccacgaataatccacagggatgtgaagtcaaagaatatcctcctagacaaagactacgaggctcatcttgctgacttcggtattgccaagagcttgtgtgtgtcgaagacgcacacatcaacgtacgtgatgggcaccattggctacattgaccctgagtatgcacggacatcccggatcaacgagaaatcggatgtgtacagctacggcattgtcttgctggagctgcttaccggcaaaaagcctgtcgacgacgagtgcaaccttcaccacttgatcctatccaaagccgcagagaacacggtcatggagacggtagaccaggacatcaccgacacgtgcaaggacctcggcgaggtcaagaaggtgttccagctggcgctcctttgcagcaagaggcagccgtcggatcgaccgaccatgcacgaggtcgcgcgcgtcctggacagcctcgtctgcccagcaggcccgcccccgaagcaggcgcaggcgcaggcacaggcacaggcgtcggagaagccgtccaccacggcgccgagctatgtcagcgagtacgtcggcctacgaggcggcggcggcggcagcgccctctcctgcaccaactcgtcgagcgcgtccgacgccgagctcttcatgaagtttggcgaggtgatctcgcggagcacggaatagtccaatagatcgacgatcattttgtgttacagtttacaataggtgtctggccggcgccctgtgatgtgactcgctgtaaatatgctgctgccttctcgttgggactccactaggcactagtagctatttttctccgttatgcacgtctctctctttttttttgctgggaaactcgaactgtaactaaaggaatggatttatgtgcaggctgcgtttactgacatgttttgtgattcagctgggacggttatgctattgctctgctcgatcggagcacactgttcaaggctggctggagatcatctgggcactgttactgttacgttatccttcctgggcttcctactcctggatcatgccactgctgcgctgcactgtcgcatgtattaccgtaccgacaaccgctgctgtaaaaaaacaaaaaaaaaactctcttgcttctcgggtttccctgttgaatccatggggaccgatggcaaggccgtgcccatgcagcgcatggaggcccgtctcatggagtgtcagggatgagtaca

SEQ ID NO: 51654 - DNA, 3710 bp, Zea Mays
catctggtgttcatgcgctttgcattgtgtaaaaatgcgtttttactgccatttcgtgtgcttggacgctcttctctttctgttctggccgtaaaacctggtgtttgttttctttgtatgttaatttgttattccgcttacattcattttttccttgcgtaacgaactccgttattttttccgtaactttcttatcgattcttcttcttctgtggtgctgccactgcttttactaatccaggagaaacactgctggagatcaagaaatccttccgcgacggcggcaacgcgctgtacgattggtccggcgacggcgcgtcgccgggctactgctcgtggcgcggcgtgctatgcgacaacgtcaccttcgctgtcgcggcgctcaacctctctgggctcaatctcgagggtgaaatctcagcggccatcgggagtctgcaacgtcttgtctcaatcgatttgaagtcgaatggactctctggacagatccccgatgagattggtgattgttctttgctcgaaactttggatttgtcatctaacaatctagaaggagacataccattctccatgtccaagctgaagcaccttgagaacttgattttgaagaacaacaaactggtgggagtgatcccatcgacactctctcaacttccaaatttgaagatattggacttggctcaaaacaagttaagtggtgaaattccgaatctaatatattggaatgaggttcttcaatacttgggattgcgaagcaatagtttagaaggaagcctctctcccgatatgtgccagttaactggtctgtggtactttgatgtgaagaacaatagcttgacgggtgcaataccagaaaccatagggaactgtacgagctttcaggtcttagatttgtcaaacaatcatcttactggagaaatcccgttcaatattggtttcctgcaagtggctacgttatctttgcaagggaacaagttctctggtcctataccatcagtgattggccttatgcaggcgcttgcagtgctagatctgagtttcaatgagctatctggcccaataccctctatactgggcaacttgacatacactgagaaattatacctgcaaggcaataggttaactggattgataccgccagagcttggtaatatgtcgacactgcattacctggaactgaacgacaatctgttgactgggttcattcctcctgatcttggaaaacttacagaattgtttgaattgaaccttgcaaacaacaaccttataggacctatccctgagaatttaagttcatgtgcaaatctcattagtttcaatgcttatggcaataaattgaatggaaccattccacgttcatttcacaagcttgagagtctgacttatctgaatctgtcatcaaatcatctcagtggagcacttccaattgaggttgcaagaatgagaaatttggacactctggacttatcctgtaacatgatcactggttcaattccctcggctattgggaaactagagcatcttttgaggctcaacttaagcaaaaataatgtggctggacacattcctgctgaatttgggaacttaaggagcatcatggagattgatttgtcttacaaccacctcagtggcctgattcctcaagaggttgggatgctacaaaatttgatactgttaaaattagaaagcaataatattactggagatgtctcttcacttatttactgcttgagtctcaatatcttaaatgtatcatacaaccatctttatggtactgtacctacagacaacaacttctcacgattttcacccgacagcttcttgggtaaccctggactttgtggctattggcttcactctgcttcatgcacacaattatccaatgcagagcaaatgaagagatcctctagcgcaaaggcctcaatgtttgcagctattggtgttggtgccgtattgcttgttattatgctcgttatcctagtagttatttgctggccacataactctccagtgctcaaagatgtctctgtaaacaaaccagataaccttgcttcagcatcaaacaacattcatcccaagcttgtgatcctccacatgaacatggccctctatgtatatgatgatataatgaggatgactgaaaacttgagcgaaaaatacattattggttatggagcctcaagtacagtctacagatgcgacctgaagaactgcaagccaattgcgattaaaaagctgtatgctcactaccctcagagcttgaaggaattcgagactgaacttgagactgttggaagcatcaaacaccggaatcttgtaagccttcaggggtactccctgtcaccatctgggaatctcctcttctatgattacatggaaaatggcagcctctgggacattttacatgcttcatcgaagaaaaagaaactcgattgggaggctcgcctcaagattgctctcggagctgctcaaggcctggcttatcttcaccatgaatgcagtccacgaataatccacagggatgtgaagtcaaagaatatcctcctagacaaagactacgaggctcatcttgctgacttcggtattgccaagagcttgtgtgtgtcgaagacgcacacatcaacgtacgtgatgggcaccattggctacattgaccctgagtatgcacggacatcccggatcaacgagaaatcggatgtgtacagctacggcattgtcttgctggagctgcttaccggcaaaaagcctgtcgacgacgagtgcaaccttcaccacttgatcctatccaaagccgcagagaacacggtcatggagacggtagaccaggacatcaccgacacgtgcaaggacctcggcgaggtcaagaaggtgttccagctggcgctcctttgcagcaagaggcagccgtcggatcgaccgaccatgcacgaggtcgcgcgcgtcctggacagcctcgtctgcccagcaggcccgcccccgaagcaggcgcaggcgcaggcacaggcacaggcgtcggagaagccgtccaccacggcgccgagctatgtcagcgagtacgtcggcctacgaggcggcggcggcggcagcgccctctcctgcaccaactcgtcgagcgcgtccgacgccgagctcttcatgaagtttggcgaggtgatctcgcggagcacggaatagtccaatagatcgacgatcattttgtgttacagtttacaataggtgtctggccggcgccctgtgatgtgactcgctgtaaatatgctgctgccttctcgttgggactccactaggcactagtagctatttttctccgttatgcacgtctctctctttttttttgctgggaaactcgaactgtaactaaaggaatggatttatgtgcaggctgcgtttactgacatgttttgtgattcagctgggacggttatgctattgctctgctcgatcggagcacactgttcaaggctggctggagatcatctgggcactgttactgttacgttatccttcctgggcttcctactcctggatcatgccactgctgcgctgcactgtcgcatgtattaccgtaccgacaaccgctgctgtaaaaaaacaaaaaaaaaactctcttgcttctcgggtttccctgttgaatccatggggaccgatggcaaggccgtgcccatgcagcgcatggaggcccgtctcatggagtgtcagggatgagtaca

SEQ ID NO: 51655 - DNA, 1735 bp, Zea Mays
aacgatttgcactggcggttttattacgtcgaccgccagtgaaaatcgattttcactggcggttttattacgccgaccgccagtgaaaatcgatttttaaaatctgagcgccttgaatttacgcattctatttcaagaacttctagaatttgttaggctgtttggtgtaagtggatggtggaaatctgctactgacgttgtaccatttcagatcatgataattgactacaaattaacttacccaagtggtactgcaacatctgttcttataaatggattccacacaactcatggagatgcaacggcaaagtatgtcgttctctcgcataactcaacctgcagattcagataaaatttcaatctattgaatagtttttgtgtatgttcaaaataggcagcaagtgaatgggttcacaaaatactttgcaatcagcttcttttggagcttcttccagtggttttactcaggtggagacaactgtgggttttcacagttttccacttttggacttagagcttggaaacaaacgtaacacaagtcttttggttcattagtggtttaaattagtctgtactatgttagatggttctatgaaatcgctatccctgttaggtcttcattgctttttaaccttccatgtgactgccttcaaaggagatgctgccatggtctcactgctgcatgttttatgacatatgtttttatgagttattatattacttaacatggagaagaaagctattttaactacctattccagtgcgtgcatctgtaatcatctgtgacatctgcttatttttagcgtaattatgattgatttccacgagaagtgcaatcatgatggaattaaagtgcttatctttgataatatttgctatattctttatgtataagtataacatactatagtagttagtctgtggaattcggaaagaaaacacgattacttgaaatatgtgttatagatttgctccatggagtagaggttgcagtcagtagtaaccgagacaaaaaaatcaccaatgagctagaccagtgggaatatggggaagatactatattctggtttctatattttcattccaaatgttttgattcaacatatgacaatatatttgagaatctaaatctgttggcaaccattcccttgtgcaaattattgggtttgatggtatgtcaattattctggaatgctttatattagtatttgtgaatttctgctaatatatcagctaggtttacccctcctgctcctgcgtcagtctcagttcctagctctgcatctcaaggcaacaacattttcaagaccaggattgaaggtgcaaacaacgttgatgcagatgctggcgctgcaacagcccaagcggacaaaaagaaatcttcaacagcaagaacgaaacatacggtggttgttccaaagtctaggtcttagtttccttaatcaaagaaatgagcatgtttttgttgtccataggacaagtgttaatttctctttatcattgggcctttgtttttggcaacgcgagcaaaatggactggctccccaccggcaagcatcctctttgccccttttgtaatgatgacactaaacatgtcctatatccttgtgattgttggatttgcagtgtaatgtggcaacatattttttgtgtagatggggaaaattctcattgatacccaaccagtctattttgtgattgtgtatattctcgactttgaatcgcactaaattat

SEQ ID NO: 51656 - DNA, 776 bp, Zea Mays
tttgcactggcggttttattacgtcgaccgccagtgaaaatcgattttcactggcggttttattacgccgaccgccagtgaaaatcgatttttaaaatctgagcgccttgaatttacgcattctatttcaagaacttctagaatttgttaggctgtttggtgtaagtggatggtggaaatctgctactgacgttgtaccatttcagatcatgataattgactacaaattaacttacccaagtggtactgcaacatctgttcttataaatggattccacacaactcatggagatgcaacggcaaatctcagttcctagctctgcatctcaaggcaacaacattttcaagaccaggattgaaggtgcaaacaacgttgatgcagatgctggcgctgcaacagcccaagcggacaaaaagaaatcttcaacagcaagaacgaaacatacggtggttgttccaaagtctaggtcttagtttccttaatcaaagaaatgagcatgtttttgttgtccataggacaagtgttaatttctctttatcattgggcctttgtttttggcaacgcgagcaaaatggactggctccccaccggcaagcatcctctttgccccttttgtaatgatgacactaaacatgtcctatatccttgtgattgttggatttgcagtgtaatgtggcaacatattttttgtgtagatggggaaaattctcattgatacccaaccagtctattttgtgattgtgtatattctcgactttgaatcgcactaaattat

SEQ ID NO: 51657 - DNA, 806 bp, Zea Mays
tttgcactggcggttttattacgtcgaccgccagtgaaaatcgattttcactggcggttttattacgccgaccgccagtgaaaatcgatttttaaaatctgagcgccttgaatttacgcattctatttcaagaacttctagaatttgttaggctgtttggtgtaagtggatggtggaaatctgctactgacgttgtaccatttcagatcatgataattgactacaaattaacttacccaagtggtactgcaacatctgttcttataaatggattccacacaactcatggagatgcaacggcaaactaggtttacccctcctgctcctgcgtcagtctcagttcctagctctgcatctcaaggcaacaacattttcaagaccaggattgaaggtgcaaacaacgttgatgcagatgctggcgctgcaacagcccaagcggacaaaaagaaatcttcaacagcaagaacgaaacatacggtggttgttccaaagtctaggtcttagtttccttaatcaaagaaatgagcatgtttttgttgtccataggacaagtgttaatttctctttatcattgggcctttgtttttggcaacgcgagcaaaatggactggctccccaccggcaagcatcctctttgccccttttgtaatgatgacactaaacatgtcctatatccttgtgattgttggatttgcagtgtaatgtggcaacatattttttgtgtagatggggaaaattctcattgatacccaaccagtctattttgtgattgtgtatattctcgactttgaatcgcactaaattat

SEQ ID NO: 51658 - DNA, 1723 bp, Zea Mays
gttttattacgtcgaccgccagtgaaaatcgattttcactggcggttttattacgccgaccgccagtgaaaatcgatttttaaaatctgagcgccttgaatttacgcattctatttcaagaacttctagaatttgttaggctgtttggtgtaagtggatggtggaaatctgctactgacgttgtaccatttcagatcatgataattgactacaaattaacttacccaagtggtactgcaacatctgttcttataaatggattccacacaactcatggagatgcaacggcaaagtatgtcgttctctcgcataactcaacctgcagattcagataaaatttcaatctattgaatagtttttgtgtatgttcaaaataggcagcaagtgaatgggttcacaaaatactttgcaatcagcttcttttggagcttcttccagtggttttactcaggtggagacaactgtgggttttcacagttttccacttttggacttagagcttggaaacaaacgtaacacaagtcttttggttcattagtggtttaaattagtctgtactatgttagatggttctatgaaatcgctatccctgttaggtcttcattgctttttaaccttccatgtgactgccttcaaaggagatgctgccatggtctcactgctgcatgttttatgacatatgtttttatgagttattatattacttaacatggagaagaaagctattttaactacctattccagtgcgtgcatctgtaatcatctgtgacatctgcttatttttagcgtaattatgattgatttccacgagaagtgcaatcatgatggaattaaagtgcttatctttgataatatttgctatattctttatgtataagtataacatactatagtagttagtctgtggaattcggaaagaaaacacgattacttgaaatatgtgttatagatttgctccatggagtagaggttgcagtcagtagtaaccgagacaaaaaaatcaccaatgagctagaccagtgggaatatggggaagatactatattctggtttctatattttcattccaaatgttttgattcaacatatgacaatatatttgagaatctaaatctgttggcaaccattcccttgtgcaaattattgggtttgatggtatgtcaattattctggaatgctttatattagtatttgtgaatttctgctaatatatcagctaggtttacccctcctgctcctgcgtcagtctcagttcctagctctgcatctcaaggcaacaacattttcaagaccaggattgaaggtgcaaacaacgttgatgcagtgcagatgctggcgctgcaacagcccaagcggacaaaaagaaatcttcaacagcaagaacgaaacatacggtggttgttccaaagtctaggtcttagtttccttaatcaaagaaatgagcatgtttttgttgtccataggacaagtgttaatttctctttatcattgggcctttgtttttggcaacgcgagcaaaatggactggctccccaccggcaagcatcctctttgccccttttgtaatgatgacactaaacatgtcctatatccttgtgattgttggatttgcagtgtaatgtggcaacatattttttgtgtagatggggaaaattctcattgatacccaaccagtctattttgtgattgtgtatattctcgactttgaatcgcactaaattat

SEQ ID NO: 51659 - DNA, 733 bp, Zea Mays
tgaaaatcgatttttaaaatctgagcgccttgaatttacgcattctatttcaagaacttctagaatttgttaggctgtttggtgtaagtggatggtggaaatctgctactgacgttgtaccatttcagatcatgataattgactacaaattaacttacccaagtggtactgcaacatctgttcttataaatggattccacacaactcatggagatgcaacggcaaactaggtttacccctcctgctcctgcgtcagtctcagttcctagctctgcatctcaaggcaacaacattttcaagaccaggattgaaggtgcaaacaacgttgatgcagtgcagatgctggcgctgcaacagcccaagcggacaaaaagaaatcttcaacagcaagaacgaaacatacggtggttgttccaaagtctaggtcttagtttccttaatcaaagaaatgagcatgtttttgttgtccataggacaagtgttaatttctctttatcattgggcctttgtttttggcaacgcgagcaaaatggactggctccccaccggcaagcatcctctttgccccttttgtaatgatgacactaaacatgtcctatatccttgtgattgttggatttgcagtgtaatgtggcaacatattttttgtgtagatggggaaaattctcattgatacccaaccagtctattttgtgattgtgtatattctcgactttgaatcgcactaaattat

SEQ ID NO: 51660 - DNA, 226 bp, Zea Mays
agccaaccgcagataagctttatgaccagccattgttaggatttgtgcggactaaaaacacaatccctgaaaaggagcaaggacaaccggctggaaacaacatagttgaagttgaagaagacgagagcgaatcttgctcgagttctgatgaagatgattcgtggcacgaggatgatcctaagctaggtttacccctcctgctcctgcgtcagtctcagttcctagc

SEQ ID NO: 51661 - DNA, 324 bp, Zea Mays
agccaaccgcagataagctttatgaccagccattgttaggatttgtgcggactaaaaacacaatccctgaaaaggagcaaggacaaccggctggaaacaacatagttgaagttgaagaagacgagagcgaatcttgctcgagttctgatgaagatgattcgtggcacgaggatgatcctaagatcatgataattgactacaaattaacttacccaagtggtactgcaacatctgttcttataaatggattccacacaactcatggagatgcaacggcaaactaggtttacccctcctgctcctgcgtcagtctcagttcctagc

SEQ ID NO: 51662 - DNA, 480 bp, Zea Mays
gattcgtggcacgaggatgatcctaaggaaaacaagaagaaagtgaaggaagagaagagggaggcccgcaagaccaagatcccaaaagctgagaagaagaagaggaagaaaatggcgaaggcaaaatgcaagcggtagcgaatatctatgaacaatccagtagttaactccgtcagtagagatggataacttcgtcgtgaatcaaacaagatgatggataacttcattgtgaatcaaacaagatagcctttatgagggagtgcaggttggaagtttggttcacagcgctactttacacatcacaagattattcacgatgttttcaacctttttgttcgtttcaattttgtagagaactactgtacgtaatgtgaccacatatatgtttatcttgagtggaaccgtatagtattttttagagaagagtacaaatggtactttgtgccgctggattctttgacctagtgcaacttaattagg

SEQ ID NO: 51663 - DNA, 2246 bp, Zea Mays
acacacacactcccattcgctcccatccgccaggacactcttctccccggcgcagtcaggacactcttctccccggcgcagtcaggacactcttcttctcaccgccgcgagcactgctctgggcgcgcgccgcctaccctcccctcttccctccctcacctctcgtcctcgaagcaagggtttccctgccccaggctgcctctcgtccgttctccttctctaccgccgccacaactcgcccgccgccccgccctcaccgccggcaacgtgacacgacaagcccacccctttattcctgcagctatactccgatggccctcgtgaagtccgacgctgaggaggagtggtccgactctgacttcgatgatgcctccgactccgaggtcgccgaagctctggactggctcgacgccgtggagggccctgacggctcagctcgcccccacgtcgccttctcggcctccggaggcggggctgcggcgcggaggcctaacgcacacggcggcgtgctgtctcgcccgctccagccgctgtctaaccggacccagaagctggcctcgcacattagtgctactcccttggaggagtgggaaggtaggatgaacgttgcgatgtcaaattccgtcacaactgcaatcagggatagcataagggacacagctattgggaaaataaggaacactgagaaggctgatcgtgctacagtggaacaggctattgacccaagaacacgcatggttttattcaagatgttaaaccgtggtgtctttaataacataaatggctgcatttctacagggaaagaggcaaatgtctatcatgcaacaaagacggatggccaggagcttgcaattaaagtctacaaaacctctgtccttgtttttaaagaccgatatgtccaaggagattatcgttttagacatggttactgcaagcataatcctcggaaaatggttaagacctgggctgaaaaggaaatgagaaatcttctacgagtgagggcagctggaatccgatgccctgcaccattactcctaaggcttcatgtactggtgatggaattcatagggaaaggaggctgggctgctcctcgtctcaaggacgctgctttgtcagatgacaagttgcatgaaagttactttgagataattacaacaatgcggactctttaccaaacgtgcaaactggtccatggtgatttgagtgaatacaatattctatattttgagggtcacttgtatattattgatgtttcacaatccgtcgatcttgatcacccttcagctttggattttctgaaggaagattgcttgcatgtttctgacttctttaaaaaacgtggtgttcctgtcatgacagtaacggatttgtttaattttgttattgatcaaagcatttctgatgaagatgttgatgattacctggaaaaggctcagcaaaagattttggaaaatggtggtgcggttccaaatgatgatgaaattactcctacagtcatggtgcagacgttggactacgtgaagcaatgtgaggcagatattgtcaacatgtcaataatgcaacgttcatcctctggctatgagccaaccgcagataagctttatgaccaaccattgttagggtttgtgcggactaaaaacacaaacactgaaaaggagcaaggacaaccggcacgaaacttagttgaggttgaagaagacgagagcgaatcttgcttgagttctgatgaagatgattcgtggcacgaggatgatcctaaggtgggacccgaggaaaggaaggctgctcggaaggaaaacaagaagaaagtgaaggaagagaagagggaggcccgcaagaccaagatcccaaaagctgagaagaagaagaggaagaaaatggcgaaggcaaaatgcaagcggtagcgaatatctatgaacaatccagtagttaactccgtcagtagagatggataacttcgtcgtgaatcaaacaagatgatggataacttcattgtgaatcaaacaagatagcctttatgagggagtgcaggttggaagtttggttcacagcgctactttacacatcacaagattattcacgatgttttcaacctttttgttcgtttcaattttgtagagaactactgtacgtaatgtgaccacatatatgtttatcttgagtggaaccgtatagtattttttagagaagagtacaaatggtactttgtgccgctggattctttgacctagtgcaacttaattagg

SEQ ID NO: 51664 - DNA, 2219 bp, Zea Mays
acacacacactcccattcgctcccatccgccaggacactcttctccccggcgcagtcaggacactcttctccccggcgcagtcaggacactcttcttctcaccgccgcgagcactgctctgggcgcgcgccgcctaccctcccctcttccctccctcacctctcgtcctcgaagcaagggtttccctgccccaggctgcctctcgtccgttctccttctctaccgccgccacaactcgcccgccgccccgccctcaccgccggcaacgtgacacgacaagcccacccctttattcctgcagctatactccgatggccctcgtgaagtccgacgctgaggaggagtggtccgactctgacttcgatgatgcctccgactccgaggtcgccgaagctctggactggctcgacgccgtggagggccctgacggctcagctcgcccccacgtcgccttctcggcctccggaggcggggctgcggcgcggaggcctaacgcacacggcggcgtgctgtctcgcccgctccagccgctgtctaaccggacccagaagctggcctcgcacattagtgctactcccttggaggagtgggaaggtaggatgaacgttgcgatgtcaaattccgtcacaactgcaatcagggatagcataagggacacagctattgggaaaataaggaacactgagaaggctgatcgtgctacagtggaacaggctattgacccaagaacacgcatggttttattcaagatgttaaaccgtggtgtctttaataacataaatggctgcatttctacagggaaagaggcaaatgtctatcatgcaacaaagacggatggccaggagcttgcaattaaagtctacaaaacctctgtccttgtttttaaggatagagaccgatatgtccaaggagattatcgttttagacatggttactgcaagcataatcctcggaaaatggttaagacctgggctgaaaaggaaatgagaaatcttctacgagtgagggcagctggaatccgatgccctgcaccattactcctaaggcttcatgtactggtgatggaattcatagggaaaggaggctgggctgctcctcgtctcaaggacgctgctttgtcagatgacaagttgcatgaaagttactttgagataattacaacaatgcggactctttaccaaacgtgcaaactggtccatggtgatttgagtgaatacaatattctatattttgagggtcacttgtatattattgatgtttcacaatccgtcgatcttgatcacccttcagctttggattttctgaaggaagattgcttgcatgtttctgacttctttaaaaaacgtggtgttcctgtcatgacagtaacggatttgtttaattttgttattgatcaaagcatttctgatgaagatgttgatgattacctggaaaaggctcagcaaaagattttggaaaatggtggtgcggttccaaatgatgatgaaattactcctacagtcatggtgcagacgttggactacgtgaagcaatgtgaggcagatattgtcaacatgtcaataatgcaacgttcatcctctggctatgagccaaccgcagataagctttatgaccaaccattgttagggtttgtgcggactaaaaacacaaacactgaaaaggagcaaggacaaccggcacgaaacttagttgaggttgaagaagacgagagcgaatcttgcttgagttctgatgaagatgattcgtggcacgaggatgatcctaaggaaaacaagaagaaagtgaaggaagagaagagggaggcccgcaagaccaagatcccaaaagctgagaagaagaagaggaagaaaatggcgaaggcaaaatgcaagcggtagcgaatatctatgaacaatccagtagttaactccgtcagtagagatggataacttcgtcgtgaatcaaacaagatgatggataacttcattgtgaatcaaacaagatagcctttatgagggagtgcaggttggaagtttggttcacagcgctactttacacatcacaagattattcacgatgttttcaacctttttgttcgtttcaattttgtagagaactactgtacgtaatgtgaccacatatatgtttatcttgagtggaaccgtatagtattttttagagaagagtacaaatggtactttgtgccgctggattctttgacctagtgcaacttaattagg

SEQ ID NO: 51665 - DNA, 6236 bp, Zea Mays
ccggccccactccgcagcctctctgctgctggtgggccagcgttacggcgcgcaaacctccgcctctcccctcccctgtcccctccaatcctccattctccggccaccctcgcttctccgtccctcggcaatccgcttgtcccccgttgcccgctccgttcagaagcgcctcgccgctgaccggtcgtgacccgcctcgcacctccgccttctccgtccctcgcggccgcggctgccgccgaatggaagccgcctcatgctgccgcgtcttctccacgcagcggtgccgcttcccgctccgcaggctgtcggcgccgccgtggccgcagccgttctgcaccgagtccagcggcggcctcgtcaccccgtcggcctccaagcggaggtccaggggccccgtcatggccgcgaagaaggccgcggagggcgaaaaacaagaagatggaaaatacaagcacactgtggatctcccgaaaacaacatttgggctgagagcgaattctgtacagcgggagccagagctccaaaaattatgggacgataatcaggttctgaaaagggtttctgaaaggaacactgggactgcttttgttctccacgatggccctccctatgctaatggtgatcttcacatgggccatgcgctcaataaaatcctcaaggattttataaatcgctacaagctgcttcagaatcataaagtgtcctttgttcctggttgggattgccacggccttccaatagaactaaaagttttgaagtcaatggataaggaaactttgagtgctcttacacccataaaattaagacaaaaagctgcaaaatttgctaaagcaacagtcgatgcacaaatgaaatctttcaagcggtatggtgtatgggccgattgggacaacccttacctaactctgtcaccggaatacgaagctgctcagttggaagtgtttgggcaaatggttatgaaaggatatatctatagaggacgaaagcctgtccattggagtccatcatcacgtacggctttggcagaagctgaactggagtattccgaaaatcacatttccagaagcatatatgccgcattcaagattactaatccatctaaatctgggatgctagacgatttttttccaaatgtatctttggtcatatggaccaccactccatggacaattccggctaatgctgctgttgctgtgaacccaaagcttatttatgcagtagctgaggtacagtctgtatttgaaagtgagtcaacatccggtggtaaacaaagaaaagttggaaatatattgagttctgagaaaggaaaactgttcgttattgtggcttctgatcttatcacaactcttgagtccaaatggggtgtgaagcttgtagtacacaaatcatttcccggatctgccttggagcactgcaggtatgcccatcctgtgaatagcaacgaatgttccgtcattctaggaggagattacattacaactgaatcgggcactggccttgttcatactgcccctggccatggccaggaagactacataacaggtttgaagtatgggcttcctatcatttctcctgtggacgatgaagggaacttcacggctgaagctggacagttcggtggtttgtctgtcctgggggctggcaatgctgcagttgtgaagtatctggatgaacagtattcactcattttagaggaaccatacaaacacaagtacccctatgactggagatctaaagaaccaactatattccgagcaactgagcagtggtttgcatctgtggatggttttcgtgatgctgcaatggatgcaatcagacgagtaacttgggttccttctcaggcacaaaacaggattgttgccatgacctctagccgttctgattggtgtatttcacggcagagaacttggggtgtccctattccagttttttaccatgtggactcacaggaacctcttataactgaagaaacgattgaacacatcaaggctattgtgttgaagaaaggtagcgatgcatggtggtatatgacaactgaggaacttcttccagatagatatcgggacaaagcatctgaatatcgcaagggaactgatacaatggatgtttggtttgactctggctcttcatgggcagctgttttagcaaaaagggacggtcttaattttcctgcggatatttatcttgaaggttcagatcaacatcgtggatggttccagagctcattgttgactagcattgctacaacagggaaggctccctactccagtgttattacacatggatttgtactggatgaaaagggtttcaaaatgagtaaatcaattggtaatgtagtggacccagagaaaatcattgttggtggcaaaaaccatagggaagaacctggctatggagcagatgttctccgtctatgggtttctagtgttgattacactacagatgtgttgattggcccacaaatcttgcgccagatgtctgacatgtatagaaaactacgaggcacgatgcgatttcttttgtcgaatctccatgattggaagccggataattctgtgccgtacaatgatctgccaaaaatcgacaagtatgcacttttccatttggagactgtcatgacttccatgaaggatagttatgaaagttatcaattctataaagtataccagatccttcaaagatttgctactgttggtttgtccaatttctatttggatgttgcaaaggatcgcctttatgttggaggccgagtcagcttcacaaggaaaagttgtcagactgtgctcatggcacatctgctctaccttgttagggccatttccccgattatgcctcacctagctgaggatgtctggcagaacctaccctttcaatacaccttgcaggatggatcccttgcaaactttgtttttgatctgaaatggccagaaaagaatgaagaatggctctcggccccgaaggatgatgttgatttcctgggtgttatcctggagttgaggtcagaggtcaacaaaattttggagaatgctcgcactggaaagttgattggttctagcttagatgcaaaggtttatctccataccgaaagttcagatacggtattaaagctaaaggagctatcttctgcatccaatgatgcagacgctctgcatcgcctgtttatcacatctcaggtcgatattcttccaatcctaaatgaagagattacatcatctgtaccatacacaggaaagttcagtaacccacgcactggagtcatatggattggtgtgactcgtgcggatggtgcaaaatgtgagaggtgttggaattacacacaggacgttggatctttccatgaccatcctactctctgcgttcggtgctatggtgtcattgagttgcagacacaacctgcggccgcagctgtcagttgaaaggagtgatgttaacgtatcctatcgaaccatctaattttgaggatcattggtggaattcattcttttggagagctttcacgctaccatgtggcggtagcctgggactccagcttgaatcaagttttgcatgcagcaagctgtactttagattcttcatacataggtcacgagagttgtttggagcttgggtcatcgcttactttcccatactactggggggcttatttggaacagttttttacacaaaactcctgacctgtaaatcaattttggaaaaccgtatccggtggtcgatccatgtattaatagagtaataatgttactatgttcatccaaatctcaaagacgtgatggttgtgttgaaaaaacagcttgaatcacttgcttatgctcaactgttttttcttcatgtacatgtgacggaagtttactgctgattgtttattacatccagttatcataatcaaatgtccaacgaggtggccccacctgcagagtccccatcaaaccttacgaggtgggccatccctgactagttaaccacgggatgttacgaggcaggaggtggcaccgcaccgcattccacttccaccgcgccgcgtcatcttcttccttcagcgttgagcggaatcgcgaattgaaaacggaagttaccaattcacccgactcgatagacacaccggctctgctctaagcgagaatccgaggagcgctgccaagcgcctccgcgacgggatcgacgcgacttgattcgcgagtttcaacgtcgcgaggagagcagaaaattacgcaggcagagcggctgccggctgggtgttgaagctagagcggctaggagcaggttcggagcgctaccaaacaggcccttaacctaagcgctcctgcccttcggatccggaagttggaggcgcgcgaggaggcgaggcttgcaaggtctcccttgctagacggcaacggggtgacgatggcgcacgagcggggcgccgccgcatccgcccacccagcggctccaacctccgaggaagacgcgctgtttattgatttattacatgaagcgcccctgtctggtcaccgggagcctagaagcatagttggtgggaccttgtactgtatcttattggtaggttttgctgctgttgccatttcagctccatggatatttcttttcgcgccagatatgatctctccattgctatgtagctccaatgctatcctcctcgttcttacaggcatttttcaacaatattgggttcaccaggtcaggaaagtgagattgcagggctattacgattttagccagaaactgaagcgtattgctcgacttccatttgctactattgcttgtgggactgctttgatgctcttaatcatggtctggcaacctcttttacaaatactatcagtttcactgcttctcaggattgccattgtagttgaagtcacgtgtgctggatgttttatgggcttatatttatggcacatccacaaatacaactctttgaatgggcagcctgatattttgcggtcattatattctgcactccaaccatctaatactttggaagatcgaagatatcatgatgcccgtctttctgatcagcagatggcgttacttcagtaccaaagagagaatatccattatctgagtgaggaggttctccgcttgcaagaatgcttaagcaaataccagagaactgctggaaccactcctcaggttgatcttgcccatcttttagcaactcgtgatcaagaactccgagcactcactgctgagatgaatcaagtgcactccgaacttcaacatgcccgtggtttgatcgatgaaaaggattcagagctccagcgtatccgtctgagcaacaaccagtatgttgaagaaaacgataggctcagagctattctcggtgagtggagtgctcgagccgcaaagcttgaacgtgcattggaggcagagcgggtgtcaaacgtcgaattgaggaaaaatattgcaaagtttagaggtcatttgtacaaagagcaggaggcctgacttcggtatgttatagctggttccagaattttacctaagacacctgactaaaggcacaatttttgatatagaagggtatctcggtctggatccattcgaactgagattggcacgtgattgttcgatgacgcatggaatatgcgtctagtggtttgtagaatgcgtagtttgatgtacatgtgttcgtaggtttgagcatgtagagtatggtatccctcgggaaaaaaaaggagtatggtattcatgtggttgaagactgctgagtattgtgaacatggtagtgtcttgtggggtgtggttcgcaggagacaagaggaggaggttgcagcactggtcgttcttgtaggtgtgcggcagataggattatgcgtactaactgaagaggcagctaggcaagaatcttaacacaaacaagaagaacaggatcgcccctccgactctaatcaatagagttcattacagataagcgacgcagtgcgatgaaatgtaccacctacattcacagacccagttgggcgtaccgttgaagcctcatgggccactcgcgcctgaacccagttgccactatagttttcttcttcggatttgtttgttttttcattctattttctattctattctgtgtgactttcttttctttgttgtttagggctcatttgataataattcagattggttcatatcaatgttctctaaaaaaacgttccagatgacgaatcggaattgcttaaccatttgactgtagaattagaatcacttggacccgtttctagcagaaatgtttc

SEQ ID NO: 51666 - DNA, 6239 bp, Zea Mays
ggccccactccgcagcctctctgctgctggtgggccagcgttacggcgcgcaaacctccgcctctcccctcccctgtcccctccaatcctccattctccggccaccctcgcttctccgtccctcggcaatccgcttgtcccccgttgcccgctccgttcagaagcgcctcgccgctgaccggtcgtgacccgcctcgcacctccgccttctccgtccctcgcggccgcggctgccgccgaatggaagccgcctcatgctgccgcgtcttctccacgcagcggtgccgcttcccgctccgcaggctgtcggcgccgccgtggccgcagccgttctgcaccgagtccagcggcggcctcgtcaccccgtcggcctccaagcggaggtccaggggccccgtcatggccgcgaagaaggccgcggagggcgaaaaacaagaagatggaaaatacaagcacactgtggatctcccgaaaacaacatttgggctgagagcgaattctgtacagcgggagccagagctccaaaaattatgggacgataatcaggttctgaaaagggtttctgaaaggaacactgggactgcttttgttctccacgatggccctccctatgctaatggtgatcttcacatgggccatgcgctcaataaaatcctcaaggattttataaatcgctacaagctgcttcagaatcataaagtgtcctttgttcctggttgggattgccacggccttccaatagaactaaaagttttgaagtcaatggataaggaaactttgagtgctcttacacccataaaattaagacaaaaagctgcaaaatttgctaaagcaacagtcgatgcacaaatgaaatctttcaagcggtatggtgtatgggccgattgggacaacccttacctaactctgtcaccggaatacgaagctgctcagttggaagtgtttgggcaaatggttatgaaaggatatatctatagaggacgaaagcctgtccattggagtccatcatcacgtacggctttggcagaagctgaactggagtattccgaaaatcacatttccagaagcatatatgccgcattcaagattactaatccatctaaatctgggatgctagacgatttttttccaaatgtatctttggtcatatggaccaccactccatggacaattccggctaatgctggtgagctgttgctgtgaacccaaagcttatttatgcagtagctgaggtacagtctgtatttgaaagtgagtcaacatccggtggtaaacaaagaaaagttggaaatatattgagttctgagaaaggaaaactgttcgttattgtggcttctgatcttatcacaactcttgagtccaaatggggtgtgaagcttgtagtacacaaatcatttcccggatctgccttggagcactgcaggtatgcccatcctgtgaatagcaacgaatgttccgtcattctaggaggagattacattacaactgaatcgggcactggccttgttcatactgcccctggccatggccaggaagactacataacaggtttgaagtatgggcttcctatcatttctcctgtggacgatgaagggaacttcacggctgaagctggacagttcggtggtttgtctgtcctgggggctggcaatgctgcagttgtgaagtatctggatgaacagtattcactcattttagaggaaccatacaaacacaagtacccctatgactggagatctaaagaaccaactatattccgagcaactgagcagtggtttgcatctgtggatggttttcgtgatgctgcaatggatgcaatcagacgagtaacttgggttccttctcaggcacaaaacaggattgttgccatgacctctagccgttctgattggtgtatttcacggcagagaacttggggtgtccctattccagttttttaccatgtggactcacaggaacctcttataactgaagaaacgattgaacacatcaaggctattgtgttgaagaaaggtagcgatgcatggtggtatatgacaactgaggaacttcttccagatagatatcgggacaaagcatctgaatatcgcaagggaactgatacaatggatgtttggtttgactctggctcttcatgggcagctgttttagcaaaaagggacggtcttaattttcctgcggatatttatcttgaaggttcagatcaacatcgtggatggttccagagctcattgttgactagcattgctacaacagggaaggctccctactccagtgttattacacatggatttgtactggatgaaaagggtttcaaaatgagtaaatcaattggtaatgtagtggacccagagaaaatcattgttggtggcaaaaaccatagggaagaacctggctatggagcagatgttctccgtctatgggtttctagtgttgattacactacagatgtgttgattggcccacaaatcttgcgccagatgtctgacatgtatagaaaactacgaggcacgatgcgatttcttttgtcgaatctccatgattggaagccggataattctgtgccgtacaatgatctgccaaaaatcgacaagtatgcacttttccatttggagactgtcatgacttccatgaaggatagttatgaaagttatcaattctataaagtataccagatccttcaaagatttgctactgttggtttgtccaatttctatttggatgttgcaaaggatcgcctttatgttggaggccgagtcagcttcacaaggaaaagttgtcagactgtgctcatggcacatctgctctaccttgttagggccatttccccgattatgcctcacctagctgaggatgtctggcagaacctaccctttcaatacaccttgcaggatggatcccttgcaaactttgtttttgatctgaaatggccagaaaagaatgaagaatggctctcggccccgaaggatgatgttgatttcctgggtgttatcctggagttgaggtcagaggtcaacaaaattttggagaatgctcgcactggaaagttgattggttctagcttagatgcaaaggtttatctccataccgaaagttcagatacggtattaaagctaaaggagctatcttctgcatccaatgatgcagacgctctgcatcgcctgtttatcacatctcaggtcgatattcttccaatcctaaatgaagagattacatcatctgtaccatacacaggaaagttcagtaacccacgcactggagtcatatggattggtgtgactcgtgcggatggtgcaaaatgtgagaggtgttggaattacacacaggacgttggatctttccatgaccatcctactctctgcgttcggtgctatggtgtcattgagttgcagacacaacctgcggccgcagctgtcagttgaaaggagtgatgttaacgtatcctatcgaaccatctaattttgaggatcattggtggaattcattcttttggagagctttcacgctaccatgtggcggtagcctgggactccagcttgaatcaagttttgcatgcagcaagctgtactttagattcttcatacataggtcacgagagttgtttggagcttgggtcatcgcttactttcccatactactggggggcttatttggaacagttttttacacaaaactcctgacctgtaaatcaattttggaaaaccgtatccggtggtcgatccatgtattaatagagtaataatgttactatgttcatccaaatctcaaagacgtgatggttgtgttgaaaaaacagcttgaatcacttgcttatgctcaactgttttttcttcatgtacatgtgacggaagtttactgctgattgtttattacatccagttatcataatcaaatgtccaacgaggtggccccacctgcagagtccccatcaaaccttacgaggtgggccatccctgactagttaaccacgggatgttacgaggcaggaggtggcaccgcaccgcattccacttccaccgcgccgcgtcatcttcttccttcagcgttgagcggaatcgcgaattgaaaacggaagttaccaattcacccgactcgatagacacaccggctctgctctaagcgagaatccgaggagcgctgccaagcgcctccgcgacgggatcgacgcgacttgattcgcgagtttcaacgtcgcgaggagagcagaaaattacgcaggcagagcggctgccggctgggtgttgaagctagagcggctaggagcaggttcggagcgctaccaaacaggcccttaacctaagcgctcctgcccttcggatccggaagttggaggcgcgcgaggaggcgaggcttgcaaggtctcccttgctagacggcaacggggtgacgatggcgcacgagcggggcgccgccgcatccgcccacccagcggctccaacctccgaggaagacgcgctgtttattgatttattacatgaagcgcccctgtctggtcaccgggagcctagaagcatagttggtgggaccttgtactgtatcttattggtaggttttgctgctgttgccatttcagctccatggatatttcttttcgcgccagatatgatctctccattgctatgtagctccaatgctatcctcctcgttcttacaggcatttttcaacaatattgggttcaccaggtcaggaaagtgagattgcagggctattacgattttagccagaaactgaagcgtattgctcgacttccatttgctactattgcttgtgggactgctttgatgctcttaatcatggtctggcaacctcttttacaaatactatcagtttcactgcttctcaggattgccattgtagttgaagtcacgtgtgctggatgttttatgggcttatatttatggcacatccacaaatacaactctttgaatgggcagcctgatattttgcggtcattatattctgcactccaaccatctaatactttggaagatcgaagatatcatgatgcccgtctttctgatcagcagatggcgttacttcagtaccaaagagagaatatccattatctgagtgaggaggttctccgcttgcaagaatgcttaagcaaataccagagaactgctggaaccactcctcaggttgatcttgcccatcttttagcaactcgtgatcaagaactccgagcactcactgctgagatgaatcaagtgcactccgaacttcaacatgcccgtggtttgatcgatgaaaaggattcagagctccagcgtatccgtctgagcaacaaccagtatgttgaagaaaacgataggctcagagctattctcggtgagtggagtgctcgagccgcaaagcttgaacgtgcattggaggcagagcgggtgtcaaacgtcgaattgaggaaaaatattgcaaagtttagaggtcatttgtacaaagagcaggaggcctgacttcggtatgttatagctggttccagaattttacctaagacacctgactaaaggcacaatttttgatatagaagggtatctcggtctggatccattcgaactgagattggcacgtgattgttcgatgacgcatggaatatgcgtctagtggtttgtagaatgcgtagtttgatgtacatgtgttcgtaggtttgagcatgtagagtatggtatccctcgggaaaaaaaaggagtatggtattcatgtggttgaagactgctgagtattgtgaacatggtagtgtcttgtggggtgtggttcgcaggagacaagaggaggaggttgcagcactggtcgttcttgtaggtgtgcggcagataggattatgcgtactaactgaagaggcagctaggcaagaatcttaacacaaacaagaagaacaggatcgcccctccgactctaatcaatagagttcattacagataagcgacgcagtgcgatgaaatgtaccacctacattcacagacccagttgggcgtaccgttgaagcctcatgggccactcgcgcctgaacccagttgccactatagttttcttcttcggatttgtttgttttttcattctattttctattctattctgtgtgactttcttttctttgttgtttagggctcatttgataataattcagattggttcatatcaatgttctctaaaaaaacgttccagatgacgaatcggaattgcttaaccatttgactgtagaattagaatcacttggacccgtttctagcagaaatgtttc

SEQ ID NO: 51667 - DNA, 4130 bp, Zea Mays
ccactccgcagcctctctgctgctggtgggccagcgttacggcgcgcaaacctccgcctctcccctcccctgtcccctccaatcctccattctccggccaccctcgcttctccgtccctcggcaatccgcttgtcccccgttgcccgctccgttcagaagcgcctcgccgctgaccggtcgtgacccgcctcgcacctccgccttctccgtccctcgcggccgcggctgccgccgaatggaagccgcctcatgctgccgcgtcttctccacgcagcggtgccgcttcccgctccgcaggctgtcggcgccgccgtggccgcagccgttctgcaccgagtccagcggcggcctcgtcaccccgtcggcctccaagcggaggtccaggggccccgtcatggccgcgaagaaggccgcggagggcgaaaaacaagaagatggaaaatacaagcacactgtggatctcccgaaaacaacatttgggctgagagcgaattctgtacagcgggagccagagctccaaaaattatgggacgataatcaggttctgaaaagggtttctgaaaggaacactgggactgcttttgttctccacgatggccctccctatgctaatggtgatcttcacatgggccatgcgctcaataaaatcctcaaggattttataaatcgctacaagctgcttcagaatcataaagtgtcctttgttcctggttgggattgccacggccttccaatagaactaaaagttttgaagtcaatggataaggaaactttgagtgctcttacacccataaaattaagacaaaaagctgcaaaatttgctaaagcaacagtcgatgcacaaatgaaatctttcaagcggtatggtgtatgggccgattgggacaacccttacctaactctgtcaccggaatacgaagctgctcagttggaagtgtttgggcaaatggttatgaaaggatatatctatagaggacgaaagcctgtccattggagtccatcatcacgtacggctttggcagaagctgaactggagtattccgaaaatcacatttccagaagcatatatgccgcattcaagattactaatccatctaaatctgggatgctagacgatttttttccaaatgtatctttggtcatatggaccaccactccatggacaattccggctaatgctgctgttgctgtgaacccaaagcttatttatgcagtagctgaggtacagtctgtatttgaaagtgagtcaacatccggtggtaaacaaagaaaagttggaaatatattgagttctgagaaaggaaaactgttcgttattgtggcttctgatcttatcacaactcttgagtccaaatggggtgtgaagcttgtagtacacaaatcatttcccggatctgccttggagcactgcaggtatgcccatcctgtgaatagcaacgaatgttccgtcattctaggaggagattacattacaactgaatcgggcactggccttgttcatactgcccctggccatggccaggaagactacataacaggtttgaagtatgggcttcctatcatttctcctgtggacgatgaagggaacttcacggctgaagctggacagttcggtggtttgtctgtcctgggggctggcaatgctgcagttgtgaagtatctggatgaacagtattcactcattttagaggaaccatacaaacacaagtacccctatgactggagatctaaagaaccaactatattccgagcaactgagcagtggtttgcatctgtggatggttttcgtgatgctgcaatggatgcaatcagacgagtaacttgggttccttctcaggcacaaaacaggattgttgccatgacctctagccgttctgattggtgtatttcacggcagagaacttggggtgtccctattccagttttttaccatgtggactcacaggaacctcttataactgaagaaacgattgaacacatcaaggctattgtgttgaagaaaggtagcgatgcatggtggtatatgacaactgaggaacttcttccagatagatatcgggacaaagcatctgaatatcgcaagggaactgatacaatggatgtttggtttgactctggctcttcatgggcagctgttttagcaaaaagggacggtcttaattttcctgcggatatttatcttgaaggttcagatcaacatcgtggatggttccagagctcattgttgactagcattgctacaacaggtatttgtgtttttttagttttcagagttattttcttgtcattgttttctgattcctctatggttatatctttcccaacaatcaatttccatgccttttcaattttttgttctagtttttttttttgacatttttctatgcagaagtgtggaaagcctgccactcatactgtttgcttttctatgatgtgtctgtagtttggaagaataacagtatttttctataactcttttttccatctaaagttccatttgtctaaatattcttcaattttttccatgagaaaacagggaaggctccctactccagtgttattacacatggatttgtactggatgaaaagggtttcaaaatgagtaaatcaattggtaatgtagtggacccagagaaaatcattgttggtggcaaaaaccatagggaagaacctggctatggagcagatgttctccgtctatgggtttctagtgttgattacactacagatgtgttgattggcccacaaatcttgcgccagatgtctgacatgtatagaaaactacgaggcacgatgcgatttcttttgtcgaatctccatgattggaagccggataattctgtgccgtacaatgatctgccaaaaatcgacaagtatgcacttttccatttggagactgtcatgacttccatgaaggatagttatgaaagttatcaattctataaagtataccagatccttcaaagatttgctactgttggtttgtccaatttctatttggatgttgcaaaggatcgcctttatgttggaggccgagtcagcttcacaaggaaaagttgtcagactgtgctcatggcacatctgctctaccttgttagggccatttccccgattatgcctcacctagctgaggatgtctggcagaacctaccctttcaatacaccttgcaggatggatcccttgcaaactttgtttttgatctgaaatggccagaaaagaatgaagaatggctctcggccccgaaggatgatgttgatttcctgggtgttatcctggagttgaggtcagaggtcaacaaaattttggagaatgctcgcactggaaagttgattggttctagcttagatgcaaaggtttatctccataccgaaagttcagatacggtattaaagctaaaggagctatcttctgcatccaatgatgcagacgctctgcatcgcctgtttatcacatctcaggtcgatattcttccaatcctaaatgaagagattacatcatctgtaccatacacaggaaagttcagtaacccacgcactggagtcatatggattggtgtgactcgtgcggatggtgcaaaatgtgagaggtgttggaattacacacaggacgttggatctttccatgaccatcctactctctgcgttcggtgctatggtgtcattgagttgcagacacaacctgcggccgcagctgtcagttgaaaggagtgatgttaacgtatcctatcgaaccatctaattttgaggatcattggtggaattcattcttttggagagctttcacgctaccatgtggcggtagcctgggactccagcttgaatcaagttttgcatgcagcaagctgtactttagattcttcatacataggtcacgagagttgtttggagcttgggtcatcgcttactttcccatactactggggggcttatttggaacagttttttacacaaaactcctgacctgtaaatcaattttggaaaaccgtatccggtggtcgatccatgtattaatagagtaataatgttactatgttcatccaaatctcaaagacgtgatggttgtgttgaaaaaacagcttgaatcacttgcttatgctcaactgttttttcttcatgtacatgtgacgga

SEQ ID NO: 51668 - DNA, 3776 bp, Zea Mays
cactccgcagcctctctgctgctggtgggccagcgttacggcgcgcaaacctccgcctctcccctcccctgtcccctccaatcctccattctccggccaccctcgcttctccgtccctcggcaatccgcttgtcccccgttgcccgctccgttcagaagcgcctcgccgctgaccggtcgtgacccgcctcgcacctccgccttctccgtccctcgcggccgcggctgccgccgaatggaagccgcctcatgctgccgcgtcttctccacgcagcggtgccgcttcccgctccgcaggctgtcggcgccgccgtggccgcagccgttctgcaccgagtccagcggcggcctcgtcaccccgtcggcctccaagcggaggtccaggggccccgtcatggccgcgaagaaggccgcggagggcgaaaaacaagaagatggaaaatacaagcacactgtggatctcccgaaaacaacatttgggctgagagcgaattctgtacagcgggagccagagctccaaaaattatgggacgataatcaggttctgaaaagggtttctgaaaggaacactgggactgcttttgttctccacgatggccctccctatgctaatggtgatcttcacatgggccatgcgctcaataaaatcctcaaggattttataaatcgctacaagctgcttcagaatcataaagtgtcctttgttcctggttgggattgccacggccttccaatagaactaaaagttttgaagtcaatggataaggaaactttgagtgctcttacacccataaaattaagacaaaaagctgcaaaatttgctaaagcaacagtcgatgcacaaatgaaatctttcaagcggtatggtgtatgggccgattgggacaacccttacctaactctgtcaccggaatacgaagctgctcagttggaagtgtttgggcaaatggttatgaaaggatatatctatagaggacgaaagcctgtccattggagtccatcatcacgtacggctttggcagaagctgaactggagtattccgaaaatcacatttccagaagcatatatgccgcattcaagattactaatccatctaaatctgggatgctagacgatttttttccaaatgtatctttggtcatatggaccaccactccatggacaattccggctaatgctgctgttgctgtgaacccaaagcttatttatgcagtagctgaggtacagtctgtatttgaaagtgagtcaacatccggtggtaaacaaagaaaagttggaaatatattgagttctgagaaaggaaaactgttcgttattgtggcttctgatcttatcacaactcttgagtccaaatggggtgtgaagcttgtagtacacaaatcatttcccggatctgccttggagcactgcaggtatgcccatcctgtgaatagcaacgaatgttccgtcattctaggaggagattacattacaactgaatcgggcactggccttgttcatactgcccctggccatggccaggaagactacataacaggtttgaagtatgggcttcctatcatttctcctgtggacgatgaagggaacttcacggctgaagctggacagttcggtggtttgtctgtcctgggggctggcaatgctgcagttgtgaagtatctggatgaacagtattcactcattttagaggaaccatacaaacacaagtacccctatgactggagatctaaagaaccaactatattccgagcaactgagcagtggtttgcatctgtggatggttttcgtgatgctgcaatggatgcaatcagacgagtaacttgggttccttctcaggcacaaaacaggattgttgccatgacctctagccgttctgattggtgtatttcacggcagagaacttggggtgtccctattccagttttttaccatgtggactcacaggaacctcttataactgaagaaacgattgaacacatcaaggatagatatcgggacaaagcatctgaatatcgcaagggaactgatacaatggatgtttggtttgactctggctcttcatgggcagctgttttagcaaaaagggacggtcttaattttcctgcggatatttatcttgaaggttcagatcaacatcgtggatggttccagagctcattgttgactagcattgctacaacagggaaggctccctactccagtgttattacacatggatttgtactggatgaaaagggtttcaaaatgagtaaatcaattggtaatgtagtggacccagagaaaatcattgttggtggcaaaaaccatagggaagaacctggctatggagcagatgttctccgtctatgggtttctagtgttgattacactacagatgtgttgattggcccacaaatcttgcgccagatgtctgacatgtatagaaaactacgaggcacgatgcgatttcttttgtcgaatctccatgattggaagccggataattctgtgccgtacaatgatctgccaaaaatcgacaagtatgcacttttccatttggagactgtcatgacttccatgaaggatagttatgaaagttatcaattctataaagtataccagatccttcaaagatttgctactgttggtttgtccaatttctatttggatgttgcaaaggatcgcctttatgttggaggccgagtcagcttcacaaggaaaagttgtcagactgtgctcatggcacatctgctctaccttgttagggccatttccccgattatgcctcacctagctgaggatgtctggcagaacctaccctttcaatacaccttgcaggatggatcccttgcaaactttgtttttgatctgaaatggccagaaaagaatgaagaatggctctcggccccgaaggatgatgttgatttcctgggtgttatcctggagttgaggtcagaggtcaacaaaattttggagaatgctcgcactggaaagttgattggttctagcttagatgcaaaggtttatctccataccgaaagttcagatacggtattaaagctaaaggagctatcttctgcatccaatgatgcagacgctctgcatcgcctgtttatcacatctcaggtcgatattcttccaatcctaaatgaagagattacatcatctgtaccatacacaggaaagttcagtaacccacgcactggagtcatatggattggtgtgactcgtgcggatggtgcaaaatgtgagaggtgttggaattacacacaggacgttggatctttccatgaccatcctactctctgcgttcggtgctatggtgtcattgagttgcagacacaacctgcggccgcagctgtcagttgaaaggagtgatgttaacgtatcctatcgaaccatctaattttgaggatcattggtggaattcattcttttggagagctttcacgctaccatgtggcggtagcctgggactccagcttgaatcaagttttgcatgcagcaagctgtactttagattcttcatacataggtcacgagagttgtttggagcttgggtcatcgcttactttcccatactactggggggcttatttggaacagttttttacacaaaactcctgacctgtaaatcaattttggaaaaccgtatccggtggtcgatccatgtattaatagagtaataatgttactatgttcatccaaatctcaaagacgtgatggttgtgttgaaaaaacagcttgaatcacttgcttatgctcaactgttttttcttcatgtacatgtgacgga

SEQ ID NO: 51669 - DNA, 3593 bp, Zea Mays
ctcgcttctccgtccctcggcaatccgcttgtcccccgttgcccgctccgttcagaagcgcctcgccgctgaccggtcgtgacccgcctcgcacctccgccttctccgtccctcgcggccgcggctgccgccgaatggaagccgcctcatgctgccgcgtcttctccacgcagcggtgccgcttcccgctccgcaggctgtcggcgccgccgtggccgcagccgttctgcaccgagtccagcggcggcctcgtcaccccgtcggcctccaagcggaggtccaggggccccgtcatggccgcgaagaaggccgcggagggcgaaaaacaagaagatggaaaatacaagcacactgtggatctcccgaaaacaacatttgggctgagagcgaattctgtacagcgggagccagagctccaaaaattatgggacgataatcaggttctgaaaagggtttctgaaaggaacactgggactgcttttgttctccacgatggccctccctatgctaatggtgatcttcacatgggccatgcgctcaataaaatcctcaaggattttataaatcgctacaagctgcttcagaatcataaagtgtcctttgttcctggttgggattgccacggccttccaatagaactaaaagttttgaagtcaatggataaggaaactttgagtgctcttacacccataaaattaagacaaaaagctgcaaaatttgctaaagcaacagtcgatgcacaaatgaaatctttcaagcggtatggtgtatgggccgattgggacaacccttacctaactctgtcaccggaatacgaagctgctcagttggaagtgtttgggcaaatggttatgaaaggatatatctatagaggacgaaagcctgtccattggagtccatcatcacgtacggctttggcagaagctgaactggagctgttgctgtgaacccaaagcttatttatgcagtagctgaggtacagtctgtatttgaaagtgagtcaacatccggtggtaaacaaagaaaagttggaaatatattgagttctgagaaaggaaaactgttcgttattgtggcttctgatcttatcacaactcttgagtccaaatggggtgtgaagcttgtagtacacaaatcatttcccggatctgccttggagcactgcaggtatgcccatcctgtgaatagcaacgaatgttccgtcattctaggaggagattacattacaactgaatcgggcactggccttgttcatactgcccctggccatggccaggaagactacataacaggtttgaagtatgggcttcctatcatttctcctgtggacgatgaagggaacttcacggctgaagctggacagttcggtggtttgtctgtcctgggggctggcaatgctgcagttgtgaagtatctggatgaacagtattcactcattttagaggaaccatacaaacacaagtacccctatgactggagatctaaagaaccaactatattccgagcaactgagcagtggtttgcatctgtggatggttttcgtgatgctgcaatggatgcaatcagacgagtaacttgggttccttctcaggcacaaaacaggattgttgccatgacctctagccgttctgattggtgtatttcacggcagagaacttggggtgtccctattccagttttttaccatgtggactcacaggaacctcttataactgaagaaacgattgaacacatcaaggctattgtgttgaagaaaggtagcgatgcatggtggtatatgacaactgaggaacttcttccagatagatatcgggacaaagcatctgaatatcgcaagggaactgatacaatggatgtttggtttgactctggctcttcatgggcagctgttttagcaaaaagggacggtcttaattttcctgcggatatttatcttgaaggttcagatcaacatcgtggatggttccagagctcattgttgactagcattgctacaacagggaaggctccctactccagtgttattacacatggatttgtactggatgaaaagggtttcaaaatgagtaaatcaattggtaatgtagtggacccagagaaaatcattgttggtggcaaaaaccatagggaagaacctggctatggagcagatgttctccgtctatgggtttctagtgttgattacactacagatgtgttgattggcccacaaatcttgcgccagatgtctgacatgtatagaaaactacgaggcacgatgcgatttcttttgtcgaatctccatgattggaagccggataattctgtgccgtacaatgatctgccaaaaatcgacaagtatgcacttttccatttggagactgtcatgacttccatgaaggatagttatgaaagttatcaattctataaagtataccagatccttcaaagatttgctactgttggtttgtccaatttctatttggatgttgcaaaggatcgcctttatgttggaggccgagtcagcttcacaaggaaaagttgtcagactgtgctcatggcacatctgctctaccttgttagggccatttccccgattatgcctcacctagctgaggatgtctggcagaacctaccctttcaatacaccttgcaggatggatcccttgcaaactttgtttttgatctgaaatggccagaaaagaatgaagaatggctctcggccccgaaggatgatgttgatttcctgggtgttatcctggagttgaggtcagaggtcaacaaaattttggagaatgctcgcactggaaagttgattggttctagcttagatgcaaaggtttatctccataccgaaagttcagatacggtattaaagctaaaggagctatcttctgcatccaatgatgcagacgctctgcatcgcctgtttatcacatctcaggtcgatattcttccaatcctaaatgaagagattacatcatctgtaccatacacaggaaagttcagtaacccacgcactggagtcatatggattggtgtgactcgtgcggatggtgcaaaatgtgagaggtgttggaattacacacaggacgttggatctttccatgaccatcctactctctgcgttcggtgctatggtgtcattgagttgcagacacaacctgcggccgcagctgtcagttgaaaggagtgatgttaacgtatcctatcgaaccatctaattttgaggatcattggtggaattcattcttttggagagctttcacgctaccatgtggcggtagcctgggactccagcttgaatcaagttttgcatgcagcaagctgtactttagattcttcatacataggtcacgagagttgtttggagcttgggtcatcgcttactttcccatactactggggggcttatttggaacagttttttacacaaaactcctgacctgtaaatcaattttggaaaaccgtatccggtggtcgatccatgtattaatagagtaataatgttactatgttcatccaaatctcaaagacgtgatggttgtgttgaaaaaacagcttgaatcacttgcttatgctcaactgttttttcttcatgtacatgtgacgga

SEQ ID NO: 51670 - DNA, 3648 bp, Zea Mays
gtcccccgttgcccgctccgttcagaagcgcctcgccgctgaccggtcgtgacccgcctcgcacctccgccttctccgtccctcgcggccgcggctgccgccgaatggaagccgcctcatgctgccgcgtcttctccacgcagcggtgccgcttcccgctccgcaggctgtcggcgccgccgtggccgcagccgttctgcaccgagtccagcggcggcctcgtcaccccgtcggcctccaagcggaggtccaggggccccgtcatggccgcgaagaaggccgcggagggcgaaaaacaagaagatggaaaatacaagcacactgtggatctcccgaaaacaacatttgggctgagagcgaattctgtacagcgggagccagagctccaaaaattatgggacgataatcaggttctgaaaagggtttctgaaaggaacactgggactgcttttgttctccacgatggccctccctatgctaatggtgatcttcacatgggccatgcgctcaataaaatcctcaaggattttataaatcgctacaagctgcttcagaatcataaagtgtcctttgttcctggttgggattgccacggccttccaatagaactaaaagttttgaagtcaatggataaggaaactttgagtgctcttacacccataaaattaagacaaaaagctgcaaaatttgctaaagcaacagtcgatgcacaaatgaaatctttcaagcggtatggtgtatgggccgattgggacaacccttacctaactctgtcaccggaatacgaagctgctcagttggaagtgtttgggcaaatggttatgaaaggatatatctatagaggacgaaagcctgtccattggagtccatcatcacgtacggctttggcagaagctgaactggagtattccgaaaatcacatttccagaagcatatatgccgcattcaagattactaatccatctaaatctgggatgctagacgatttttttccaaatgtatctttggtcatatggaccaccactccatggacaattccggctaatgctgctgttgctgtgaacccaaagcttatttatgcagtagctgaggtacagtctgtatttgaaagtgagtcaacatccggtggtaaacaaagaaaagttggaaatatattgagttctgagaaaggaaaactgttcgttattgtggcttctgatcttatcacaactcttgagtccaaatggggtgtgaagcttgtagtacacaaatcatttcccggatctgccttggagcactgcaggtatgcccatcctgtgaatagcaacgaatgttccgtcattctaggaggagattacattacaactgaatcgggcactggccttgttcatactgcccctggccatggccaggaagactacataacaggtttgaagtatgggcttcctatcatttctcctgtggacgatgaagggaacttcacggctgaagctggacagttcggtggtttgtctgtcctgggggctggcaatgctgcagttgtgaagtatctggatgaacagtattcactcattttagaggaaccatacaaacacaagtacccctatgactggagatctaaagaaccaactatattccgagcaactgagcagtggtttgcatctgtggatggttttcgtgatgctgcaatggatgcaatcagacgagtaacttgggttccttctcagagaacttggggtgtccctattccagttttttaccatgtggactcacaggaacctcttataactgaagaaacgattgaacacatcaaggctattgtgttgaagaaaggtagcgatgcatggtggtatatgacaactgaggaacttcttccagatagatatcgggacaaagcatctgaatatcgcaagggaactgatacaatggatgtttggtttgactctggctcttcatgggcagctgttttagcaaaaagggacggtcttaattttcctgcggatatttatcttgaaggttcagatcaacatcgtggatggttccagagctcattgttgactagcattgctacaacagggaaggctccctactccagtgttattacacatggatttgtactggatgaaaagggtttcaaaatgagtaaatcaattggtaatgtagtggacccagagaaaatcattgttggtggcaaaaaccatagggaagaacctggctatggagcagatgttctccgtctatgggtttctagtgttgattacactacagatgtgttgattggcccacaaatcttgcgccagatgtctgacatgtatagaaaactacgaggcacgatgcgatttcttttgtcgaatctccatgattggaagccggataattctgtgccgtacaatgatctgccaaaaatcgacaagtatgcacttttccatttggagactgtcatgacttccatgaaggatagttatgaaagttatcaattctataaagtataccagatccttcaaagatttgctactgttggtttgtccaatttctatttggatgttgcaaaggatcgcctttatgttggaggccgagtcagcttcacaaggaaaagttgtcagactgtgctcatggcacatctgctctaccttgttagggccatttccccgattatgcctcacctagctgaggatgtctggcagaacctaccctttcaatacaccttgcaggatggatcccttgcaaactttgtttttgatctgaaatggccagaaaagaatgaagaatggctctcggccccgaaggatgatgttgatttcctgggtgttatcctggagttgaggtcagaggtcaacaaaattttggagaatgctcgcactggaaagttgattggttctagcttagatgcaaaggtttatctccataccgaaagttcagatacggtattaaagctaaaggagctatcttctgcatccaatgatgcagacgctctgcatcgcctgtttatcacatctcaggtcgatattcttccaatcctaaatgaagagattacatcatctgtaccatacacaggaaagttcagtaacccacgcactggagtcatatggattggtgtgactcgtgcggatggtgcaaaatgtgagaggtgttggaattacacacaggacgttggatctttccatgaccatcctactctctgcgttcggtgctatggtgtcattgagttgcagacacaacctgcggccgcagctgtcagttgaaaggagtgatgttaacgtatcctatcgaaccatctaattttgaggatcattggtggaattcattcttttggagagctttcacgctaccatgtggcggtagcctgggactccagcttgaatcaagttttgcatgcagcaagctgtactttagattcttcatacataggtcacgagagttgtttggagcttgggtcatcgcttactttcccatactactggggggcttatttggaacagttttttacacaaaactcctgacctgtaaatcaattttggaaaaccgtatccggtggtcgatccatgtattaatagagtaataatgttactatgttcatccaaatctcaaagacgtgatggttgtgttgaaaaaacagcttgaatcacttgcttatgctcaactgttttttcttcatgtacatgtgacgga

SEQ ID NO: 51671 - DNA, 3924 bp, Zea Mays
ggctgccgccgaatggaagccgcctcatgctgccgcgtcttctccacgcagcggtgccgcttcccgctccgcaggctgtcggcgccgccgtggccgcagccgttctgcaccgagtccagcggcggcctcgtcaccccgtcggcctccaagcggaggtccaggggccccgtcatggccgcgaagaaggccgcggagggcgaaaaacaagaagatggaaaatacaagcacactgtggatctcccgaaaacaacatttgggctgagagcgaattctgtacagcgggagccagagctccaaaaattatgggacgataatcaggttctgaaaagggtttctgaaaggaacactgggactgcttttgttctccacgatggccctccctatgctaatggtgatcttcacatgggccatgcgctcaataaaatcctcaaggattttataaatcgctacaagctgcttcagaatcataaagtgtcctttgttcctggttgggattgccacggccttccaatagaactaaaagttttgaagtcaatggataaggaaactttgagtgctcttacacccataaaattaagacaaaaagctgcaaaatttgctaaagcaacagtcgatgcacaaatgaaatctttcaagcggtatggtgtatgggccgattgggacaacccttacctaactctgtcaccggaatacgaagctgctcaggttttctgtctgctttctgcttttacagaatatggcaatgatattaacgtgtatatttgacataaatgagaacttggaggtctgacattacttgagttgtcttccgtatctctcttgtggacgacattagattagtgcatttaattttctttattgaaatccatctgtgtggccagcaaatatttatcgacaatatggtgtactataactgtaaattttgtgttatgatgattagcatgttccatcgcaatcagaacctcttacagaacaaaagtcattttgtttgcttatccattttgttattccagttggaagtgtttgggcaaatggttatgaaaggatatatctatagaggacgaaagcctgtccattggagtccatcatcacgtacggctttggcagaagctgaactggagtattccgaaaatcacatttccagaagcatatatgccgcattcaagattactaatccatctaaatctgggatgctagacgatttttttccaaatgtatctttggtcatatggaccaccactccatggacaattccggctaatgctgctgttgctgtgaacccaaagcttatttatgcagtagctgaggtacagtctgtatttgaaagtgagtcaacatccggtggtaaacaaagaaaagttggaaatatattgagttctgagaaaggaaaactgttcgttattgtggcttctgatcttatcacaactcttgagtccaaatggggtgtgaagcttgtagtacacaaatcatttcccggatctgccttggagcactgcaggtatgcccatcctgtgaatagcaacgaatgttccgtcattctaggaggagattacattacaactgaatcgggcactggccttgttcatactgcccctggccatggccaggaagactacataacaggtttgaagtatgggcttcctatcatttctcctgtggacgatgaagggaacttcacggctgaagctggacagttcggtggtttgtctgtcctgggggctggcaatgctgcagttgtgaagtatctggatgaacagtattcactcattttagaggaaccatacaaacacaagtacccctatgactggagatctaaagaaccaactatattccgagcaactgagcagtggtttgcatctgtggatggttttcgtgatgctgcaatggatgcaatcagacgagtaacttgggttccttctcaggcacaaaacaggattgttgccatgacctctagccgttctgattggtgtatttcacggcagagaacttggggtgtccctattccagttttttaccatgtggactcacaggaacctcttataactgaagaaacgattgaacacatcaaggctattgtgttgaagaaaggtagcgatgcatggtggtatatgacaactgaggaacttcttccagatagatatcgggacaaagcatctgaatatcgcaagggaactgatacaatggatgtttggtttgactctggctcttcatgggcagctgttttagcaaaaagggacggtcttaattttcctgcggatatttatcttgaaggttcagatcaacatcgtggatggttccagagctcattgttgactagcattgctacaacagggaaggctccctactccagtgttattacacatggatttgtactggatgaaaagggtttcaaaatgagtaaatcaattggtaatgtagtggacccagagaaaatcattgttggtggcaaaaaccatagggaagaacctggctatggagcagatgttctccgtctatgggtttctagtgttgattacactacagatgtgttgattggcccacaaatcttgcgccagatgtctgacatgtatagaaaactacgaggcacgatgcgatttcttttgtcgaatctccatgattggaagccggataattctgtgccgtacaatgatctgccaaaaatcgacaagtatgcacttttccatttggagactgtcatgacttccatgaaggatagttatgaaagttatcaattctataaagtataccagatccttcaaagatttgctactgttggtttgtccaatttctatttggatgttgcaaaggatcgcctttatgttggaggccgagtcagcttcacaaggaaaagttgtcagactgtgctcatggcacatctgctctaccttgttagggccatttccccgattatgcctcacctagctgaggatgtctggcagaacctaccctttcaatacaccttgcaggatggatcccttgcaaactttgtttttgatctgaaatggccagaaaagaatgaagaatggctctcggccccgaaggatgatgttgatttcctgggtgttatcctggagttgaggtcagaggtcaacaaaattttggagaatgctcgcactggaaagttgattggttctagcttagatgcaaaggtttatctccataccgaaagttcagatacggtattaaagctaaaggagctatcttctgcatccaatgatgcagacgctctgcatcgcctgtttatcacatctcaggtcgatattcttccaatcctaaatgaagagattacatcatctgtaccatacacaggaaagttcagtaacccacgcactggagtcatatggattggtgtgactcgtgcggatggtgcaaaatgtgagaggtgttggaattacacacaggacgttggatctttccatgaccatcctactctctgcgttcggtgctatggtgtcattgagttgcagacacaacctgcggccgcagctgtcagttgaaaggagtgatgttaacgtatcctatcgaaccatctaattttgaggatcattggtggaattcattcttttggagagctttcacgctaccatgtggcggtagcctgggactccagcttgaatcaagttttgcatgcagcaagctgtactttagattcttcatacataggtcacgagagttgtttggagcttgggtcatcgcttactttcccatactactggggggcttatttggaacagttttttacacaaaactcctgacctgtaaatcaattttggaaaaccgtatccggtggtcgatccatgtattaatagagtaataatgttactatgttcatccaaatctcaaagacgtgatggttgtgttgaaaaaacagcttgaatcacttgcttatgctcaactgttttttcttcatgtacatgtgacgga

SEQ ID NO: 51672 - DNA, 1388 bp, Zea Mays
catgaatgcagtctgtgtttggataatatttcattgggtttattgtagatgggcttctggtaaacataaatcatgcttggtgatcacatagttgactccttggtaggcattggtttatcgatcatagcttggatggtcaaagcgtcaacatttagagtttttgcttgaaagtggcaattatgttgttcagtaaactccctggccttttgaatctatccttcaaagatttgctactgttggtttgtccaatttctatttggatgttgcaaaggatcgcctttatgttggaggccgagtcagcttcacaaggaaaagttgtcagactgtgctcatggcacatctgctctaccttgttagggccatttccccgattatgcctcacctagctgaggatgtctggcagaacctaccctttcaatacaccttgcaggatggatcccttgcaaactttgtttttgatctgaaatggccagaaaagaatgaagaatggctctcggccccgaaggatgatgttgatttcctgggtgttatcctggagttgaggtcagaggtcaacaaaattttggagaatgctcgcactggaaagttgattggttctagcttagatgcaaaggtttatctccataccgaaagttcagatacggtattaaagctaaaggagctatcttctgcatccaatgatgcagacgctctgcatcgcctgtttatcacatctcaggtcgatattcttccaatcctaaatgaagagattacatcatctgtaccatacacaggaaagttcagtaacccacgcactggagtcatatggattggtgtgactcgtgcggatggtgcaaaatgtgagaggtgttggaattacacacaggacgttggatctttccatgaccatcctactctctgcgttcggtgctatggtgtcattgagttgcagacacaacctgcggccgcagctgtcagttgaaaggagtgatgttaacgtatcctatcgaaccatctaattttgaggatcattggtggaattcattcttttggagagctttcacgctaccatgtggcggtagcctgggactccagcttgaatcaagttttgcatgcagcaagctgtactttagattcttcatacataggtcacgagagttgtttggagcttgggtcatcgcttactttcccatactactggggggcttatttggaacagttttttacacaaaactcctgacctgtaaatcaattttggaaaaccgtatccggtggtcgatccatgtattaatagagtaataatgttactatgttcatccaaatctcaaagacgtgatggttgtgttgaaaaaacagcttgaatcacttgcttatgctcaactgttttttcttcatgtacatgtgacgga

SEQ ID NO: 51673 - DNA, 2251 bp, Zea Mays
aggaggtggcaccgcaccgcattccacttccaccgcgccgcgtcatcttcttccttcagcgttgagcggaatcgcgaattgaaaacggaagttaccaattcacccgactcgatagacacaccggctctgctctaagcgagaatccgaggagcgctgccaagcgcctccgcgacgggatcgacgcgacttgattcgcgagtttcaacgtcgcgaggagagcagaaaattacgcaggcagagcggctgccggctgggtgttgaagctagagcggctaggagcaggttcggagcgctaccaaacaggcccttaacctaagcgctcctgcccttcggatccggaagttggaggcgcgcgaggaggcgaggcttgcaaggtctcccttgctagacggcaacggggtgacgatggcgcacgagcggggcgccgccgcatccgcccacccagcggctccaacctccgaggaagacgcgctgtttattgatttattacatgaagcgcccctgtctggtcaccgggagcctagaagcatagttggtgggaccttgtactgtatcttattggttttgctgctgttgccatttcagctccatggatatttcttttcgcgccagatatgatctctccattgctatgtagctccaatgctatcctcctcgttcttacaggcatttttcaacaatattgggttcaccaggtcaggaaagtgagattgcagggctattacgattttagccagaaactgaagcgtattgctcgacttccatttgctactattgcttgtgggactgctttgatgctcttaatcatggtctggcaacctcttttacaaatactatcagtttcactgcttctcaggattgccattgtagttgaagtcacgtgtgctggatgttttatgggcttatatttatggcacatccacaaatacaactctttgaatgggcagcctgatattttgcggtcattatattctgcactccaaccatctaatactttggaagatcgaagatatcatgatgcccgtctttctgatcagcagatggcgttacttcagtaccaaagagagaatatccattatctgagtgaggaggttctccgcttgcaagaatgcttaagcaaataccagagaactgctggaaccactcctcaggttgatcttgcccatcttttagcaactcgtgatcaagaactccgagcactcactgctgagatgaatcaagtgcactccgaacttcaacatgcccgtggtttgatcgatgaaaaggattcagagctccagcgtatccgtctgagcaacaaccagtatgttgaagaaaacgataggctcagagctattctcggtgagtggagtgctcgagccgcaaagcttgaacgtgcattggaggcagagcgggtgtcaaacgtcgaattgaggaaaaatattgcaaagtttagaggtcatttgtacaaagagcaggaggcctgacttcggtatgttatagctggttccagaattttacctaagacacctgactaaaggcacaatttttgatatagaagggtatctcggtctggatccattcgaactgagattggcacgtgattgttcgatgacgcatggaatatgcgtctagtggtttgtagaatgcgtagtttgatgtacatgtgttcgtaggtttgagcatgtagagtatggtatccctcgggaaaaaaaaggagtatggtattcatgtggttgaagactgctgagtattgtgaacatggtagtgtcttgtggggtgtggttcgcaggagacaagaggaggaggttgcagcactggtcgttcttgtaggtgtgcggcagataggattatgcgtactaactgaagaggcagctaggcaagaatcttaacacaaacaagaagaacaggatcgcccctccgactctaatcaatagagttcattacagataagcgacgcagtgcgatgaaatgtaccacctacattcacagacccagttgggcgtaccgttgaagcctcatgggccactcgcgcctgaacccagttgccactatagttttcttcttcggatttgtttgttttttcattctattttctattctattctgtgtgactttcttttctttgttgtttagggctcatttgataataattcagattggttcatatcaatgttctctaaaaaaacgttccagatgacgaatcggaattgcttaaccatttgactgtagaattagaatcacttggacccgtttctagcagaaatgtttc

SEQ ID NO: 51674 - DNA, 1925 bp, Zea Mays
cttccaccgcgccgcgtcatcttcttccttcagcgttgagcggaatcgcgaattgaaaacggaagttaccaattcacccgactcgatagacacaccggctctgctctaagcgagaatccgaggagcgctgccaagcgcctccgcgacgggatcgacgcgacttgattcgcgagtttcaacgtcgcgaggagagcagaaaattacgcaggcagagcggctgccggctgggtgttgaagctagagcggctaggagcaggttcggagcgctaccaaacaggcccttaacctaagcgctcctgcccttcggatccggaagttggaggcgcgcgaggaggcgaggcttgcaaggtctcccttgctagacggcaacggggtgacgatggcgcacgagcggggcgccgccgcatccgcccacccagcggctccaacctccgaggaagacgcgctgtttattgatttattacatgaagcgcccctgtctggtcaccgggagcctagaagcatagttggtgggaccttgtactgtatcttattggttttgctgctgttgccatttcagctccatggatatttcttttcgcgccagatatgatctctccattgctatgtagctccaatgctatcctcctcgttcttacaggcatttttcaacaatattgggttcaccaggtcaggaaagtgagattgcagggctattacgattttagccagaaactgaagcgtattgctcgacttccatttgctactattgcttgtgggactgctttgatgctcttaatcatggtctggcaacctcttttacaaatactatcagtttcactgcttctcaggattgccattgtagttgaagtcacgtgtgctggatgttttatgggcttatatttatggcacatccacaaatacaactctttgaatgggcagcctgatattttgcggtcattatattctgcactccaaccatctaatactttggaagatcgaagatatcatgatgcccgtctttctgatcagcagatggcgttacttcagtaccaaagagagaatatccattatctgagtgaggaggttctccgcttgcaagaatgcttaagcaaataccagagaactgctggaaccactcctcaggttgatcttgcccatcttttagcaactcgtgatcaagaactccgagcactcactgctgagatgaatcaagtgcactccgaacttcaacatgcccgtggtttgatcgatgaaaaggattcagagctccagcgtatccgtctgagcaacaaccagtatgttgaagaaaacgataggctcagagctattctcggtgagtggagtgctcgagccgcaaagcttgaacgtgcattggaggcagagcgggtgtcaaacgtcgaattgaggaaaaatattgcaaagtttagaggtcatttgtacaaagagcaggaggcctgacttcggagacaagaggaggaggttgcagcactggtcgttcttgtaggtgtgcggcagataggattatgcgtactaactgaagaggcagctaggcaagaatcttaacacaaacaagaagaacaggatcgcccctccgactctaatcaatagagttcattacagataagcgacgcagtgcgatgaaatgtaccacctacattcacagacccagttgggcgtaccgttgaagcctcatgggccactcgcgcctgaacccagttgccactatagttttcttcttcggatttgtttgttttttcattctattttctattctattctgtgtgactttcttttctttgttgtttagggctcatttgataataattcagattggttcatatcaatgttctctaaaaaaacgttccagatgacgaatcggaattgcttaaccatttgactgtagaattagaatcacttggacccgtttctagcagaaatgtttc

SEQ ID NO: 51675 - DNA, 2170 bp, Zea Mays
ccaccgcgccgcgtcatcttcttccttcagcgttgagcggaatcgcgaattgaaaacggaagttaccaattcacccgactcgatagacacaccggctctgctctaagcgagaatccgaggagcgctgccaagcgcctccgcgacgggatcgacgcgacttgattcgcgagtttcaacgtcgcgaggagagcagaaaattacgcaggcagagcggctgccggctgggtgttgaagctagagcggctaggagcaggttcggagcgctaccaaacaggcccttaacctaagcgctcctgcccttcggatccggaagttggaggcgcgcgaggaggcgaggcttgcaaggtctcccttgctagacggcaacggggtgacgatggcgcacgagcggggcgccgccgcatccgcccacccagcggctccaacctccgaggaagacgcgctgtttattgatttattacatgaagcgcccctgtctggtcaccgggagcctagaagcatagttggtgggaccttgtactgtatcttattggtaggttttgctgctgttgccatttcagctccatggatatttcttttcgcgccagatatgatctctccattgctatgtagctccaatgctatcctcctcgttcttacaggcatttttcaacaatattgggttcaccaggtcaggaaagtgagattgcagggctattacgattttagccagaaactgaagcgtattgctcgacttccatttgctactattgcttgtgggactgctttgatgctcttaatcatggtctggcaacctcttttacaaatactatcagtttcactgcttctcagggcacatccacaaatacaactctttgaatgggcagcctgatattttgcggtcattatattctgcactccaaccatctaatactttggaagatcgaagatatcatgatgcccgtctttctgatcagcagatggcgttacttcagtaccaaagagagaatatccattatctgagtgaggaggttctccgcttgcaagaatgcttaagcaaataccagagaactgctggaaccactcctcaggttgatcttgcccatcttttagcaactcgtgatcaagaactccgagcactcactgctgagatgaatcaagtgcactccgaacttcaacatgcccgtggtttgatcgatgaaaaggattcagagctccagcgtatccgtctgagcaacaaccagtatgttgaagaaaacgataggctcagagctattctcggtgagtggagtgctcgagccgcaaagcttgaacgtgcattggaggcagagcgggtgtcaaacgtcgaattgaggaaaaatattgcaaagtttagaggtcatttgtacaaagagcaggaggcctgacttcggtatgttatagctggttccagaattttacctaagacacctgactaaaggcacaatttttgatatagaagggtatctcggtctggatccattcgaactgagattggcacgtgattgttcgatgacgcatggaatatgcgtctagtggtttgtagaatgcgtagtttgatgtacatgtgttcgtaggtttgagcatgtagagtatggtatccctcgggaaaaaaaaggagtatggtattcatgtggttgaagactgctgagtattgtgaacatggtagtgtcttgtggggtgtggttcgcaggagacaagaggaggaggttgcagcactggtcgttcttgtaggtgtgcggcagataggattatgcgtactaactgaagaggcagctaggcaagaatcttaacacaaacaagaagaacaggatcgcccctccgactctaatcaatagagttcattacagataagcgacgcagtgcgatgaaatgtaccacctacattcacagacccagttgggcgtaccgttgaagcctcatgggccactcgcgcctgaacccagttgccactatagttttcttcttcggatttgtttgttttttcattctattttctattctattctgtgtgactttcttttctttgttgtttagggctcatttgataataattcagattggttcatatcaatgttctctaaaaaaacgttccagatgacgaatcggaattgcttaaccatttgactgtagaattagaatcacttggacccgtttctagcagaaatgtttc

SEQ ID NO: 51676 - DNA, 2200 bp, Zea Mays
ccaccgcgccgcgtcatcttcttccttcagcgttgagcggaatcgcgaattgaaaacggaagttaccaattcacccgactcgatagacacaccggctctgctctaagcgagaatccgaggagcgctgccaagcgcctccgcgacgggatcgacgcgacttgattcgcgagtttcaacgtcgcgaggagagcagaaaattacgcaggcagagcggctgccggctgggtgttgaagctagagcggctaggagcaggttcggagcgctaccaaacaggcccttaacctaagcgctcctgcccttcggatccggaagttggaggcgcgcgaggaggcgaggcttgcaaggtctcccttgctagacggcaacggggtgacgatggcgcacgagcggggcgccgccgcatccgcccacccagcggctccaacctccgaggaagacgcgctgtttattgatttattacatgaagcgcccctgtctggtcaccgggagcctagaagcatagttggtgggaccttgtactgtatcttattggtaggttttgctgctgttgccatttcagctccatggatatttcttttcgcgccagatatgatctctccattgctatgtagctccaatgctatcctcctcgttcttacaggcatttttcaacaatattgggttcaccaggtcaggaaagtgagattgcagggctattacgattttagccagaaactgaagcgtattgctcgacttccatttgctactattgcttgtgggactgctttgatgctcttaatcatggtctggcaacctcttttacaaatactatcagtttcactgcttctcaggattgccattgtagttgaagtcacgtgtgctggatgttttatgggcttatatttatggcacatccacaaatacaactctttgaatgggcagcctgatattttgcggtcattatattctgcactccaaccatctaatactttggaagatcgaagatatcatgatgcccgtctttctgatcagcagatggcgttacttcagtaccaaagagagaatatccattatctgagtgaggaggttctccgcttgcaagaatgcttaagcaaataccagagaactgctggaaccactcctcaggttgatcttgcccatcttttagcaactcgtgatcaagaactccgagcactcactgctgagatgaatcaagtgcactccgaacttcaacatgcccgtggtttgatcgatgaaaaggattcagagctccagcgtatccgtctgagcaacaaccagtatgttgaagaaaacgataggctcagagctattctcgcttgaacgtgcattggaggcagagcgggtgtcaaacgtcgaattgaggaaaaatattgcaaagtttagaggtcatttgtacaaagagcaggaggcctgacttcggtatgttatagctggttccagaattttacctaagacacctgactaaaggcacaatttttgatatagaagggtatctcggtctggatccattcgaactgagattggcacgtgattgttcgatgacgcatggaatatgcgtctagtggtttgtagaatgcgtagtttgatgtacatgtgttcgtaggtttgagcatgtagagtatggtatccctcgggaaaaaaaaggagtatggtattcatgtggttgaagactgctgagtattgtgaacatggtagtgtcttgtggggtgtggttcgcaggagacaagaggaggaggttgcagcactggtcgttcttgtaggtgtgcggcagataggattatgcgtactaactgaagaggcagctaggcaagaatcttaacacaaacaagaagaacaggatcgcccctccgactctaatcaatagagttcattacagataagcgacgcagtgcgatgaaatgtaccacctacattcacagacccagttgggcgtaccgttgaagcctcatgggccactcgcgcctgaacccagttgccactatagttttcttcttcggatttgtttgttttttcattctattttctattctattctgtgtgactttcttttctttgttgtttagggctcatttgataataattcagattggttcatatcaatgttctctaaaaaaacgttccagatgacgaatcggaattgcttaaccatttgactgtagaattagaatcacttggacccgtttctagcagaaatgtttc

SEQ ID NO: 51677 - DNA, 1302 bp, Zea Mays
cggcgcttccgcccaactcccgcctccctcctccgttcctcactttccaatttccgtctccaccctccgcggtccgcgccgcggaccgcggtcaccactcaccagcagcgctgcagcgccacgccgccactccagtcccccaccgaccacttgccgattgccgttgccgcgtcggcgttgctggatcctcaagcagaccgcccggacccgggaacccgcccgcgcgcttattaataacggccacctcgttcccccgcccgccccgaaggccgagggaagtgtacgcgcctagcgaccagcatagattcgttccacgcctacctcctgccctcgcccgtgctctcagatctcgcgcgcgccccgcaaagggtaactttgagccatgggcacagttgtggatgctccagcagttgtggctgaagaggtcactgagaacatgttgggtggtaagaaagttacagctgtatttgttctaggtggtcctggaagtggaaaaggcacacagtgtgccaacattgtggaacactttggattcacccatcttagtgctggagatcttttgcgtgcagagattaaatctggctctgagaatggaaccatgattgaaaacatgataaaggagggaaagattgttccatcagaggtgactataaagctgttgcaggaggcaatgataaaaaatgaaaatgacaaattcctgatcgacggatttccaaggaatgaggagaatcgtgcagcatttgagaatgttaccaaaatttctcctgcatttgtgctattctttgactgttctgagaaagagatggagaaacgtctcttggggcgcaatcagggaagagttgatgataacattgaaactatcaaaaaaaggttcaaaacctttgttgagtcaagtttgcctgtcattgagcattacaactcaagggacaaggttaaaaagattgatgctgcaaaaccaattcctgaggtgtttgaagacgtcaaaaccatttttgccccatatgctccaaagcatttgttggcgctcccattcccctccttcccgcttttgagtcctctgggctaggttcaatgaattttgcccacttccaatctaagaagggaaaacgatacagctcgtgggcccttcttcagcgacgccaaaaagaactgaacaaaactgaaatacattcatttgtatccataatcccaattctaaaaacaccaagacctcgttcgattataatttagatatacatatatgtactatttgtttttatgcaattgttatataccaacatgttattgaatatttgtgtgccg

SEQ ID NO: 51678 - DNA, 1330 bp, Zea Mays
ctccctcctccgttcctcactttccaatttccgtctccaccctccgcggtccgcgccgcggaccgcggtcaccactcaccagcagcgctgcagcgccacgccgccactccagtcccccaccgaccacttgccgattgccgttgccgcgtcggcgttgctggatcctcaagcagaccgcccggacccgggaacccgcccgcgcgcttattaataacggccacctcgttcccccgcccgccccgaaggccgagggaagtgtacgcgcctagcgaccagcatagattcgttccacgcctacctcctgccctcgcccgtgctctcagatctcgcgcgcgccccgcaaagtttggaattttgttgtacaaagatgcaataccaattgtaatcaaactgcagggtaactttgagccatgggcacagttgtggatgctccagcagttgtggctgaagaggtcactgagaacatgttgggtggtaagaaagttacagctgtatttgttctaggtggtcctggaagtggaaaaggcacacagtgtgccaacattgtggaacactttggattcacccatcttagtgctggagatcttttgcgtgcagagattaaatctggctctgagaatggaaccatgattgaaaacatgataaaggagggaaagattgttccatcagaggtgactataaagctgttgcaggaggcaatgataaaaaatgaaaatgacaaattcctgatcgacggatttccaaggaatgaggagaatcgtgcagcatttgagaatgttaccaaaatttctcctgcatttgtgctattctttgactgttctgagaaagagatggagaaacgtctcttggggcgcaatcagggaagagttgatgataacattgaaactatcaaaaaaaggttcaaaacctttgttgagtcaagtttgcctgtcattgagcattacaactcaagggacaaggttaaaaagattgatgctgcaaaaccaattcctgaggtgtttgaagacgtcaaaaccatttttgccccatatgctccaaagcatttgttggcgctcccattcccctccttcccgcttttgagtcctctgggctaggttcaatgaattttgcccacttccaatctaagaagggaaaacgatacagctcgtgggcccttcttcagcgacgccaaaaagaactgaacaaaactgaaatacattcatttgtatccataatcccaattctaaaaacaccaagacctcgttcgattataatttagatatacatatatgtactatttgtttttatgcaattgttatataccaacatgttattgaatatttgtgtgccg

SEQ ID NO: 51679 - DNA, 1571 bp, Zea Mays
ccgttcctcactttccaatttccgtctccaccctccgcggtccgcgccgcggaccgcggtcaccactcaccagcagcgctgcagcgccacgccgccactccagtcccccaccgaccacttgccgattgccgttgccgcgtcggcgttgctggatcctcaagcagaccgcccggacccgggaacccgcccgcgcgcttattaataacggccacctcgttcccccgcccgccccgaaggccgagggaagtgtacgcgcctagcgaccagcatagattcgttccacgcctacctcctgccctcgcccgtgctctcagatctcgcgcgcgccccgcaaagggtaactttgagccatgggcacagttgtggatgctccagcagttgtggctgaagaggtcactgagaacatgttgggtggtaagaaagttacagctgtatttgttctaggtggtcctggaagtggaaaaggcacacagtgtgccaacattgtggaacactttggattcacccatcttagtgctggagatcttttgcgtgcagagattaaatctggctctgagaatggaaccatgattgaaaacatgataaaggagggaaagattgttccatcagaggtgactataaagctgttgcaggaggcaatgataaaaaatgaaaatgacaaattcctgatcgacggatttccaaggaatgaggagaatcgtgcagcatttgagaatgttaccaaaatttctcctgcatttgtgctattctttgactgttctgagaaagagatggagaaacgtctcttggggcgcaatcagggaagagttgatgataacattgaaactatcaaaaaaaggttcaaaacctttgttgagtcaagtttgcctgtcattgagcattacaactcaagggacaaggttaaaaagattgatgctgcaaaaccaattcctgaggtgtttgaagacgtcaaaaccatttttgccccatatgctccaaaggctgaatagagcagtctaaaagggacatgataaaggtgtcataggcaacacacaaacatatatgtgattatgaacccttcaatatagaacagaagttttggctcatatgagctaccagcgcatcagtaggcaattcgatttgttatcagcaatatttagatctgattctcaggggtcctgctagagtaacattttaccactgttgtttatgtatatcctttgatgttgtgttgtaccaatgtggaatttactttagggctagtttggacatggaaatacaggggatccatcaggcctgaggcaggaatccccttgttatttataaattaataagaggattcctgcctcatggattctctccattttcctatccaccaaaccagcccttatagagcaatgagaccttgtgcgatcccatcagatttcttgtggcattatggaaagtataaaactgctgccatattctttatacgttgaaatatgttcattgcactgaacatttgttttgatgactttgtatgtatataataccctcccaacacttcatgagatccggattcacttaaaaaacaactctactccataaaaaag

SEQ ID NO: 51680 - DNA, 1280 bp, Zea Mays
ccgcggtccgcgccgcggaccgcggtcaccactcaccagcagcgctgcagcgccacgccgccactccagtcccccaccgaccacttgccgattgccgttgccgcgtcggcgttgctggatcctcaagcagaccgcccggacccgggaacccgcccgcgcgcttattaataacggccacctcgttcccccgcccgccccgaaggccgagggaagtgtacgcgcctagcgaccagcatagattcgttccacgcctacctcctgccctcgcccgtgctctcagatctcgcgcgcgccccgcaaagggtaactttgagccatgggcacagttgtggatgctccagcagttgtggctgaagaggtcactgagaacatgttgggtggtaagaaagttacagctgtatttgttctaggtggtcctggaagtggaaaaggcacacagtgtgccaacattgtggaacactttggattcacccatcttagtgctggagatcttttgcgtgcagagattaaatctggctctgagaatggaaccatgattgaaaacatgataaaggagggaaagattgttccatcagaggtgactataaagctgttgcaggaggcaatgataaaaaatgaaaatgacaaattcctgatcgacggatttccaaggaatgaggagaatcgtgcagcatttgagaatgttaccaaaatttctcctgcatttgtgctattctttgactgttctgagaaagagatggagaaacgtctcttggggcgcaatcagggaagagttgatgataacattgaaactatcaaaaaaaggttcaaaacctttgttgagtcaagtttgcctgtcattgagcattacaactcaagggacaaggttaaaaagattgatgctgcaaaaccaattcctgaggtgtttgaagacgtcaaaaccatttttgccccatatgctccaaaggctgaatagagcagtctaaaagggacatgataaaggtgtcatagcatttgttggcgctcccattcccctccttcccgcttttgagtcctctgggctaggttcaatgaattttgcccacttccaatctaagaagggaaaacgatacagctcgtgggcccttcttcagcgacgccaaaaagaactgaacaaaactgaaatacattcatttgtatccataatcccaattctaaaaacaccaagacctcgttcgattataatttagatatacatatatgtactatttgtttttatgcaattgttatataccaacatgttattgaatatttgtgtgccg

SEQ ID NO: 51681 - DNA, 1243 bp, Zea Mays
cgcagtttatggtgcgtatctgggtaactttgagccatgggcacagttgtggatgctccagcagttgtggctgaagaggtcactgagaacatgttgggtggtaagaaagttacagctgtatttgttctaggtggtcctggaagtggaaaaggcacacagtgtgccaacattgtggaacactttggattcacccatcttagtgctggagatcttttgcgtgcagagattaaatctggctctgagaatggaaccatgattgaaaacatgataaaggagggaaagattgttccatcagaggtgactataaagctgttgcaggaggcaatgataaaaaatgaaaatgacaaattcctgatcgacggatttccaaggaatgaggagaatcgtgcagcatttgagaatgttaccaaaatttctcctgcatttgtgctattctttgactgttctgagaaagagatggagaaacgtctcttggggcgcaatcagggaagagttgatgataacattgaaactatcaaaaaaaggttcaaaacctttgttgagtcaagtttgcctgtcattgagcattacaactcaagggacaaggttaaaaagattgatgctgcaaaaccaattcctgaggtgtttgaagacgtcaaaaccatttttgccccatatgctccaaaggctgaatagagcagtctaaaagggacatgataaaggtgtcataggcaacacacaaacatatatgtgattatgaacccttcaatatagaacagaagttttggctcatatgagctaccagcgcatcagtaggcaattcgatttgttatcagcaatatttagatctgattctcaggggtcctgctagagtaacattttaccactgttgtttatgtatatcctttgatgttgtgttgtaccaatgtggaatttactttagggctagtttggacatggaaatacaggggatccatcaggcctgaggcaggaatccccttgttatttataaattaataagaggattcctgcctcatggattctctccattttcctatccaccaaaccagcccttatagagcaatgagaccttgtgcgatcccatcagatttcttgtggcattatggaaagtataaaactgctgccatattctttatacgttgaaatatgttcattgcactgaacatttgttttgatgactttgtatgtatataataccctcccaacagtaagtatctaagcttagcaagcctcttgtagttgt

SEQ ID NO: 51682 - DNA, 2027 bp, Zea Mays
gccgttcctccctcacggtcacgggcggagagcgccgaagcggcgacgaaggcaggcagacgccgcggccgcggcccgagtttttaatacgaaaccgccaccaagctgcttgcttacggcctagtttcacctcccccattcccttggaattggatttgctcccgaatccggcgaggaagcgaccggcactccacgccacgccgcggcgcccaaggaagggaagcttggggccctaggcctcgtctccatccccgccgcagccggcgcgaggcggcgcggcacgagcacgacggtcaccatcagccaccgcgcgatcccgggggacggccaggccagattccacaacgttttactcttattaaactccccaacttcgtctaaggaagcaagtgatttcattatgaaagactggtctattttctccaaacttgatcacaatggaggttaccttcccaggttcccaatggactctccaatatctcatgatattgggttacgattggtatcgcaagtcggaaacttagttgagtgttcatttcaacatccaaggcatatatgtgctacggggagtggagctgttcaggaagcattcagctgtttcaacaagtttgctggagctttctatttctggttttctagagcatcgaatcctaagttattccaaaggctatcagcagctgcaggctcaagttcaagagcttgtcggtcacacataaagcaagtgacctcttgcttgcagcatttacctggactggagtttggttcacaattaagagaagatcatgctgtacaagtgcttttagcaaggcttgcaagcgcaacttttggacgcctgtggacagaggtggaggagcggcatgcctgcaacatccttatgctggctgctgctactgtaattccaccatttgaaaacatatgctggctgcgtcaatggcactaagaaaagatcgtggaaacatagagcctactgaacagtcttattcagaggaaaaccgtccaggttgtgcgtgtgttgctgtgccaagagtactcttaccagaagatgcaacggaaccaacaactggcatcaagttccccactgtactcgaagacaattccaatctgactacagaggtccttgttggaatgggttttagaagcatgcgaataatgagggtcaaaaatctgaatctttatgcctttggattatatatacaacctgattctgtctgcaagaagctgggtccaaagtacgcttatattccagatgctgagttaaaggatcacccagatttctatgaagatcttctgagggaaaatattgatatgactgttaggctagtagtaagctacaatggtctcagcattggcacagttcgagatgcatttgagaagtctcttggcttccggttgcaaaagatgaatcctaatactgattatggttgcttgaagacttttggttcttgttttagtgaagacattcgtatacctgctggtacaaagattgacttccggcaaacatctgatggccagctaataactgaaattgatggcaaacaaattggcactgtccagagcaaagatctttgcagagccttcttcgatatgtatattggtgaccccccagtttcagtggagactaaacaagacattgcgcaaaatgtggctggactcataagaagatgctagggaaacgggaaaactaaatcgaagaacctggaattatttcattcatctatacaaggagaggacatataaacagaaaggaagccaggagaggatcgattgtatttatagtggtagactgtctttgtaagctataaacataaagcatatgcttggcaaaggcctccatgcctttcatatggtttggcatctttgccatttcctggctggctggcgtgctgtatcatgtcgacaaatatatgatacagtaaaaagttgtacaacaagagcatgtttctgtgccccaagtgaaaaatgacggggttcagctttgttcatacagatgattgatggttctcccttttgttttacttatctgccga

SEQ ID NO: 51683 - DNA, 1991 bp, Zea Mays
gttcctccctcacggtcacgggcggagagcgccgaagcggcgacgaaggcaggcagacgccgcggccgcggcccgagtttttaatacgaaaccgccaccaagctgcttgcttacggcctagtttcacctcccccattcccttggaattggatttgctcccgaatccggcgaggaagcgaccggcactccacgccacgccgcggcgcccaaggaagggaagcttggggccctaggcctcgtctccatccccgccgcagccggcgcgaggcggcgcggcacgagcacgacggtcaccatcagccaccgcgcgatcccgggggacggccaggccagattccacaacgttttactcttattaaactccccaacttcgtctaaggaagcaagtgatttcattatgaaagactggtctattttctccaaacttgatcacaatggaggttaccttcccaggttcccaatggactctccaatatctcatgatattgggttacgattggtatcgcaagtcggaaacttagttgagtgttcatttcaacatccaaggcatatatgtgctacggggagtggagctgttcaggaagcattcagctgtttcaacaagtttgctggagctttctatttctggttttctagagcatcgaatcctaagttattccaaaggctatcagcagctgcaggctcaagttcaagagcttgtcggtcacacataaagcaagtgacctcttgcttgcagcatttacctggactggagtttggttcacaattaagagaagatcatgctgtacaagtgcttttagcaaggcttgcaagcgcaacttttggacgcctgtggacagaggtggaggagcggcatgcctgcaacatccttatgctggctgctgctactgtaattccaccatttgaaaacatatgctggctgcgtcaatggcactaagaaaagatcgtggaaacatagagcctactgaacagtcttattcagaggaaaaccgtccaggttgtgcgtgtgttgctgtgccaagagtactcttaccagaagatgcaacggaaccaacaactggcatcaagttccccactgtactcgaagacaattccaatctgactacagaggtccttgttggaatgggttttagaagcatgcgaataatgagggtcaaaaatctgaatctttatgcctttggattatatatacaacctgattctgtctgcaagaagctgggtccaaagtacgcttatattccagatgctgagttaaaggatcacccagatttctatgaagatcttctgagggaaaatattgatatgactgttaggctagtagtaagctacaatggtctcagcattggcacagttcgagatgcatttgagaagtctcttggcttccggttgcaaaagacttttggttcttgttttagtgaagacattcgtatacctgctggtacaaagattgacttccggcaaacatctgatggccagctaataactgaaattgatggcaaacaaattggcactgtccagagcaaagatctttgcagagccttcttcgatatgtatattggtgaccccccagtttcagtggagactaaacaagacattgcgcaaaatgtggctggactcataagaagatgctagggaaacgggaaaactaaatcgaagaacctggaattatttcattcatctatacaaggagaggacatataaacagaaaggaagccaggagaggatcgattgtatttatagtggtagactgtctttgtaagctataaacataaagcatatgcttggcaaaggcctccatgcctttcatatggtttggcatctttgccatttcctggctggctggcgtgctgtatcatgtcgacaaatatatgatacagtaaaaagttgtacaacaagagcatgtttctgtgccccaagtgaaaaatgacggggttcagctttgttcatacagatgattgatggttctcccttttgttttacttatctgccga

SEQ ID NO: 51684 - DNA, 2008 bp, Zea Mays
gttcctccctcacggtcacgggcggagagcgccgaagcggcgacgaaggcaggcagacgccgcggccgcggcccgagtttttaatacgaaaccgccaccaagctgcttgcttacggcctagtttcacctcccccattcccttggaattggatttgctcccgaatccggcgaggaagcgaccggcactccacgccacgccgcggcgcccaaggaagggaagcttggggccctaggcctcgtctccatccccgccgcagccggcgcgaggcggcgcggcacgagcacgacggtcaccatcagccaccgcgcgatcccgggggacggccaggccagattccacaacgttttactcttattaaactccccaacttcgtctaaggaagcaagtgatttcattatgaaagactggtctattttctccaaacttgatcacaatggaggttaccttcccaggttcccaatggactctccaatatctcatgatattgggttacgattggtatcgcaagtcggaaacttagttgagtgttcatttcaacatccaaggcatatatgtgctacggggagtggagctgttcaggaagcattcagctgtttcaacaagtttgctggagctttctatttctggttttctagagcatcgaatcctaagttattccaaaggctatcagcagctgcaggctcaagttcaagagcttgtcggtcacacataaagcaagtgacctcttgcttgcagcatttacctggactggagtttggttcacaattaagagaagatcatgctgtacaagtgcttttagcaaggcttgcaagcgcaacttttggacgcctgtggacagaggtggaggagcggcatgcctgcaacatccttatgctggctgctgctactgtaattccaccatttgaaaacatatcaccaaagatgctggctgcgtcaatggcactaagaaaagatcgtggaaacatagagcctactgaacagtcttattcagaggaaaaccgtccaggttgtgcgtgtgttgctgtgccaagagtactcttaccagaagatgcaacggaaccaacaactggcatcaagttccccactgtactcgaagacaattccaatctgactacagaggtccttgttggaatgggttttagaagcatgcgaataatgagggtcaaaaatctgaatctttatgcctttggattataagctgggtccaaagtacgcttatattccagatgctgagttaaaggatcacccagatttctatgaagatcttctgagggaaaatattgatatgactgttaggctagtagtaagctacaatggtctcagcattggcacagttcgagatgcatttgagaagtctcttggcttccggttgcaaaagatgaatcctaatactgattatggttgcttgaagacttttggttcttgttttagtgaagacattcgtatacctgctggtacaaagattgacttccggcaaacatctgatggccagctaataactgaaattgatggcaaacaaattggcactgtccagagcaaagatctttgcagagccttcttcgatatgtatattggtgaccccccagtttcagtggagactaaacaagacattgcgcaaaatgtggctggactcataagaagatgctagggaaacgggaaaactaaatcgaagaacctggaattatttcattcatctatacaaggagaggacatataaacagaaaggaagccaggagaggatcgattgtatttatagtggtagactgtctttgtaagctataaacataaagcatatgcttggcaaaggcctccatgcctttcatatggtttggcatctttgccatttcctggctggctggcgtgctgtatcatgtcgacaaatatatgatacagtaaaaagttgtacaacaagagcatgtttctgtgccccaagtgaaaaatgacggggttcagctttgttcatacagatgattgatggttctcccttttgttttacttatctgccga

SEQ ID NO: 51685 - DNA, 1070 bp, Zea Mays
atctcttgtacttggcgttcaatttcagtcttcagagctggtgcatatctgtaaggcctcctattaaatggttgagcaccgggcaagagagacatcagatgatcacaatctcggactggaggaaggcctgcaggaagtgcaaatacagaatggaatcggctgactagtgcttgtaattcagctggaaaggggtatgcaagttctataatggaaagtctggatctcttgcaaagcttcaaggtgccgtagtaccttctccgctgaaaaagcttccgaagcaagaaagaccatcccctaggaagcgcaaaggtcttcttccattcagtctcaaatggggcaaaccacagaataaagaggtattccccgaagatgatgcgattggcagccccacaaactgcgtaaggatggctatatcgcctgctgccacaagcagctcaggaagcaacagtggtagcgacgatgaacataaccgctgccagaagccatcttcccgtcgtccgcacagaaggcccagcagtgtcatgggtgtttttgcttctccgcctgcacctcgtccaccccagcagttctcagctgtcatgagatctcaatcaatgcttgatctgcaggatgcgacagattcaactgacctggtcactcccagggacaagcgcataaagaattagcaaaagttgaatagtatcaggaacaagggcatgaagaactaggtagatctgatgtaacctgaaccttggtgtcagcccaaacaccggtgtccattttagacagcgaaacccaatggctgatgtctgcatgcttagcgacaccgaatgaactcgagttcatatagctgggattctccttatacccgatgtaccgagaattgagaaagatacagatgaattaggcaaattggtgtaaggagtcagtggctattgcattggttactatttgacttgtaaatgctggattctgcttctctttgcctaattcaaccatgttgctcgtattgacctttgctttgctcgtcgttctgaattaggcaaaatttgttgtctgtattatattctattgacatgtatttatttatc

SEQ ID NO: 51686 - DNA, 1100 bp, Zea Mays
gtttgtttctctccccctctctccttaactactgctactgccactcatgggcttacatggaccatttgtccgatggaaaaagagaattgggcctacggactcggcgacccaattccttgtcctgtccgtccggtagcgcacctgtgccagccttcgcctgtgtcccgtttggcacgctgacaagtttgctcccttaactgcctggcatcaacaggaaaggggtatgcaagttctataatggaaagtctggatctcttgcaaagcttcaaggtgccgtagtaccttctccgctgaaaaagcttccgaagcaagaaagaccatcccctaggaagcgcaaaggtcttcttccattcagtctcaaatggggcaaaccacagaataaagaggtattccccgaagatgatgcgattggcagccccacaaactgcgtaaggatggctatatcgcctgctgccacaagcagctcaggaagcaacagtggtagcgacgatgaacataaccgctgccagaagccatcttcccgtcgtccgcacagaaggcccagcagtgtcatgggtgtttttgcttctccgcctgcacctcgtccaccccagcagttctcagctgtcatgagatctcaatcaatgcttgatctgcaggatgcgacagattcaactgacctggtcactcccagggacaagcgcataaagaattagcaaaagttgaatagtatcaggaacaagggcatgaagaactaggtagatctgatgtaacctgaaccttggtgtcagcccaaacaccggtgtccattttagacagcgaaacccaatggctgatgtctgcatgcttagcgacaccgaatgaactcgagttcatatagctgggattctccttatacccgatgtaccgagaattgagaaagatacagatgaattaggcaaattggtgtaaggagtcagtggctattgcattggttactatttgacttgtaaatgctggattctgcttctctttgcctaattcaaccatgttgctcgtattgacctttgctttgctcgtcgttctgaattaggcaaaatttgttgtctgtattatattctattgacatgtatttatttatc

SEQ ID NO: 51687 - DNA, 2537 bp, Zea Mays
cagcagcacacccaccgcggctccagaggcggaccccatcggcaaccggctctgtccggaaagcccccaagcgcaaccgcttcttcccggaaagggcaaaaaggaaacgcgcctcgtccggtcggacggaagcccttcttcccctccccatccgccgccactgccccgcgagattcggcgagaattaaaggcaccatatcctgcctcctctctcgtctccctatttctctctcactccccacctcccgcgcattccgcaccgataggtaggctcacccggactcgtctcccgctcccccctcccttttcccaaaaccctagcgggtttcgacctcccaggccaatcagatcgaccgctgccgcgcgcaattgttgagccatcgaggtttgacttcatactgccctgccccaaaggatcaagatcgcatcaccagtggaagcctcgggggctgctaagtaacgttatctgactggctgactgcgccattgataaccttgggttacaactgcacaggaggctgcgacccacaggccatccggggctcattgcagctgacgaagcccctgcagactactccccgacaatatggcgacagcgacaatggcaaccgccgcgggggccgcggcactgctttactacacactgaaccgccgcctgcagacagagaggctgaataaggaaggggagtgcagcgatagcagggatgtgacacccagggccgcacagggttctcccagcaggagccgtgtatcgcggagggacgtccgcgcccctgccacctggcttgagactatctcgacgctgtcagagacgctgcggttcacgtattcagagacccttgggaagtggccgatcggcgaccttgccttcgggatcagtttcctcctcaagagacagggaaacttatctgtagcaagcatatacgctggaaatgatagtgtggagctcaaaggagctgaagtaattgctgatttaaagtatcttctcaatttgctgacactttgctggcatttctccaaaaagccattcccgttgtttttggaggcgactggctacactacggaggatgttcttatgcaagaacctaaagcaggaattttgaagccagctttcaccattttgcttgatagagacaaaaagtctatacttctattaattaggggaactcatatactaggatatgctcattttgggatggttgccgctgctaggtggattgcaaagctctcagggccttgtctggcacaagcattgcagatgtacccagacttcaaaataaaggttgttggacattcactgggaggtggtacagctgctctgttgacatacgttctgagggaacagaaggagtttgcctctactacttgtctggcatttgctccagctgcatgtatgacatggaaactggcagagtcaggagtgcattttatcactacagtcatcaatggagctgatctggttccaacattttctgctgcgtcagtagatgatcttcgttcagaggttacagcgtcagcttggctaaatgatctccgccaccaaattgaacaaaccagaatcctaagcactttttatcgttctgcgtcagccttgggatcccggcttccatctatggcaaatgctaaagcaagagtagctggtgctggcgccatcttaagacctgtatctactgggacgcaggttgtaatgaggagagctcgcagtgtagcacaggcagcatggacaagaccagcactgcaactgtcctcatggacttgtattgggccaagacggcgaaataatatatctacctcaactgtcacatcagaggaaataatagcatctacaggcggtggatctgaatccacttcattgttgactgaaaccactgcggaaaccacagagacagttacatcagaagctgtatcagaagtggttcagagttctgtttctgtggcggtcgatgctgttgacttggtagatgacaagggagatagcgatgatgacatcgtcgatcaccatggggacgaggacaggatgactgatgtggagctgtggcagcaacttgaaagtgagttgtaccggaagagggagggagaagaggatgacatagccgaagagatggctgaaagtacaattgctgaggaggtgggtggcgtggctgaagatgtgctcagcgagacaaaggaagtgcataggttctaccctcctggaaaaatcatgcacatattattctccagcagggaagaagcagatcgtggagaggagcctgaggatgatgttacggatggggaggcacaaagcagcatagggatcttcttgacgccaagatctctgtacggcaagctgaggctttcgaaaatgatgatcaatgaccattacatgcctatatacagaagaaacattgagcagctgatcgcggagcttgagaaggattcctcggatcaaatagggtgcgtcaggtgtagttgaccgttgtaagagctgatcaaatagggtgttataggtccgacatgtgtatatacttgcttaagtttaccgcttcccttctggctgt

SEQ ID NO: 51688 - DNA, 2005 bp, Zea Mays
gctccagaggcggaccccatcggcaaccggctctgtccggaaagcccccaagcgcaaccgcttcttcccggaaagggcaaaaaggaaacgcgcctcgtccggtcggacggaagcccttcttcccctccccatccgccgccactgccccgcgagattcggcgagaattaaaggcaccatatcctgcctcctctctcgtctccctatttctctctcactccccacctcccgcgcattccgcaccgataggtaggctcacccggactcgtctcccgctcccccctcccttttcccaaaaccctagcgggtttcgacctcccaggccaatcagatcgaccgctgccgcgcgcaattgttgagccatcgagggaaacttatctgtagcaagcatatacgctggaaatgatagtgtggagctcaaaggagctgaagtaattgctgatttaaagtatcttctcaatttgctgacactttgctggcatttctccaaaaagccattcccgttgtttttggaggcgactggctacactacggaggatgttcttatgcaagaacctaaagcaggaattttgaagccagctttcaccattttgcttgatagagacaaaaagtctatacttctattaattaggggaactcatatactaggatatgctcattttgggatggttgccgctgctaggtggattgcaaagctctcagggccttgtctggcacaagcattgcagatgtacccagacttcaaaataaaggttgttggacattcactgggaggtggtacagctgctctgttgacatacgttctgagggaacagaaggagtttgcctctactacttgtctggcatttgctccagctgcatgtatgacatggaaactggcagagtcaggagtgcattttatcactacagtcatcaatggagctgatctggttccaacattttctgctgcgtcagtagatgatcttcgttcagaggttacagcgtcagcttggctaaatgatctccgccaccaaattgaacaaaccagaatcctaagcactttttatcgttctgcgtcagccttgggatcccggcttccatctatggcaaatgctaaagcaagagtagctggtgctggcgccatcttaagacctgtatctactgggacgcaggttgtaatgaggagagctcgcagtgtagcacaggcagcatggacaagaccagcactgcaactgtcctcatggacttgtattgggccaagacggcgaaataatatatctacctcaactgtcacatcagaggaaataatagcatctacaggcggtggatctgaatccacttcattgttgactgaaaccactgcggaaaccacagagacagttacatcagaagctgtatcagaagtggttcagagttctgtttctgtggcggtcgatgctgttgacttggtagatgacaagggagatagcgatgatgacatcgtcgatcaccatggggacgaggacaggatgactgatgtggagctgtggcagcaacttgaaagtgagttgtaccggaagagggagggagaagaggatgacatagccgaagagatggctgaaagtacaattgctgaggaggtgggtggcgtggctgaagatgtgctcagcgagacaaaggaagtgcataggttctaccctcctggaaaaatcatgcacatattattctccagcagggaagaagcagatcgtggagaggagcctgaggatgatgttacggatggggaggcacaaagcagcatagggatcttcttgacgccaagatctctgtacggcaagctgaggctttcgaaaatgatgatcaatgaccattacatgcctatatacagaagaaacattgagcagctgatcgcggagcttgagaaggattcctcggatcaaatagggtgcgtcaggtgtagttgaccgttgtaagagctgatcaaatagggtgttataggtccgacatgtgtatatacttgcttaagtttaccgcttcccttctggctgt

SEQ ID NO: 51689 - DNA, 2335 bp, Zea Mays
caaccgcttcttcccggaaagggcaaaaaggaaacgcgcctcgtccggtcggacggaagcccttcttcccctccccatccgccgccactgccccgcgagattcggcgagaattaaaggcaccatatcctgcctcctctctcgtctccctatttctctctcactccccacctcccgcgcattccgcaccgataggtaggctcacccggactcgtctcccgctcccccctcccttttcccaaaaccctagcgggtttcgacctcccaggccaatcagatcgaccgctgccgcgcgcaattgttgagccatcgaggaggctgcgacccacaggccatccggggctcattgcagctgacgaagcccctgcagactactccccgacaatatggcgacagcgacaatggcaaccgccgcgggggccgcggcactgctttactacacactgaaccgccgcctgcagacagagaggctgaataaggaaggggagtgcagcgatagcagggatgtgacacccagggccgcacagggttctcccagcaggagccgtgtatcgcggagggacgtccgcgcccctgccacctggcttgagactatctcgacgctgtcagagacgctgcggttcacgtattcagagacccttgggaagtggccgatcggcgaccttgccttcgggatcagtttcctcctcaagagacagggaaacttatctgtagcaagcatatacgctggaaatgatagtgtggagctcaaaggagctgaagtaattgctgatttaaagtatcttctcaatttgctgacactttgctggcatttctccaaaaagccattcccgttgtttttggaggcgactggctacactacggaggatgttcttatgcaagaacctaaagcaggaattttgaagccagctttcaccattttgcttgatagagacaaaaagtctatacttctattaattaggggaactcatatactaggatatgctcattttgggatggttgccgctgctaggtggattgcaaagctctcagggccttgtctggcacaagcattgcagatgtacccagacttcaaaataaaggttgttggacattcactgggaggtggtacagctgctctgttgacatacgttctgagggaacagaaggagtttgcctctactacttgtctggcatttgctccagctgcatgtatgacatggaaactggcagagtcaggagtgcattttatcactacagtcatcaatggagctgatctggttccaacattttctgctgcgtcagtagatgatcttcgttcagaggttacagcgtcagcttggctaaatgatctccgccaccaaattgaacaaaccagaatcctaagcactttttatcgttctgcgtcagccttgggatcccggcttccatctatggcaaatgctaaagcaagagtagctggtgctggcgccatcttaagacctgtatctactgggacgcaggttgtaatgaggagagctcgcagtgtagcacaggcagcatggacaagaccagcactgcaactgtcctcatggacttgtattgggccaagacggcgaaataatatatctacctcaactgtcacatcagaggaaataatagcatctacaggcggtggatctgaatccacttcattgttgactgaaaccactgcggaaaccacagagacagttacatcagaagctgtatcagaagtggttcagagttctgtttctgtggcggtcgatgctgttgacttggtagatgacaagggagatagcgatgatgacatcgtcgatcaccatggggacgaggacaggatgactgatgtggagctgtggcagcaacttgaaagtgagttgtaccggaagagggagggagaagaggatgacatagccgaagagatggctgaaagtacaattgctgaggaggtgggtggcgtggctgaagatgtgctcagcgagacaaaggaagtgcataggttctaccctcctggaaaaatcatgcacatattattctccagcagggaagaagcagatcgtggagaggagcctgaggatgatgttacggatggggaggcacaaagcagcatagggatcttcttgacgccaagatctctgtacggcaagctgaggctttcgaaaatgatgatcaatgaccattacatgcctatatacagaagaaacattgagcagctgatcgcggagcttgagaaggattcctcggatcaaatagggtgcgtcaggtgtagttgaccgttgtaagagctgatcaaatagggtgttataggtccgacatgtgtatatacttgcttaagtttaccgcttcccttctggctgt

SEQ ID NO: 51690 - DNA, 3230 bp, Zea Mays
ggaggcagtcgtctcactgggactggacctctgcctgttagtttagtttcctcgtcgcgctgggccgccggcttccgccgttccgcggcggagggaagccatgggcgccgccgtcgcagggtggaccgtggcggcagtgctgcttcaggtcgccggcctctccctcttcctctacggattcttccccgtgaagcccacactgcgtggcttcagtggagcggagagctaccgggtgccttcctgcggttccgttagtgctggggagcaggagccggcgcttcccccggatcagctcagatctctgtacagggaactctctgggatccctcctgtgtacgatcgcttagtgttgatgtttatgaatgtcaatttaggtgattgatggactacctgctgaatttgtacttgggagaggcaggaaacctccaagcaaaaaaatgatggagtctatgccatacactcaatctttgttagctggctgcaaagcagcaggttaccatgccaaggctgcacctcccaccgtcacaatgcctcgactaaaagctatggtgtctggtgcaattggaggttttctagatgtagcatttaatttcaatactcaagccttcttagaggacaatcttcttgatcagcttcatatgattggtttgaagttagtgatgctgggagatgagacatggatcaaattgttcccaaccctattcactagacaagatggagtgagcagtttttatgtgaaagatacagttgaggttgatttcaacgtttcacgccacttagaatttgagcttgctgcaaaagactggagtgtcttggttcttcactatctaggcttagatcatgttggtcatataggtggccgccggagtgttttgatgacccaaaagatgaaggagatggatgatgtcattagacgggtgcatgctgcgagtcttcaggataatctggacagaacacttttggttgtggttagcgatcatggcatgactgatgggggtaatcatggaggatcttcatatgaagaaactgattcacttgccttttttataggacacagcgttgagagcccatattgttcaccctatgaccagaatgaagcacttcaagtggatcttgccccaactcttgctcttctatttggtgtaccaattccgaagaatagttttggtgtcgtgcttccaaagcttttaaattcgttgacagatgaccagaaactaaggatgttagagcttaactcatggcaaatcttaagattgctgcaagcacaagtgtctgctttctgccttgaagattgtattaatgtggagagcagtattgaacttgacatccttcctgaatctattgagcaaaagttatgttttttactttctaaagccatttcttctcatcagtcttcacgtcttcatcgaggttctgatttcaagtctgttgaagccgggtactatgggactgctgcagataactaccacaccttcttaagaaatgcgaaaaccattatatttacttgtctctgcaatcatgttgatgacaatgtcatgccttttcctcatgggtactgtgtcttacctatttaagggacgatctctgagtcaagctgatcaccattcagagtcatatttggatcaacgctggcaccttgatgaggttctcgttcttgctgggatgtttctctatgtcatcagtcttggctcaagttcttttgtggaagaagagcagtatacatggcacttcctcacttctactctgtatctaatatttctggccaaggcagttcagtcaatgctaaaaggatcaaatccaacacttggtcataaagcagaaggaaatagctttgacagaagtagctttttctatgctacaagctatgaattaacaccaggcaagagaaatggttacaagttatgtactatccttgttgttcttgttgctggaagagttataagagcttggcatcaaggtggaatcaactgggttcactttcctgatatttccaagttactggcgcaagctgacccttctgttgtaaagtctcttcagattatctcagttcttgcagttgtggtattgttttcaatttcactcactttactcagagcaagaccagagtttgttataggagtatggttgacccacatttcttgtggatttttggtcctactgcatgtttggggaaatcatattggtacttcattaccaattaaccataccacagcatcggtagctcgacaattttatgtcattgctagtgtttcagtatctgtcactgttcttgcttcaccttgggtatttccaatattttctagggaagcaaaatcaccgtcctctggttctagtcctgtaaaggcaatacatggcatcagaaaatcacttgttctcactggaatgacatacacagcgttctggggccttctgcaattgcttcttcaacaaccaatcaatgcaattcctcttttcctcattttattgcaaacagtctcgagtgcagttcatttttctctggacaaaacattacataaacaatgggtacaggttgtggcaatgcatttcttgggaatggctggtcacttcggtcttgggaatacaaatagccttgccagcattgatgttgcgggagctttcattggcatttcaagttactccacagttctttctggtatactgatgtttatgataacatatgcatcacctctcatgttataccttgggttggtccttcatgcatcggtgaaagatgtcgatgatgcctccaatctacggcagctgaaatggagctatattctagacaaaattgtcacattgccatcaacagtgtgcacatatgtcggagtatccatcatagctatgactgcattatacagttgtgctgttttcaagttcagggcgagaagctacagggataaatccctgtaatcagactaatgattagctgttctgatttaatggacatttgtaagaattcagaaagggagggtatcttggcctattctctcgttgtacaacaacatcgtactcacatgtttccagaccaccatgcaatccctgcaagggtctatacacatttctcgttctctttgctaatcgtattggattaagtttgtcctggacacatgacgtaagcacgttcaagatgaacagggggtatggagtacattgtagcctgagtcctgtttcgattgagagatccatgttaaccatttccgcatatggatctgggcattaagccctaaata

SEQ ID NO: 51691 - DNA, 3362 bp, Zea Mays
ggaggcagtcgtctcactgggactggacctctgcctgttagtttagtttcctcgtcgcgctgggccgccggcttccgccgttccgcggcggagggaagccatgggcgccgccgtcgcagggtggaccgtggcggcagtgctgcttcaggtcgccggcctctccctcttcctctacggattcttccccgtgaagcccacactgcgtggcttcagtggagcggagagctaccgggtgccttcctgcggttccgttagtgctggggagcaggagccggcgcttcccccggatcagctcagatctctgtacagggaactctctgggatccctcctgtgtacgatcgcttagtgttgatggtgattgatggactacctgctgaatttgtacttgggagaggcaggaaacctccaagcaaaaaaatgatggagtctatgccatacactcaatctttgttagctggctgcaaagcagcaggttaccatgccaaggctgcacctcccaccgtcacaatgcctcgactaaaagctatggtgtctggtgcaattggaggttttctagatgtagcatttaatttcaatactcaagccttcttagaggacaatcttcttgatcagcttcatatgattggtttgaagttagtgatgctgggagatgagacatggatcaaattgttcccaaccctattcactagacaagatggagtgagcagtttttatgtgaaagatacagttgaggttgatttcaacgtttcacgccacttagaatttgagcttgctgcaaaagactggagtgtcttggttcttcactatctaggcttagatcatgttggtcatataggtggccgccggagtgttttgatgacccaaaagatgaaggagatggatgatgtcattagacgggtgcatgctgcgagtcttcaggataatctggacagaacacttttggttgtggttagcgatcatggcatgactgatgggggtaatcatggaggatcttcatatgaagaaactgattcacttgccttttttataggacacagcgttgagagcccatattgttcaccctatgaccagaatgaagcacttcaagtggatcttgccccaactcttgctcttctatttggtgtaccaattccgaagaatagttttggtgtcgtgcttccaaagcttttaaattcgttgacagatgaccagaaactaaggatgttagagcttaactcatggcaaatcttaagattgctgcaagcacaagtgtctgctttctgccttgaagattgtattaatgtggagagcagtattgaacttgacatccttcctgaatctattgagcaaaagttatgttttttactttctaaagccatttcttctcatcagtcttcacgtcttcatcgaggttctgatttcaagtctgttgaagccgggtactatgggactgctgcagataactaccacaccttcttaagaaatgcgagtgagtggttgtctcacagagcaaccgataaccattatatttacttgtctctgcaatcatgttgatgacaatgtcatgccttttcctcatgggtactgtgtcttacctatttaagggacgatctctgagtcaagctgatcaccattcagagtcatatttggatcaacgctggcaccttgatgaggttctcgttcttgctgggatgtttctctatgtcatcagtcttggctcaagttcttttgtggaagaagagcagtatacatggcacttcctcacttctactctgtatctaatatttctggccaaggcagttcagtcaatgctaaaaggatcaaatccaacacttggtcataaagcagaaggaaatagctttgacagaagtagctttttctatgctacaagctatgaattaacaccaggcaagagaaatggttacaagttatgtactatccttgttgttcttgttgctggaagagttataagagcttggcatcaaggtggaatcaactgggttcactttcctgatatttccaagttactggcgcaagctgacccttctgttgtaaagtctcttcagattatctcagttcttgcagttgtggtattgttttcaatttcactcactttactcagagcaagaccagagtttgttataggagtatggttgacccacatttcttgtggatttttggtcctactgcatgtttggggaaatcatattggtacttcattaccaattaaccataccacagcatcggtagctcgacaattttatgtcattgctagtgtttcagtatctgtcactgttcttgcttcaccttgggtatttccaatattttctagggaagcaaaatcaccgtcctctggttctagtcctgtaaaggcaatacatggcatcagaaaatcacttgttctcactggaatgacatacacagcgttctggggccttctgcaattgcttcttcaacaaccaatcaatgcaattcctcttttcctcattttattgcaaacagtctcgagtgcagttcatttttctctggacaaaacattacataaacaatgggtacaggttgtggcaatgcatttcttgggaatggctggtcacttcggtcttgggaatacaaatagccttgccagcattgatgttgcgggagctttcattggcatttcaagttactccacagttctttctggtatactgatgtttatgataacatatgcatcacctctcatgttataccttgggttggtccttcatgcatcggtgaaagatgtcgatgatgcctccaatctacggcagctgaaatggagctatattctagacaaaattgtcacattgccatgtttgtttcctttgctcatcaattctcttgcgttgacttcatacaccattgttttgctagccatgaggaatcacttatttgtttggagcgtattctcaccaaagtacctctatgcctgcgcagcaacagtgtgcacatatgtcggagtatccatcatagctatgactgcattatacagttgtgctgttttcaagttcagggcgagaagctacagggataaatccctgtaatcagactaatgattagctgttctgatttaatggacatttgtaagaattcagaaagggagggtatcttggcctattctctcgttgtacaacaacatcgtactcacatgtttccagaccaccatgcaatccctgcaagggtctatacacatttctcgttctctttgctaatcgtattggattaagtttgtcctggacacatgacgtaagcacgttcaagatgaacagggggtatggagtacattgtagcctgagtcctgtttcgattgagagatccatgttaaccatttccgcatatggatctgggcattaagccctaaata

SEQ ID NO: 51692 - DNA, 3187 bp, Zea Mays
ggaggcagtcgtctcactgggactggacctctgcctgttagtttagtttcctcgtcgcgctgggccgccggcttccgccgttccgcggcggagggaagccatgggcgccgccgtcgcagggtggaccgtggcggcagtgctgcttcaggtcgccggcctctccctcttcctctacggattcttccccgtgaagcccacactgcgtggcttcagtggagcggagagctaccgggtgccttcctgcggttccgttagtgctggggagcaggagccggcgcttcccccggatcagctcagatctctgtacagggaactctctgggatccctcctgtgtacgatcgcttagtgttgatggtgattgatggactacctgctgaatttgtacttgggagaggcaggaaacctccaagcaaaaaaatgatggagtctatgccatacactcaatctttgttagctggctgcaaagcagcaggttaccatgccaaggctgcacctcccaccgtcacaatgcctcgactaaaagctatggtgtctggtgcaattggaggttttctagatgtagcatttaatttcaatactcaagccttcttagaggacaatcttcttgatcagcttcatatgattggtttgaagttagtgatgctgggagatgagacatggatcaaattgttcccaaccctattcactagacaagatggagtgagcagtttttatgtgaaagatacagttgaggttgatttcaacgtttcacgccacttagaatttgagcttgctgcaaaagactggagtgtcttggttgtggttagcgatcatggcatgactgatgggggtaatcatggaggatcttcatatgaagaaactgattcacttgccttttttataggacacagcgttgagagcccatattgttcaccctatgaccagaatgaagcacttcaagtggatcttgccccaactcttgctcttctatttggtgtaccaattccgaagaatagttttggtgtcgtgcttccaaagcttttaaattcgttgacagatgaccagaaactaaggatgttagagcttaactcatggcaaatcttaagattgctgcaagcacaagtgtctgctttctgccttgaagattgtattaatgtggagagcagtattgaacttgacatccttcctgaatctattgagcaaaagttatgttttttactttctaaagccatttcttctcatcagtcttcacgtcttcatcgaggttctgatttcaagtctgttgaagccgggtactatgggactgctgcagataactaccacaccttcttaagaaatgcgaaaaccattatatttacttgtctctgcaatcatgttgatgacaatgtcatgccttttcctcatgggtactgtgtcttacctatttaagggacgatctctgagtcaagctgatcaccattcagagtcatatttggatcaacgctggcaccttgatgaggttctcgttcttgctgggatgtttctctatgtcatcagtcttggctcaagttcttttgtggaagaagagcagtatacatggcacttcctcacttctactctgtatctaatatttctggccaaggcagttcagtcaatgctaaaaggatcaaatccaacacttggtcataaagcagaaggaaatagctttgacagaagtagctttttctatgctacaagctatgaattaacaccaggcaagagaaatggttacaagttatgtactatccttgttgttcttgttgctggaagagttataagagcttggcatcaaggtggaatcaactgggttcactttcctgatatttccaagttactggcgcaagctgacccttctgttgtaaagtctcttcagattatctcagttcttgcagttgtggtattgttttcaatttcactcactttactcagagcaagaccagagtttgttataggagtatggttgacccacatttcttgtggatttttggtcctactgcatgtttggggaaatcatattggtacttcattaccaattaaccataccacagcatcggtagctcgacaattttatgtcattgctagtgtttcagtatctgtcactgttcttgcttcaccttgggtatttccaatattttctagggaagcaaaatcaccgtcctctggttctagtcctgtaaaggcaatacatggcatcagaaaatcacttgttctcactggaatgacatacacagcgttctggggccttctgcaattgcttcttcaacaaccaatcaatgcaattcctcttttcctcattttattgcaaacagtctcgagtgcagttcatttttctctggacaaaacattacataaacaatgggtacaggttgtggcaatgcatttcttgggaatggctggtcacttcggtcttgggaatacaaatagccttgccagcattgatgttgcgggagctttcattggcatttcaagttactccacagttctttctggtatactgatgtttatgataacatatgcatcacctctcatgttataccttgggttggtccttcatgcatcggtgaaagatgtcgatgatgcctccaatctacggcagctgaaatggagctatattctagacaaaattgtcacattgccatgtttgtttcctttgctcatcaattctcttgcgttgacttcatacaccattgttttgctagccatgaggaatcacttatttgtttggagcgtattctcaccaaagtacctctatgcctgcgcagcaacagtgtgcacatatgtcggagtatccatcatagctatgactgcattatacagttgtgctgttttcaagttcagggcgagaagctacagggataaatccctgtaatcagactaatgattagctgttctgatttaatggacatttgtaagaattcagaaagggagggtatcttggcctattctctcgttgtacaacaacatcgtactcacatgtttccagaccaccatgcaatccctgcaagggtctatacacatttctcgttctctttgctaatcgtattggattaagtttgtcctggacacatgacgtaagcacgttcaagatgaacagggggtatggagtacattgtagcctgagtcctgtttcgattgagagatccatgttaaccatttccgcatatggatctgggcattaagccctaaata

SEQ ID NO: 51693 - DNA, 3251 bp, Zea Mays
ggaggcagtcgtctcactgggactggacctctgcctgttagtttagtttcctcgtcgcgctgggccgccggcttccgccgttccgcggcggagggaagccatgggcgccgccgtcgcagggtggaccgtggcggcagtgctgcttcaggtcgccggcctctccctcttcctctacggattcttccccgtgaagcccacactgcgtggcttcagtggagcggagagctaccgggtgccttcctgcggttccgttagtgctggggagcaggagccggcgcttcccccggatcagctcagatctctgtacagggaactctctgggatccctcctgtgtacgatcgcttagtgttgatgttaggtgattgatggactacctgctgaatttgtacttgggagaggcaggaaacctccaagcaaaaaaatgatggagtctatgccatacactcaatctttgttagctggctgcaaagcagcaggttaccatgccaaggctgcacctcccaccgtcacaatgcctcgactaaaagctatggtgtctggtgcaattggaggttttctagatgtagcatttaatttcaatactcaagccttcttagaggacaatcttcttgatcagcttcatatgattggtttgaagttagtgatgctgggagatgagacatggatcaaattgttcccaaccctattcactagacaagatggagtgagcagtttttatgtgaaagatacagttgaggttgatttcaacgtttcacgccacttagaatttgagcttgctgcaaaagactggagtgtcttggttcttcactatctaggcttagatcatgttggtcatataggtggccgccggagtgttttgatgacccaaaagatgaaggagatggatgatgtcattagacgggtgcatgctgcgagtcttcaggataatctggacagaacacttttggttgtggttagcgatcatggcatgactgatgggggtaatcatggaggatcttcatatgaagaaactgattcacttgccttttttataggacacagcgttgagagcccatattgttcaccctatgaccagaatgaagcacttcaagtggatcttgccccaactcttgctcttctatttggtgtaccaattccgaagaatagttttggtgtcgtgcttccaaagcttttaaattcgttgacagatgaccagaaactaaggatgttagagcttaactcatggcaaatcttaagattgctgcaagcacaagtgtctgctttctgccttgaagattgtattaatgtggagagcagtattgaacttgacatccttcctgaatctattgagcaaaagttatgttttttactttctaaagccatttcttctcatcagtcttcacgtcttcatcgaggttctgatttcaagtctgttgaagccgggtactatgggactgctgcagataactaccacaccttcttaagaaatgcgaggacgatctctgagtcaagctgatcaccattcagagtcatatttggatcaacgctggcaccttgatgaggttctcgttcttgctgggatgtttctctatgtcatcagtcttggctcaagttcttttgtggaagaagagcagtatacatggcacttcctcacttctactctgtatctaatatttctggccaaggcagttcagtcaatgctaaaaggatcaaatccaacacttggtcataaagcagaaggaaatagctttgacagaagtagctttttctatgctacaagctatgaattaacaccaggcaagagaaatggttacaagttatgtactatccttgttgttcttgttgctggaagagttataagagcttggcatcaaggtggaatcaactgggttcactttcctgatatttccaagttactggcgcaagctgacccttctgttgtaaagtctcttcagattatctcagttcttgcagttgtggtattgttttcaatttcactcactttactcagagcaagaccagagtttgttataggagtatggttgacccacatttcttgtggatttttggtcctactgcatgtttggggaaatcatattggtacttcattaccaattaaccataccacagcatcggtagctcgacaattttatgtcattgctagtgtttcagtatctgtcactgttcttgcttcaccttgggtatttccaatattttctagggaagcaaaatcaccgtcctctggttctagtcctgtaaaggcaatacatggcatcagaaaatcacttgttctcactggaatgacatacacagcgttctggggccttctgcaattgcttcttcaacaaccaatcaatgcaattcctcttttcctcattttattgcaaacagtctcgagtgcagttcatttttctctggacaaaacattacataaacaatgggtacaggttgtggcaatgcatttcttgggaatggctggtcacttcggtcttgggaatacaaatagccttgccagcattgatgttgcgggagctttcattggcatttcaagttactccacagttctttctggtatactgatgtttatgataacatatgcatcacctctcatgttataccttgggttggtccttcatgcatcggtgaaagatgtcgatgatgcctccaatctacggcagctgaaatggagctatattctagacaaaattgtcacattgccatgtttgtttcctttgctcatcaattctcttgcgttgacttcatacaccattgttttgctagccatgaggaatcacttatttgtttggagcgtattctcaccaaagtacctctatgcctgcgcagcaacagtgtgcacatatgtcggagtatccatcatagctatgactgcattatacagttgtgctgttttcaagttcagggcgagaagctacagggataaatccctgtaatcagactaatgattagctgttctgatttaatggacatttgtaagaattcagaaagggagggtatcttggcctattctctcgttgtacaacaacatcgtactcacatgtttccagaccaccatgcaatccctgcaagggtctatacacatttctcgttctctttgctaatcgtattggattaagtttgtcctggacacatgacgtaagcacgttcaagatgaacagggggtatggagtacattgtagcctgagtcctgtttcgattgagagatccatgttaaccatttccgcatatggatctgggcattaagccctaaata

SEQ ID NO: 51694 - DNA, 3341 bp, Zea Mays
ggaggcagtcgtctcactgggactggacctctgcctgttagtttagtttcctcgtcgcgctgggccgccggcttccgccgttccgcggcggagggaagccatgggcgccgccgtcgcagggtggaccgtggcggcagtgctgcttcaggtcgccggcctctccctcttcctctacggattcttccccgtgaagcccacactgcgtggcttcagtggagcggagagctaccgggtgccttcctgcggttccgttagtgctggggagcaggagccggcgcttcccccggatcagctcagatctctgtacagggaactctctgggatccctcctgtgtacgatcgcttagtgttgatggtgattgatggactacctgctgaatttgtacttgggagaggcaggaaacctccaagcaaaaaaatgatggagtctatgccatacactcaatctttgttagctggctgcaaagcagcaggttaccatgccaaggctgcacctcccaccgtcacaatgcctcgactaaaagctatggtgtctggtgcaattggaggttttctagatgtagcatttaatttcaatactcaagccttcttagaggacaatcttcttgatcagcttcatatgattggtttgaagttagtgatgctgggagatgagacatggatcaaattgttcccaaccctattcactagacaagatggagtgagcagtttttatgtgaaagatacagttgaggttgatttcaacgtttcacgccacttagaatttgagcttgctgcaaaagactggagtgtcttggttcttcactatctaggcttagatcatgttggtcatataggtggccgccggagtgttttgatgacccaaaagatgaaggagatggatgatgtcattagacgggtgcatgctgcgagtcttcaggataatctggacagaacacttttggttgtggttagcgatcatggcatgactgatgggggtaatcatggaggatcttcatatgaagaaactgattcacttgccttttttataggacacagcgttgagagcccatattgttcaccctatgaccagaatgaagcacttcaagtggatcttgccccaactcttgctcttctatttggtgtaccaattccgaagaatagttttggtgtcgtgcttccaaagcttttaaattcgttgacagatgaccagaaactaaggatgttagagcttaactcatggcaaatcttaagattgctgcaagcacaagtgtctgctttctgccttgaagattgtattaatgtggagagcagtattgaacttgacatccttcctgaatctattgagcaaaagttatgttttttactttctaaagccatttcttctcatcagtcttcacgtcttcatcgaggttctgatttcaagtctgttgaagccgggtactatgggactgctgcagataactaccacaccttcttaagaaatgcgagtgagtggttgtctcacagagcaaccgataaaccattatatttacttgtctctgcaatcatgttgatgacaatgtcatgccttttcctcatgggtactgtgtcttacctatttaagggacgatctctgagtcaagctgatcaccattcagagtcatatttggatcaacgctggcaccttgatgaggttctcgttcttgctgggatgtttctctatgtcatcagtcttggctcaagttcttttgtggaagaagagcagtatacatggcacttcctcacttctactctgtatctaatatttctggccaaggcagttcagtcaatgctaaaaggatcaaatccaacacttggtcataaagcagaaggaaatagctttgacagaagtagctttttctatgctacaagctatgaattaacaccaggcaagagaaatggttacaagttatgtactatccttgttgttcttgttgctggaagagttataagagcttggcatcaaggtggaatcaactgggttcactttcctgatatttccaagttactggcgcaagctgacccttctgttgtaaagtctcttcagattatctcagttcttgcagttgtggtattgttttcaatttcactcactttactcagagcaagaccagagtttgttataggagtatggttgacccacatttcttgtggatttttggtcctactgcatgtttggggaaatcatattggtacttcattaccaattaaccataccacagcatcggtagctcgacaattttatgtcattgctagtgtttcagtatctgtcactgttcttgcttcaccttgggtatttccaatattttctagggaagcaaaatcaccgtcctctggttctagtcctgtaaaggcaatacatggcatcagaaaatcacttgttctcactggaatgacatacacagcgttctggggccttctgcaattgcttcttcaacaaccaatcaatgcaattcctcttttcctcattttattgcaaacagtctcgagtgcagttcatttttctctggacaaaacattacataaacaatgggtacaggttgtggcaatgcatttcttgggaatggctggtcacttcggtcttgggaatacaaatagccttgccagcattgatgttgcgggagctttcattttctttctggtatactgatgtttatgataacatatgcatcacctctcatgttataccttgggttggtccttcatgcatcggtgaaagatgtcgatgatgcctccaatctacggcagctgaaatggagctatattctagacaaaattgtcacattgccatgtttgtttcctttgctcatcaattctcttgcgttgacttcatacaccattgttttgctagccatgaggaatcacttatttgtttggagcgtattctcaccaaagtacctctatgcctgcgcagcaacagtgtgcacatatgtcggagtatccatcatagctatgactgcattatacagttgtgctgttttcaagttcagggcgagaagctacagggataaatccctgtaatcagactaatgattagctgttctgatttaatggacatttgtaagaattcagaaagggagggtatcttggcctattctctcgttgtacaacaacatcgtactcacatgtttccagaccaccatgcaatccctgcaagggtctatacacatttctcgttctctttgctaatcgtattggattaagtttgtcctggacacatgacgtaagcacgttcaagatgaacagggggtatggagtacattgtagcctgagtcctgtttcgattgagagatccatgttaaccatttccgcatatggatctgggcattaagccctaaata

SEQ ID NO: 51695 - DNA, 3237 bp, Zea Mays
ggaggcagtcgtctcactgggactggacctctgcctgttagtttagtttcctcgtcgcgctgggccgccggcttccgccgttccgcggcggagggaagccatgggcgccgccgtcgcagggtggaccgtggcggcagtgctgcttcaggtcgccggcctctccctcttcctctacggattcttccccgtgaagcccacactgcgtggcttcagtggagcggagagctaccgggtgccttcctgcggttccgttagtgctggggagcaggagccggcgcttcccccggatcagctcagatctctgtacagggaactctctgggatccctcctgtgtacgatcgcttagtgttgatggtgattgatggactacctgctgaatttgtacttgggagaggcaggaaacctccaagcaaaaaaatgatggagtctatgccatacactcaatctttgttagctggctgcaaagcagcaggttaccatgccaaggctgcacctcccaccgtcacaatgcctcgactaaaagctatggtgtctggtgcaattggaggttttctagatgtagcatttaatttcaatactcaagccttcttagaggacaatcttcttgatcagcttcatatgattggtttgaagttagtgatgctgggagatgagacatggatcaaattgttcccaaccctattcactagacaagatggagtgagcagtttttatgtgaaagatacagttgaggttgatttcaacgtttcacgccacttagaatttgagcttgctgcaaaagactggagtgtcttggttcttcactatctaggcttagatcatgttggtcatataggtggccgccggagtgttttgatgacccaaaagatgaaggagatggatgatgtcattagacgggtgcatgctgcgagtcttcaggataatctggacagaacacttttggttgtggttagcgatcatggcatgactgatgggggtaatcatggaggatcttcatatgaagaaactgattcacttgccttttttataggacacagcgttgagagcccatattgttcaccctatgaccagaatgaagcacttcaaatgaccagaaactaaggatgttagagcttaactcatggcaaatcttaagattgctgcaagcacaagtgtctgctttctgccttgaagattgtattaatgtggagagcagtattgaacttgacatccttcctgaatctattgagcaaaagttatgttttttactttctaaagccatttcttctcatcagtcttcacgtcttcatcgaggttctgatttcaagtctgttgaagccgggtactatgggactgctgcagataactaccacaccttcttaagaaatgcgaaaaccattatatttacttgtctctgcaatcatgttgatgacaatgtcatgccttttcctcatgggtactgtgtcttacctatttaagggacgatctctgagtcaagctgatcaccattcagagtcatatttggatcaacgctggcaccttgatgaggttctcgttcttgctgggatgtttctctatgtcatcagtcttggctcaagttcttttgtggaagaagagcagtatacatggcacttcctcacttctactctgtatctaatatttctggccaaggcagttcagtcaatgctaaaaggatcaaatccaacacttggtcataaagcagaaggaaatagctttgacagaagtagctttttctatgctacaagctatgaattaacaccaggcaagagaaatggttacaagttatgtactatccttgttgttcttgttgctggaagagttataagagcttggcatcaaggtggaatcaactgggttcactttcctgatatttccaagttactggcgcaagctgacccttctgttgtaaagtctcttcagattatctcagttcttgcagttgtggtattgttttcaatttcactcactttactcagagcaagaccagagtttgttataggagtatggttgacccacatttcttgtggatttttggtcctactgcatgtttggggaaatcatattggtacttcattaccaattaaccataccacagcatcggtagctcgacaattttatgtcattgctagtgtttcagtatctgtcactgttcttgcttcaccttgggtatttccaatattttctagggaagcaaaatcaccgtcctctggttctagtcctgtaaaggcaatacatggcatcagaaaatcacttgttctcactggaatgacatacacagcgttctggggccttctgcaattgcttcttcaacaaccaatcaatgcaattcctcttttcctcattttattgcaaacagtctcgagtgcagttcatttttctctggacaaaacattacataaacaatgggtacaggttgtggcaatgcatttcttgggaatggctggtcacttcggtcttgggaatacaaatagccttgccagcattgatgttgcgggagctttcattggcatttcaagttactccacagttctttctggtatactgatgtttatgataacatatgcatcacctctcatgttataccttgggttggtccttcatgcatcggtgaaagatgtcgatgatgcctccaatctacggcagctgaaatggagctatattctagacaaaattgtcacattgccatgtttgtttcctttgctcatcaattctcttgcgttgacttcatacaccattgttttgctagccatgaggaatcacttatttgtttggagcgtattctcaccaaagtacctctatgcctgcgcagcaacagtgtgcacatatgtcggagtatccatcatagctatgactgcattatacagttgtgctgttttcaagttcagggcgagaagctacagggataaatccctgtaatcagactaatgattagctgttctgatttaatggacatttgtaagaattcagaaagggagggtatcttggcctattctctcgttgtacaacaacatcgtactcacatgtttccagaccaccatgcaatccctgcaagggtctatacacatttctcgttctctttgctaatcgtattggattaagtttgtcctggacacatgacgtaagcacgttcaagatgaacagggggtatggagtacattgtagcctgagtcctgtttcgattgagagatccatgttaaccatttccgcatatggatctgggcattaagccctaaata

SEQ ID NO: 51696 - DNA, 3334 bp, Zea Mays
ggaggcagtcgtctcactgggactggacctctgcctgttagtttagtttcctcgtcgcgctgggccgccggcttccgccgttccgcggcggagggaagccatgggcgccgccgtcgcagggtggaccgtggcggcagtgctgcttcaggtcgccggcctctccctcttcctctacggattcttccccgtgaagcccacactgcgtggcttcagtggagcggagagctaccgggtgccttcctgcggttccgttagtgctggggagcaggagccggcgcttcccccggatcagctcagatctctgtacagggaactctctgggatccctcctgtgtacgatcgcttagtgttgatggtgattgatggactacctgctgaatttgtacttgggagaggcaggaaacctccaagcaaaaaaatgatggagtctatgccatacactcaatctttgttagctggctgcaaagcagcaggttaccatgccaaggctgcacctcccaccgtcacaatgcctcgactaaaagctatggtgtctggtgcaattggaggttttctagatgtagcatttaatttcaatactcaagccttcttagaggacaatcttcttgatcagcttcatatgattggtttgaagttagtgatgctgggagatgagacatggatcaaattgttcccaaccctattcactagacaagatggagtgagcagtttttatgtgaaagatacagttgaggttgatttcaacgtttcacgccacttagaatttgagcttgctgcaaaagactggagtgtcttggttcttcactatctaggcttagatcatgttggtcatataggtggccgccggagtgttttgatgacccaaaagatgaaggagatggatgatgtcattagacgggtgcatgctgcgagtcttcaggataatctggacagaacacttttggttgtggttagcgatcatggcatgactgatgggggtaatcatggaggatcttcatatgaagaaactgattcacttgccttttttataggacacagcgttgagagcccatattgttcaccctatgaccagaatgaagcacttcaagtggatcttgccccaactcttgctcttctatttggtgtaccaattccgaagaatagttttggtgtcgtgcttccaaagcttttaaattcgttgacagatgaccagaaactaaggatgttagagcttaactcatggcaaatcttaagattgctgcaagcacaagtgtctgctttctgccttgaagattgtattaatgtggagagcagtattgaacttgacatccttcctgaatctattgagcaaaagttatgttttttactttctaaagccatttcttctcatcagtcttcacgtcttcatcgaggttctgatttcaagtctgttgaagccgggtactatgggactgctgcagataactaccacaccttcttaagaaatgcgaaaaccattatatttacttgtctctgcaatcatgttgatgacaatgtcatgccttttcctcatgggtactgtgtcttacctatttaagggacgatctctgagtcaagctgatcaccattcagagtcatatttggatcaacgctggcaccttgatgaggttctcgttcttgctgggatgtttctctatgtcatcagtcttggctcaagttcttttgtggaagaagagcagtatacatggcacttcctcacttctactctgtatctaatatttctggccaaggcagttcagtcaatgctaaaaggatcaaatccaacacttggtcataaagcagaaggaaatagctttgacagaagtagctttttctatgctacaagctatgaattaacaccaggcaagagaaatggttacaagttatgtactatccttgttgttcttgttgctggaagagttataagagcttggcatcaaggtggaatcaactgggttcactttcctgatatttccaagttactggcgcaagctgacccttctgttgtaaagtctcttcagattatctcagttcttgcagttgtggtattgttttcaatttcactcactttactcagagcaagaccagagtttgttataggagtatggttgacccacatttcttgtggatttttggtcctactgcatgtttggggaaatcatattggtacttcattaccaattaaccataccacagcatcggtagctcgacaattttatgtcattgctagtgtttcagtatctgtcactgttcttgcttcaccttgggtatttccaatattttctagggaagcaaaatcaccgtcctctggttctagtcctgtaaaggcaatacatggcatcagaaaatcacttgttctcactggaatgacatacacagcgttctggggccttctgcaattgcttcttcaacaaccaatcaatgcaattcctcttttcctcattttattgcaaacagtctcgagtgcagttcatttttctctggacaaaacattacataaacaatgggtacaggttgtggcaatgcatttcttgggaatggctggtcacttcggtcttgggaatacaaatagccttgccagcattgatgttgcgggagctttcattggcatttcaagttactccacagttctttctggtatactgatgtttatgataacatatgcatcacctctcatgttataccttgggttggtccttcatgcatcggtgaaagatgtcgatgatgcctccaatctacggcagctgaaatggagctatattctagacaaaattgtcacattgccatgtttgtttcctttgctcatcaattctcttgcgttgacttcatacaccattgttttgctagccatgaggaatcacttatttgtttggagcgtattctcaccaaagtacctctatgcctgcgcagcaacagtgtgcacatatgtcggagtatccatcatagctatgactgcattatacagttgtgctgttttcaagttcagggcgagaagctacagggataaatccctgtaatcagactaatgattagctgttctgatttaatggacatttgtaagaattcagaaagggagggtatcttggcctattctctcgttgtacaacaacatcgtactcacatgtttccagaccaccatgcaatccctgcaagggtctatacacatttctcgttctctttgctaatcgtattggattaagtttgtcctggacacatgacgtaagcacgttcaagatgaacagggggtatggagtacattgtagcctgagtcctgtttcgattgagagatccatgttaaccatttccgcatatggatctgggcattaagccctaaata

SEQ ID NO: 51697 - DNA, 3266 bp, Zea Mays
ggaggcagtcgtctcactgggactggacctctgcctgttagtttagtttcctcgtcgcgctgggccgccggcttccgccgttccgcggcggagggaagccatgggcgccgccgtcgcagggtggaccgtggcggcagtgctgcttcaggtcgccggcctctccctcttcctctacggattcttccccgtgaagcccacactgcgtggcttcagtggagcggagagctaccgggtgccttcctgcggttccgttagtgctggggagcaggagccggcgcttcccccggatcagctcagatctctgtacagggaactctctgggatccctcctgtgtacgatcgcttagtgttgatggtgattgatggactacctgctgaatttgtacttgggagaggcaggaaacctccaagcaaaaaaatgatggagtctatgccatacactcaatctttgttagctggctgcaaagcagcaggttaccatgccaaggctgcacctcccaccgtcacaatgcctcgactaaaagctatggtgtctggtgcaattggaggttttctagatgtagcatttaatttcaatactcaagccttcttagaggacaatcttcttgatcagcttcatatgattggtttgaagttagtgatgctgggagatgagacatggatcaaattgttcccaaccctattcactagacaagatggagtgagcagtttttatgtgaaagatacagttgaggttgatttcaacgtttcacgccacttagaatttgagcttgctgcaaaagactggagtgtcttggttcttcactatctaggcttagatcatgttggtcatataggtggccgccggagtgttttgatgacccaaaagatgaaggagatggatgatgtcattagacgggtgcatgctgcgagtcttcaggataatctggacagaacacttttggttgtggttagcgatcatggcatgactgatgggggtaatcatggaggatcttcatatgaagaaactgattcacttgccttttttataggacacagcgttgagagcccatattgttcaccctatgaccagaatgaagcacttcaaatgaccagaaactaaggatgttagagcttaactcatggcaaatcttaagattgctgcaagcacaagtgtctgctttctgccttgaagattgtattaatgtggagagcagtattgaacttgacatccttcctgaatctattgagcaaaagttatgttttttactttctaaagccatttcttctcatcagtcttcacgtcttcatcgaggttctgatttcaagtctgttgaagccgggtactatgggactgctgcagataactaccacaccttcttaagaaatgcgagtgagtggttgtctcacagagcaaccgataaaccattatatttacttgtctctgcaatcatgttgatgacaatgtcatgccttttcctcatgggtactgtgtcttacctatttaagggacgatctctgagtcaagctgatcaccattcagagtcatatttggatcaacgctggcaccttgatgaggttctcgttcttgctgggatgtttctctatgtcatcagtcttggctcaagttcttttgtggaagaagagcagtatacatggcacttcctcacttctactctgtatctaatatttctggccaaggcagttcagtcaatgctaaaaggatcaaatccaacacttggtcataaagcagaaggaaatagctttgacagaagtagctttttctatgctacaagctatgaattaacaccaggcaagagaaatggttacaagttatgtactatccttgttgttcttgttgctggaagagttataagagcttggcatcaaggtggaatcaactgggttcactttcctgatatttccaagttactggcgcaagctgacccttctgttgtaaagtctcttcagattatctcagttcttgcagttgtggtattgttttcaatttcactcactttactcagagcaagaccagagtttgttataggagtatggttgacccacatttcttgtggatttttggtcctactgcatgtttggggaaatcatattggtacttcattaccaattaaccataccacagcatcggtagctcgacaattttatgtcattgctagtgtttcagtatctgtcactgttcttgcttcaccttgggtatttccaatattttctagggaagcaaaatcaccgtcctctggttctagtcctgtaaaggcaatacatggcatcagaaaatcacttgttctcactggaatgacatacacagcgttctggggccttctgcaattgcttcttcaacaaccaatcaatgcaattcctcttttcctcattttattgcaaacagtctcgagtgcagttcatttttctctggacaaaacattacataaacaatgggtacaggttgtggcaatgcatttcttgggaatggctggtcacttcggtcttgggaatacaaatagccttgccagcattgatgttgcgggagctttcattggcatttcaagttactccacagttctttctggtatactgatgtttatgataacatatgcatcacctctcatgttataccttgggttggtccttcatgcatcggtgaaagatgtcgatgatgcctccaatctacggcagctgaaatggagctatattctagacaaaattgtcacattgccatgtttgtttcctttgctcatcaattctcttgcgttgacttcatacaccattgttttgctagccatgaggaatcacttatttgtttggagcgtattctcaccaaagtacctctatgcctgcgcagcaacagtgtgcacatatgtcggagtatccatcatagctatgactgcattatacagttgtgctgttttcaagttcagggcgagaagctacagggataaatccctgtaatcagactaatgattagctgttctgatttaatggacatttgtaagaattcagaaagggagggtatcttggcctattctctcgttgtacaacaacatcgtactcacatgtttccagaccaccatgcaatccctgcaagggtctatacacatttctcgttctctttgctaatcgtattggattaagtttgtcctggacacatgacgtaagcacgttcaagatgaacagggggtatggagtacattgtagcctgagtcctgtttcgattgagagatccatgttaaccatttccgcatatggatctgggcattaagccctaaata

SEQ ID NO: 51698 - DNA, 3260 bp, Zea Mays
ggaggcagtcgtctcactgggactggacctctgcctgttagtttagtttcctcgtcgcgctgggccgccggcttccgccgttccgcggcggagggaagccatgggcgccgccgtcgcagggtggaccgtggcggcagtgctgcttcaggtcgccggcctctccctcttcctctacggattcttccccgtgaagcccacactgcgtggcttcagtggagcggagagctaccgggtgccttcctgcggttccgttagtgctggggagcaggagccggcgcttcccccggatcagctcagatctctgtacagggaactctctgggatccctcctgtgtacgatcgcttagtgttgatggtgattgatggactacctgctgaatttgtacttgggagaggcaggaaacctccaagcaaaaaaatgatggagtctatgccatacactcaatctttgttagctggctgcaaagcagcaggttaccatgccaaggctgcacctcccaccgtcacaatgcctcgactaaaagctatggtgtctggtgcaattggaggttttctagatgtagcatttaatttcaatactcaagccttcttagaggacaatcttcttgatcagcttcatatgattggtttgaagttagtgatgctgggagatgagacatggatcaaattgttcccaaccctattcactagacaagatggagtgagcagtttttatgtgaaagatacagttgaggttgatttcaacgtttcacgccacttagaatttgagcttgctgcaaaagactggagtgtcttggttcttcactatctaggcttagatcatgttggtcatataggtggccgccggagtgttttgatgacccaaaagatgaaggagatggatgatgtcattagacgggtgcatgctgcgagtcttcaggataatctggacagaacacttttggttgtggttagcgatcatggcatgactgatgggggtaatcatggaggatcttcatatgaagaaactgattcacttgccttttttataggacacagcgttgagagcccatattgttcaccctatgaccagaatgaagcacttcaagtggatcttgccccaactcttgctcttctatttggtgtaccaattccgaagaatagttttggtgtcgtgcttccaaagcttttaaattcgttgacagatgaccagaaactaaggatgttagagcttaactcatggcaaatcttaagattgctgcaagcacaagtgtctgctttctgccttgaagattgtattaatgtggagagcagtattgaacttgacatccttcctgaatctattgagcaaaagttatgttttttactttctaaagccatttcttctcatcagtcttcacgtcttcatcgaggttctgatttcaagtctgttgaagccgggtactatgggactgctgcagataactaccacaccttcttaagaaatgcgagtgagtggttgtctcacagagcaaccgataaaccattatatttacttgtctctgcaatcatgttgatgacaatgtcatgccttttcctcatgggtactgtgtcttacctatttaagggacgatctctgagtcaagctgatcaccattcagagtcatatttggatcaacgctggcaccttgatgaggttctcgttcttgctgggatgtttctctatgtcatcagtcttggctcaagttcttttgtggaagaagagcagtatacatggcacttcctcacttctactctgtatctaatatttctggccaaggcagttcagtcaatgctaaaaggatcaaatccaacacttggtcataaagcagaaggaaatagctttgacagaagtagctttttctatgctacaagctatgaattaacaccaggcaagagaaatggttacaagttatgtactatccttgttgttcttgttgctggaagagttataagagcttggcatcaaggtggaatcaactgggttcactttcctgatatttccaagttactggcgcaagctgacccttctgttgtaaagtctcttcagattatctcagttcttgcagttgtggtattgttttcaatttcactcactttactcagagcaagaccagagtttgttataggagtatggttgacccacatttcttgtggatttttggtcctactgcatgtttggggaaatcatattggtacttcattaccaattaaccataccacagcatcggtagctcgacaattttatgtcattgctagtgtttcagtatctgtcactgttcttgcttcaccttgggtatttccaatattttctagggaagcaaaatcaccgtcctctggttctagtcctgtaaaggcaatacatggcatcagaaaatcacttgttctcactggaatgacatacacagcgttctggggccttctgcaattgcttcttcaacaaccaatcaatgcaattcctcttttcctcattttattgcaaacagtctcgagtgcagttcatttttctctggacaaaacattacataaacaatgggtacaggttgtggcaatgcatttcttgggaatggctggtcacttcggtcttgggaatacaaatagccttgccagcattgatgttgcgggagctttcattggcatttcaagttactccacagttctttctggtatactgatgtttatgataacatatgcatcacctctcatgttataccttgggttggtccttcatgcatcggtgaaagatgtcgatgatgcctccaatctacggcagctgaaatggagctatattctagacaaaattgtcacattgccatgtacctctatgcctgcgcagcaacagtgtgcacatatgtcggagtatccatcatagctatgactgcattatacagttgtgctgttttcaagttcagggcgagaagctacagggataaatccctgtaatcagactaatgattagctgttctgatttaatggacatttgtaagaattcagaaagggagggtatcttggcctattctctcgttgtacaacaacatcgtactcacatgtttccagaccaccatgcaatccctgcaagggtctatacacatttctcgttctctttgctaatcgtattggattaagtttgtcctggacacatgacgtaagcacgttcaagatgaacagggggtatggagtacattgtagcctgagtcctgtttcgattgagagatccatgttaaccatttccgcatatggatctgggcattaagccctaaata

SEQ ID NO: 51699 - DNA, 3290 bp, Zea Mays
ggaggcagtcgtctcactgggactggacctctgcctgttagtttagtttcctcgtcgcgctgggccgccggcttccgccgttccgcggcggagggaagccatgggcgccgccgtcgcagggtggaccgtggcggcagtgctgcttcaggtcgccggcctctccctcttcctctacggattcttccccgtgaagcccacactgcgtggcttcagtggagcggagagctaccgggtgccttcctgcggttccgttagtgctggggagcaggagccggcgcttcccccggatcagctcagatctctgtacagggaactctctgggatccctcctgtgtacgatcgcttagtgttgatggaaacctccaagcaaaaaaatgatggagtctatgccatacactcaatctttgttagctggctgcaaagcagcaggttaccatgccaaggctgcacctcccaccgtcacaatgcctcgactaaaagctatggtgtctggtgcaattggaggttttctagatgtagcatttaatttcaatactcaagccttcttagaggacaatcttcttgatcagcttcatatgattggtttgaagttagtgatgctgggagatgagacatggatcaaattgttcccaaccctattcactagacaagatggagtgagcagtttttatgtgaaagatacagttgaggttgatttcaacgtttcacgccacttagaatttgagcttgctgcaaaagactggagtgtcttggttcttcactatctaggcttagatcatgttggtcatataggtggccgccggagtgttttgatgacccaaaagatgaaggagatggatgatgtcattagacgggtgcatgctgcgagtcttcaggataatctggacagaacacttttggttgtggttagcgatcatggcatgactgatgggggtaatcatggaggatcttcatatgaagaaactgattcacttgccttttttataggacacagcgttgagagcccatattgttcaccctatgaccagaatgaagcacttcaagtggatcttgccccaactcttgctcttctatttggtgtaccaattccgaagaatagttttggtgtcgtgcttccaaagcttttaaattcgttgacagatgaccagaaactaaggatgttagagcttaactcatggcaaatcttaagattgctgcaagcacaagtgtctgctttctgccttgaagattgtattaatgtggagagcagtattgaacttgacatccttcctgaatctattgagcaaaagttatgttttttactttctaaagccatttcttctcatcagtcttcacgtcttcatcgaggttctgatttcaagtctgttgaagccgggtactatgggactgctgcagataactaccacaccttcttaagaaatgcgaaaaccattatatttacttgtctctgcaatcatgttgatgacaatgtcatgccttttcctcatgggtactgtgtcttacctatttaagggacgatctctgagtcaagctgatcaccattcagagtcatatttggatcaacgctggcaccttgatgaggttctcgttcttgctgggatgtttctctatgtcatcagtcttggctcaagttcttttgtggaagaagagcagtatacatggcacttcctcacttctactctgtatctaatatttctggccaaggcagttcagtcaatgctaaaaggatcaaatccaacacttggtcataaagcagaaggaaatagctttgacagaagtagctttttctatgctacaagctatgaattaacaccaggcaagagaaatggttacaagttatgtactatccttgttgttcttgttgctggaagagttataagagcttggcatcaaggtggaatcaactgggttcactttcctgatatttccaagttactggcgcaagctgacccttctgttgtaaagtctcttcagattatctcagttcttgcagttgtggtattgttttcaatttcactcactttactcagagcaagaccagagtttgttataggagtatggttgacccacatttcttgtggatttttggtcctactgcatgtttggggaaatcatattggtacttcattaccaattaaccataccacagcatcggtagctcgacaattttatgtcattgctagtgtttcagtatctgtcactgttcttgcttcaccttgggtatttccaatattttctagggaagcaaaatcaccgtcctctggttctagtcctgtaaaggcaatacatggcatcagaaaatcacttgttctcactggaatgacatacacagcgttctggggccttctgcaattgcttcttcaacaaccaatcaatgcaattcctcttttcctcattttattgcaaacagtctcgagtgcagttcatttttctctggacaaaacattacataaacaatgggtacaggttgtggcaatgcatttcttgggaatggctggtcacttcggtcttgggaatacaaatagccttgccagcattgatgttgcgggagctttcattggcatttcaagttactccacagttctttctggtatactgatgtttatgataacatatgcatcacctctcatgttataccttgggttggtccttcatgcatcggtgaaagatgtcgatgatgcctccaatctacggcagctgaaatggagctatattctagacaaaattgtcacattgccatgtttgtttcctttgctcatcaattctcttgcgttgacttcatacaccattgttttgctagccatgaggaatcacttatttgtttggagcgtattctcaccaaagtacctctatgcctgcgcagcaacagtgtgcacatatgtcggagtatccatcatagctatgactgcattatacagttgtgctgttttcaagttcagggcgagaagctacagggataaatccctgtaatcagactaatgattagctgttctgatttaatggacatttgtaagaattcagaaagggagggtatcttggcctattctctcgttgtacaacaacatcgtactcacatgtttccagaccaccatgcaatccctgcaagggtctatacacatttctcgttctctttgctaatcgtattggattaagtttgtcctggacacatgacgtaagcacgttcaagatgaacagggggtatggagtacattgtagcctgagtcctgtttcgattgagagatccatgttaaccatttccgcatatggatctgggcattaagccctaaata

SEQ ID NO: 51700 - DNA, 1170 bp, Zea Mays
cctcaaaaccctagagcgtcagctgccgagctcactgtgtattcggtcggcgcgtgccgcttcccatacccccgcgcgctccccatggccgacgtcgacatggctgacctcccacagaccccgcgatccaccgccggcgacgacgacctctccttgctggacggagagggcgacctcgccgccgccatcctcgcgcgcctcggcggctcgccgcgggaggactttcagcacctctgtgccaccgccgccgccatggcgcaggccgttagcgaccaaggagtgcccgccaccccagtagcctacttcgcagcggctgctgcggcgcttgccccgctcgctcgcgcgggggacgccggcgccgaccgccacgtcgccggagcgctcctcgccttcctctccgcggcgctgccggccctcccggccgcagtggtgcgcgcccgtggccgtgaggtcgccgatgacgtgatgcgcgtgctcgatttcccttccacgcctgattcaggcgtcagggcggggctgagatgcctcgcgcatttgatatctgcgggggacagggcgaactgggaggcggtagagcctttatacactgtgattctgcgcctcagtaccgatcaccggctaaagatatattatcaagtgaattcgaagaggcgagattttcatctctggagggttttaaaggtttaatagataactgcattgatgaaaccttggtgtcacagggtattgctcagatgaaggctagacatcaagggttgaaatcagatccaacaatcatagataagatatgtgctatcctagaaggcttgctagatgtccgctacagtgacgtctgggacagatcatttcatgtaatttcagtggcatttgacaaactaggagagttttcagctgatctattgcccgaagcagtcaggaacttggcagacatgcaaaacttgtcagatgatgacttttcctttcggaagcagcttgatgcatgtcttggttcagcggttgctgcaatggggccaaagaatattctggaaattcttcagattcagtcaataagtgatgaaaatgaatggattctccctattctggagaagcacattgttggtgccagtttacaatttttcttaagagatattctgagtatggttggtgccatagagaaaaacattcctaagg

SEQ ID NO: 51701 - DNA, 1603 bp, Zea Mays
aaaccctagagcgtcagctgccgagctcactgtgtattcggtcggcgcgtgccgcttcccatacccccgcgcgctccccatggccgacgtcgacatggctgacctcccacagaccccgcgatccaccgccggcgacgacgacctctccttgctggacggagagggcgacctcgccgccgccatcctcgcgcgcctcggcggctcgccgcgggaggactttcagcacctctgtgccaccgccgccgccatggcgcaggccgttagcgaccaaggagtgcccgccaccccagtagcctacttcgcagcggctgctgcggcgcttgccccgctcgctcgcgcgggggacgccggcgccgaccgccacgtcgccggagcgctcctcgccttcctctccgcggcgctgccggccctcccggccgcagtggtgcgcgcccgtggccgtgaggtcgccgatgacgtgatgcgcgtgctcgatttcccttccacgcctgattcaggcgtcagggcggggctgagatgcctcgcgcatttgatatctgcgggggacagggcgaactgggaggcggtagagcctttatacactgtgattctgcgcctcagtaccgatcaccggctaaaggtgcggaaacaatctcattcatgcttgcatgatgttctcctgagttttcaaaggcaaacaattttgattccagcaagtgaagcaataacaagatcttttgagcggtttctgctgcttgctggaggatctagtgctgtaaatacaggtgtatcagaggaaggccccaagggggctaaggagatttgcatcaaccaattttgataaggagtcttctggacattctgcatgctgtttgtgagagtccaaccgtacagctcaaatctgatgtgttattggaccttctgtgctcgttgggtctgtcagtgtcttcagaaaggaaatcaggagatgaaatggcttcaattgcacgacttctacatgttggcactaaaaaaatttacaagcaaaacagggacatttgtgttgtaaaacttccattgatatttacctcacttggagatatattatcaagtgaattcgaagaggcgagattttcatctctggagggttttaaaggtttaatagataactgcattgatgaaaccttggtgtcacagggtattgctcagatgaaggctagacatcaagggttgaaatcagatccaacaatcatagataagatatgtgctatcctagaaggcttgctagatgtccgctacagtgacgtctgggacagatcatttcatgtaatttcagtggcatttgacaaactaggagagttttcagctgatctattgcccgaagcagtcaggaacttggcagacatgcaaaacttgtcagatgatgacttttcctttcggaagcagcttgatgcatgtcttggttcagcggttgctgcaatggggccaaagaatattctggaaattcttcagattcagtcaataagtgatgaaaatgaatggattctccctattctggagaagcacattgttggtgccagtttacaatttttcttaagagatattctgagtatggttggtgccatagagaaaaacattcctaagg

SEQ ID NO: 51702 - DNA, 1685 bp, Zea Mays
gcgtcagctgccgagctcactgtgtattcggtcggcgcgtgccgcttcccatacccccgcgcgctccccatggccgacgtcgacatggctgacctcccacagaccccgcgatccaccgccggcgacgacgacctctccttgctggacggagagggcgacctcgccgccgccatcctcgcgcgcctcggcggctcgccgcgggaggactttcagcacctctgtgccaccgccgccgccatggcgcaggccgttagcgaccaaggagtgcccgccaccccagtagcctacttcgcagcggctgctgcggcgcttgccccgctcgctcgcgcgggggacgccggcgccgaccgccacgtcgccggagcgctcctcgccttcctctccgcggcgctgccggccctcccggccgcagtggtgcgcgcccgtggccgtgaggtcgccgatgacgtgatgcgcgtgctcgatttcccttccacgcctgattcaggcgtcagggcggggctgagatgcctcgcgcatttgatatctgcgggggacagggcgaactgggaggcggtagagcctttatacactgtgattctgcgcctcagtaccgatcaccggctaaaggtgcggaaacaatctcattcatgcttgcatgatgttctcctgagttttcaaaggcaaacaattttgattccagcaagtgaagcaataacaagatcttttgagcggtttctgctgcttgctggaggatctagtgctgtaaatacaggtgtatcagaggaaggccccaagggggctaaggaggtcctgtatattttgaatgctttgatatgctgccttccccttatggcctccaaaccttccaatactatcttgaaatattttaaaccactattagatttgcatcaaccaattttgataaggagtcttctggacattctgcatgctgtttgtgagagtccaaccgtacagctcaaatctgatgtgttattggaccttctgtgctcgttgggtctgtcagtgtcttcagaaaggaaatcaggagatgaaatggcttcaattgcacgacttctacatgttggcactaaaaaaatttacaagcaaaacagggacatttgtgttgtaaaacttccattgatatttacctcacttggagatatattatcaagtgaattcgaagaggcgagattttcatctctggagggttttaaaggtttaatagataactgcattgatgaaaccttggtgtcacagggtattgctcagatgaaggctagacatcaagggttgaaatcagatccaacaatcatagataagatatgtgctatcctagaaggcttgctagatgtccgctacagtgacgtctgggacagatcatttcatgtaatttcagtggcatttgacaaactaggagttttcagctgatctattgcccgaagcagtcaggaacttggcagacatgcaaaacttgtcagatgatgacttttcctttcggaagcagcttgatgcatgtcttggttcagcggttgctgcaatggggccaaagaatattctggaaattcttcagattcagtcaataagtgatgaaaatgaatggattctccctattctggagaagcacattgttggtgccagtttacaatttttcttaagagatattctgagtatggttggtgccatagagaaaaacattcctaagg

SEQ ID NO: 51703 - DNA, 1589 bp, Zea Mays
gcgtcagctgccgagctcactgtgtattcggtcggcgcgtgccgcttcccatacccccgcgcgctccccatggccgacgtcgacatggctgacctcccacagaccccgcgatccaccgccggcgacgacgacctctccttgctggacggagagggcgacctcgccgccgccatcctcgcgcgcctcggcggctcgccgcgggaggactttcagcacctctgtgccaccgccgccgccatggcgcaggccgttagcgaccaaggagtgcccgccaccccagtagcctacttcgcagcggctgctgcggcgcttgccccgctcgctcgcgcgggggacgccggcgccgaccgccacgtcgccggagcgctcctcgccttcctctccgcggcgctgccggccctcccggccgcagtggtgcgcgcccgtggccgtgaggtcgccgatgacgtgatgcgcgtgctcgatttcccttccacgcctgattcaggcgtcagggcggggctgagatgcctcgcgcatttgatatctgcgggggacagggcgaactgggaggcggtagagcctttatacactgtgattctgcgcctcagtaccgatcaccggctaaaggtgcggaaacaatctcattcatgcttgcatgatgttctcctgagttttcaaaggcaaacaattttgattccagcaagtgaagcaataacaagatcttttgagcggtttctgctgcttgctggaggatctagtgctgtaaatacaggtgtatcagaggaaggccccaagggggctaaggaggtcctgtatattttgaatgctttgatatgctgccttccccttatggcctccaaaccttccaatactatcttgaaatattttaaaccactattagatttgcatcaaccaattttgataaggagtcttctggacattctgcatgctgtttgtgagagtccaaccgtacagctcaaatctgatgtgttattggaccttctgtgctcgttgggtctgtcagtgtcttcagaaaggaaatcaggagatgaaatggcttcaattgcacgacttctacatgttggcactaaaaaaatttacaagcaaaacagggacatttgtgttgtaaaacttccattgatatttacctcacttggagggtattgctcagatgaaggctagacatcaagggttgaaatcagatccaacaatcatagataagatatgtgctatcctagaaggcttgctagatgtccgctacagtgacgtctgggacagatcatttcatgtaatttcagtggcatttgacaaactaggagagttttcagctgatctattgcccgaagcagtcaggaacttggcagacatgcaaaacttgtcagatgatgacttttcctttcggaagcagcttgatgcatgtcttggttcagcggttgctgcaatggggccaaagaatattctggaaattcttcagattcagtcaataagtgatgaaaatgaatggattctccctattctggagaagcacattgttggtgccagtttacaatttttcttaagagatattctgagtatggttggtgccatagagaaaaacattcctaagg

SEQ ID NO: 51704 - DNA, 2287 bp, Zea Mays
tcctccagtattcaggttttaatcaaacaaaacaaaaaagctctgtcagtttctagggaagaagacattcttgctgaggatgaaataagcaaatctgaaagaagagcaaaggaacgttatactcaaaatctggctgaggaaaacttgaaagcgatacgtgctttctcttctaagcttttggaagtactttgttctatattcttgatgtcttcgaatgatgctattggattattgcagacaaaaacgttgttgggaaattcttccttgatgcaataagaaagttgttggatgctacaaaggctgttaatgcagagcctgtggatgatagttcaatggaaattgaagccgattccaacaaaaatagcatgaagagggctctacttttggattttgcagcttcattgatgcctggtttagctgcaaagtctatcaatgtgttgttcagttatgtgaaacctgcaattaaggacagcgactctttgattcaaaagagagcgtacaaggtcctgtcaatgctgctcaaggatgctgaatttattgaaaagaatctggatgtcctgtcagaattgatgatttcgtcactaccatgccaatttccctcgaaacgttacagactcgaatgcctataccaccttattgtttacattttgaaggattcatctatggttagaaagagagaaattattagttcattcatcactgaaatacttcttgcattgaaggaggccaacaagaaaaccagaaacagagcttatgatttgcttattgaaattgcccgtgcctgtgaaaatgctggaaatgacgaggggaaggagggcttgcaccagttctttggcatggttgctggtggtctggccgctggtcaaacgccatatgcaattagtgctgttgtaactgggttggctcggttgacttatgaattctcagagcttatcggagtcgcatacaatctccttcctcagactttcttgcttatgcaaaggaacaaccgggaaatagtcaaagcgaacttaggttttgtcaaagctttagttgctaaatctaaagctgacatattgcatgaacacttgactggagttgttgagggcctgctgagctggcaaagtgatacaaagaattcctttaaagctaaggtcaagtcactcatagaaattcttgtgaagaaatgtggtttagacgctgtgaaggctgtgatgcctgaggagcatatgaaattgctcacgaatattaggaagattaatgagcgaaaaatgcgaaaggcaaaatcttctgaggatggggatgccatgtctatggcctcaggagctacaaggcaaagtaggtggaatcacacacaaatgttttcggactttggaagtgatgatgaatcagatggtcctttttctacccaacatactgctacttctcgatctcgtactgaatcaaaagcttcaactcggttgagtcggaggcgccaaggagataagaaactactagacaagttcattgaccattcaactggcgaccccctagatttacttgaccagaaaacggtgcggttggctctcaaatcagcagcagggaaaaagagggctgcacccgatgacgacgacgataagttcgaggtggaccctgaaggccgtataatcgtgcgcgaagagcgggagaagtggaaaaagaagccggcccctcgtgacgacgaggaggctgatggaaagagctctgtcagaagccagtccatcaagaagaggaagacatccggctctggctgggcctacactggtcatgagtacaccagcaagaaagccagtggtgatctgaagaagaaagacaagatggaaccttacgcgtactggccgctggaccgtaagcttctcaaccgcaggtcggaccgcaaggcgtctgcgcgcaagggtatgtccagtgtcatgaagatcaccaagaagctcgaagggaagagtgcaagcgccgcgctttctgctaaacggtcgggaaaaacgaagcacaaaaagaacaaataagtgggtagtggcgaagcttcctactttataggagccgaccagatgatttttttggagaaatttgctaccattttttttggtgggtaggggtggatttcggtctgtacagttcgggaattcagaacaccgtagttcttgtcttttcggataagttttgtattagaaccttgacactttggtgtttgtattagactggatcgtgattcgttctgattgtttggtgactagtaaatcttgtgttttgttgtgcacttgtgctgactaccgaaaaacattgagaaaaaaag

SEQ ID NO: 51705 - DNA, 2192 bp, Zea Mays
tcctccagtattcaggttttaatcaaacaaaacaaaaaagctctgtcagtttctagggaagaagacattcttgctgaggatgaaataagcaaatctgaaagaagagcaaaggaacgttatactcaaaatctggctgaggaaaacttgaaagcgatacgtgctttctcttctaagcttttggaagtactttgttctatattcttgatgtcttcgaatgatgctattggattattgcagcctgcgataagtgagatagcttccatatcagacaaaaacgttgttgggaaattcttccttgatgcaataagaaagttgttggatgctacaaagtctatcaatgtgttgttcagttatgtgaaacctgcaattaaggacagcgactctttgattcaaaagagagcgtacaaggtcctgtcaatgctgctcaaggatgctgaatttattgaaaagaatctggatgtcctgtcagaattgatgatttcgtcactaccatgccaatttccctcgaaacgttacagactcgaatgcctataccaccttattgtttacattttgaaggattcatctatggttagaaagagagaaattattagttcattcatcactgaaatacttcttgcattgaaggaggccaacaagaaaaccagaaacagagcttatgatttgcttattgaaattgcccgtgcctgtgaaaatgctggaaatgacgaggggaaggagggcttgcaccagttctttggcatggttgctggtggtctggccgctggtcaaacgccatatgcaattagtgctgttgtaactgggttggctcggttgacttatgaattctcagagcttatcggagtcgcatacaatctccttcctcagactttcttgcttatgcaaaggaacaaccgggaaatagtcaaagcgaacttaggttttgtcaaagctttagttgctaaatctaaagctgacatattgcatgaacacttgactggagttgttgagggcctgctgagctggcaaagtgatacaaagaattcctttaaagctaaggtcaagtcactcatagaaattcttgtgaagaaatgtggtttagacgctgtgaaggctgtgatgcctgaggagcatatgaaattgctcacgaatattaggaagattaatgagcgaaaaatgcgaaaggcaaaatcttctgaggatggggatgccatgtctatggcctcaggagctacaaggcaaagtaggtggaatcacacacaaatgttttcggactttggaagtgatgatgaatcagatggtcctttttctacccaacatactgctacttctcgatctcgtactgaatcaaaagcttcaactcggttgagtcggaggcgccaaggagataagaaactactagacaagttcattgaccattcaactggcgaccccctagatttacttgaccagaaaacggtgcggttggctctcaaatcagcagcagggaaaaagagggctgcacccgatgacgacgacgataagttcgaggtggaccctgaaggccgtataatcgtgcgcgaagagcgggagaagtggaaaaagaagccggcccctcgtgacgacgaggaggctgatggaaagagctctgtcagaagccagtccatcaagaagaggaagacatccggctctggctgggcctacactggtcatgagtacaccagcaagaaagccagtggtgatctgaagaagaaagacaagatggaaccttacgcgtactggccgctggaccgtaagcttctcaaccgcaggtcggaccgcaaggcgtctgcgcgcaagggtatgtccagtgtcatgaagatcaccaagaagctcgaagggaagagtgcaagcgccgcgctttctgctaaacggtcgggaaaaacgaagcacaaaaagaacaaataagtgggtagtggcgaagcttcctactttataggagccgaccagatgatttttttggagaaatttgctaccattttttttggtgggtaggggtggatttcggtctgtacagttcgggaattcagaacaccgtagttcttgtcttttcggataagttttgtattagaaccttgacactttggtgtttgtattagactggatcgtgattcgttctgattgtttggtgactagtaaatcttgtgttttgttgtgcacttgtgctgactaccgaaaaacattgagaaaaaaag

SEQ ID NO: 51706 - DNA, 2921 bp, Zea Mays
tttctctctctcgtctctagacgtgcggtgcagcagctgtattcgccgcaacctcctcccatcccttgcgccagcggattccttggctgcgcggaattctcctagcctcccgagcctccccagctcgagaagggagctcacggtgacgcggcgcgaagggccgggtcagatcttggccgttggccccgaggcggcggtttcgcgtggggtccagcagagcccggcccgcgcgggagccgctctgattcgccgggggacgccgcggggaatgctctacctcaagctgccggcgggggatctagggttccgtccgggggcgccgaggcggggatccggcggcggcggggcctgagggtggcgcgggcgtcggaggcggccgccatggagcaggacccggagcgcgcctgccttcggagcttcgagctccacgagagcgagtcgagcctttacgttctaggaactaattctgacagaacactttggagactactcaagatcgatagatcagagccgtcagagcttgtgatagacgagtgttctactgtatatactgaaagtgaacatcctgacttgttgaagggtcttgatgacgagcacaggtcaactggcggagtaaaatttgttacaaagttttatggcataattggttttatcaaattccttgggccatattacatgttgattattactgagcagaaaaaaatcggggaaatctttggtcatccagtgtatcaggtgaccaggacttcaatggttgaattagcaaattctaagacaagatctacttttcaaaacttcaaggacgagaacagatacaggaagatcttgaatgcacttgatcttaggaaggatttctttttcagttactcataccacattatgagaagtcttcagaagaacttggctgatccacaggatggatggaccttatacgagactatctttgtgtggaatgagtatctgacacggcggatccgtaattgtctcagaaatactttgtggactgttgcattggtccatggtttctttaagcaggataaattctcaatatctggcaaggatattatgttcacactcatcgctagacggtcgaggcattatgctggaaccagatatttaaagaggggggtgaatgagaagggaagagtagcaaatgatgttgagactgagcaaattgtctatgaagctgtgcctggacctactgaagtaagttctgttgtgcagaataggggctcaattccactattctggtcacaggagacatcaaaattgaatcttaaacctgatataatatgtaagttgaaaaccttactatgacgcacccatcattttcatcaactccacaagtaaaagttccccattttgtcagtgcatgagatgcagaataattatgaagctacagagcttcattttgaaaatcttagagcaagatatggaaaccctatcattatcttaaacttgattaagacacgtgagaggcgagagtctatactccgccgagaatttgataaggcgatcaagataataaacaagagcctgtcagaagagaatcatctgaggttcttacattgggatcttcatcaaaactctcaaggaaaacctacaaatgtactcgacgtccttctaaaagtggcatttcgggctctgaatttaactgagttcttctattgtcaagtcgcaccaaattctgagacttctgcacaatgccccaccctattgaatggtcttgatcaatatttatgtgatgacaacaatagtgacgacacagaatgcactgagattgttggtgatgtatcccaagaggatatctcaggcagctctgattcctctggtaatgcaaccacagaagataaatttgagaatagtggactgccaccaccaaaaccaccaaaattccaaaaaggtgttttgaggacaaactgtatagattgcttggatcgtacaaatgttgctcagtatgcacatggtttagctgctcttggacatcaattgcatgcgcttggttttatagaatctccagaactaggtttagaagctcccttggcccatcatttgatgcacttttatgagatgatgggtgacacacttgctgtacagtatagcggttctgctgctcataacaaggtattctctgcaaagagaggtcacttgaagctttttattcagtcacaagagttctttaggacacttcagcggcactacagcaacacctgtatagatgctaacaaacaggctgctataaacttgtttttgggatacttccagccacagcaggaaaaacctgcactgtgggagttagaatcatctgctgggaagcataacaataatctttttgatggccacccaaggtaagtcaagaatatatttagtgacatagtatatcagttcttaaatattttcatcatcatcatcaacatcaaagccttttagtcccaagcaagctagggtatgctagagttgaaagctaaccaaaaccataggtcaagtttcaagcacatagatagctgttttccatgcactcctattcaaggctaaagctttgggtgcattgcatcctgtcaagtctccttttaccgcattttcccatatcaacttcagttttcccgttcgaacactagtcaaaacaatgttcttaattattttcatgttttgaggtaattgcaagaacgccattaagctgtgatgcattcattgtacttggaagtgtttaatattaacctttatgtccataaacgtagggctgcatagtggctatacgtgatccattaaaagcttcatatttgtgcattctattgtttgtttaatttcgtttgacctgttttgtccactcatagtattttttatttttttaatatcttctctatctacccacctatacctaataataaagaatgaagagtttcttccagcctgcatttttt

SEQ ID NO: 51707 - DNA, 2842 bp, Zea Mays
tttctctctctcgtctctagacgtgcggtgcagcagctgtattcgccgcaacctcctcccatcccttgcgccagcggattccttggctgcgcggaattctcctagcctcccgagcctccccagctcgagaagggagctcacggtgacgcggcgcgaagggccgggtcagatcttggccgttggccccgaggcggcggtttcgcgtggggtccagcagagcccggcccgcgcgggagccgctctgattcgccgggggacgccgcggggaatgctctacctcaagctgccggcgggggatctagggttccgtccgggggcgccgaggcggggatccggcggcggcggggcctgagggtggcgcgggcgtcggaggcggccgccatggagcaggacccggagcgcgcctgccttcggagcttcgagctccacgagagcgaagcctttacgttctaggaactaattctgacagaacactttggagactactcaagatcgatagatcagagccgtcagagcttgtgatagacgagtgttctactgtatatactgaaagtgaacatcctgacttgttgaagggtcttgatgacgagcacaggtcaactggcggagtaaaatttgttacaaagttttatggcataattggttttatcaaattccttgggccatattacatgttgattattactgagcagaaaaaaatcggggaaatctttggtcatccagtgtatcaggtgaccaggacttcaatggttgaattagcaaattctaagacaagatctacttttcaaaacttcaaggacgagaacagatacaggaagatcttgaatgcacttgatcttaggaaggatttctttttcagttactcataccacattatgagaagtcttcagaagaacttggctgatccacaggatggatggaccttatacgagactatctttgtgtggaatgagtatctgacacggcggatccgtaattgtctcagaaatactttgtggactgttgcattggtccatggtttctttaagcaggataaattctcaatatctggcaaggatattatgttcacactcatcgctagacggtcgaggcattatgctggaaccagatatttaaagaggggggtgaatgagaagggaagagtagcaaatgatgttgagactgagcaaattgtctatgaagctgtgcctggacctactgaagtaagttctgttgtgcagaataggggctcaattccactattctggtcacaggagacatcaaaattgaatcttaaacctgatataatattgcatgagatgcagaataattatgaagctacagagcttcattttgaaaatcttagagcaagatatggaaaccctatcattatcttaaacttgattaagacacgtgagaggcgagagtctatactccgccgagaatttgataaggcgatcaagataataaacaagagcctgtcagaagagaatcatctgaggttcttacattgggatcttcatcaaaactctcaaggaaaacctacaaatgtactcgacgtccttctaaaagtggcatttcgggctctgaatttaactgagttcttctattgtcaagtcgcaccaaattctgagacttctgcacaatgccccaccctattgaatggtcttgatcaatatttatgtgatgacaacaatagtgacgacacagaatgcactgagattgttggtgatgtatcccaagaggatatctcaggcagctctgattcctctggtaatgcaaccacagaagataaatttgagaatagtggactgccaccaccaaaaccaccaaaattccaaaaaggtgttttgaggacaaactgtatagattgcttggatcgtacaaatgttgctcagtatgcacatggtttagctgctcttggacatcaattgcatgcgcttggttttatagaatctccagaactaggtttagaagctcccttggcccatcatttgatgcacttttatgagatgatgggtgacacacttgctgtacagtatagcggttctgctgctcataacaaggtattctctgcaaagagaggtcacttgaagctttttattcagtcacaagagttctttaggacacttcagcggcactacagcaacacctgtatagatgctaacaaacaggctgctataaacttgtttttgggatacttccagccacagcaggaaaaacctgcactgtgggagttagaatcatctgctgggaagcataacaataatctttttgatggccacccaaggtaagtcaagaatatatttagtgacatagtatatcagttcttaaatattttcatcatcatcatcaacatcaaagccttttagtcccaagcaagctagggtatgctagagttgaaagctaaccaaaaccataggtcaagtttcaagcacatagatagctgttttccatgcactcctattcaaggctaaagctttgggtgcattgcatcctgtcaagtctccttttaccgcattttcccatatcaacttcagttttcccgttcgaacactagtcaaaacaatgttcttaattattttcatgttttgaggtaattgcaagaacgccattaagctgtgatgcattcattgtacttggaagtgtttaatattaacctttatgtccataaacgtagggctgcatagtggctatacgtgatccattaaaagcttcatatttgtgcattctattgtttgtttaatttcgtttgacctgttttgtccactcatagtattttttatttttttaatatcttctctatctacccacctatacctaataataaagaatgaagagtttcttccagcctgcatttttt

SEQ ID NO: 51708 - DNA, 3131 bp, Zea Mays
tttctctctctcgtctctagacgtgcggtgcagcagctgtattcgccgcaacctcctcccatcccttgcgccagcggattccttggctgcgcggaattctcctagcctcccgagcctccccagctcgagaagggagctcacggtgacgcggcgcgaagggccgggtcagatcttggccgttggccccgaggcggcggtttcgcgtggggtccagcagagcccggcccgcgcgggagccgctctgattcgccgggggacgccgcggggaatgctctacctcaagctgccggcgggggatctagggttccgtccgggggcgccgaggcggggatccggcggcggcggggcctgagggtggcgcgggcgtcggaggcggccgccatggagcaggacccggagcgcgcctgccttcggagcttcgagctccacgagagcgagtcgagcctttacgttctaggaactaattctgacagaacactttggagactactcaagatcgatagatcagagccgtcagagcttgtgatagacgagtgttctactgtatatactgaaagtgaacatcctgacttgttgaagggtcttgatgacgagcacaggtcaactggcggagtaaaatttgttacaaagttttatggcataattggttttatcaaattccttgggccatattacatgttgattattactgagcagaaaaaaatcggggaaatctttggtcatccagtgtatcaggtgaccaggacttcaatggttgaattagcaaattctaagacaagatctacttttcaaaacttcaaggacgagaacagatacaggaagatcttgaatgcacttgatcttaggaaggatttctttttcagttactcataccacattatgagaagtcttcagaagaacttggctgatccacaggatggatggaccttatacgagactatctttgtgtggaatgagtatctgacacggcggatccgtaattgtctcagaaatactttgtggactgttgcattggtccatggtttctttaagcaggataaattctcaatatctggcaaggatattatgttcacactcatcgctagacggtcgaggcattatgctggaaccagatatttaaagaggggggtgaatgagaagggaagagtagcaaatgatgttgagactgagcaaattgtctatgaagctgtgcctggacctactgaaaataattatgaagctacagagcttcattttgaaaatcttagagcaagatatggaaaccctatcattatcttaaacttgattaagacacgtgagaggcgagagtctatactccgccgagaatttgataaggcgatcaagataataaacaagagcctgtcagaagagaatcatctgaggttcttacattgggatcttcatcaaaactctcaaggaaaacctacaaatgtactcgacgtccttctaaaagtggcatttcgggctctgaatttaactgagttcttctattgtcaagtcgcaccaaattctgagacttctgcacaatgccccaccctattgaatggtcttgatcaatatttatgtgatgacaacaatagtgacgacacagaatgcactgagattgttggtgatgtatcccaagaggatatctcaggcagctctgattcctctggtaatgcaaccacagaagataaatttgagaatagtggactgccaccaccaaaaccaccaaaattccaaaaaggtgttttgaggacaaactgtatagattgcttggatcgtacaaatgttgctcagtatgcacatggtttagctgctcttggacatcaattgcatgcgcttggttttatagaatctccagaactaggtttagaagctcccttggcccatcatttgatgcacttttatgagatgatgggtgacacacttgctgtacagtatagcggttctgctgctcataacaaggtattctctgcaaagagaggtcacttgaagctttttattcagtcacaagagttctttaggacacttcagcggcactacagcaacacctgtatagatgctaacaaacaggctgctataaacttgtttttgggatacttccagccacagcaggaaaaacctgcactgtgggagttagaatcatctgctgggaagcataacaataatctttttgatggccacccaagtacattgaaaagagtaaaatcagatggcaccattcttcatgaaagtaatgcttctatatctggctctggtcgttgccataatgaacagttaagtgcatcgcagcctgatgtccagaatgggtttcaattcccaacttcagaatccgattcacttcatgaaaatgacatttcatcagcttgtggaagtggagtagcacacctaaggtatactcctacagcctctgacgtgcttcatgtcccaagagctaaagttgaatattgccatgattctggtgattcaaactttttggatcttgaatggctttccacttcaggcaactcaagtgatgaaaggtctattgcaactagcacgccagatgcaaacctatcaaatgagaatgtcattagtggcataactcctgatatcatggaaaaccatcttgctgaaatgcagtatcagaagttacctcggaattttgtgcagtgggttaatcacggtgataccttttggtactaagatcgcaattactggaattcaatatgtcgccagcttcccagggtgggcattaacacggatctgagtagtagattatagagtgatatggatgctgcggcaaggcatttctcccgtgatatactccgcaccatccccaaagtcctttattggtccacgtgtttttacaatgggtgagtagatagatatctttctgttgaaagaaaatagagatgataattaggcttattattgttgacctgaaattgtcattattcatgggaacatgtcatattttcttgtgtaaatatatatgcttgaggtgcctttggtggtggttgttctgttgcggagcagctgtcgccccgacggaggacggtcgcagggcgaccacgtgcagctcccgcgcccgcgtcccatcctggctgagcgcacccgccgcgactattctcacttctcagtgcattgcgtcatttcaaaatccaaaa

SEQ ID NO: 51709 - DNA, 3145 bp, Zea Mays
tttctctctctcgtctctagacgtgcggtgcagcagctgtattcgccgcaacctcctcccatcccttgcgccagcggattccttggctgcgcggaattctcctagcctcccgagcctccccagctcgagaagggagctcacggtgacgcggcgcgaagggccgggtcagatcttggccgttggccccgaggcggcggtttcgcgtggggtccagcagagcccggcccgcgcgggagccgctctgattcgccgggggacgccgcggggaatgctctacctcaagctgccggcgggggatctagggttccgtccgggggcgccgaggcggggatccggcggcggcggggcctgagggtggcgcgggcgtcggaggcggccgccatggagcaggacccggagcgcgcctgccttcggagcttcgagctccacgagagcgagtcgagcctttacgttctaggaactaattctgacagaacactttggagactactcaagatcgatagatcagagccgtcagagcttgtgatagacgagtgttctactgtatatactgaaagtgaacatcctgacttgttgaagggtcttgatgacgagcacaggtcaactggcggagtaaaatttgttacaaagttttatggcataattggttttatcaaattccttgggccatattacatgttgattattactgagcagaaaaaaatcggggaaatctttggtcatccagtgtatcaggtgaccaggacttcaatggttgaattagcaaattctaagacaagatctacttttcaaaacttcaaggacgagaacagatacaggaagatcttgaatgcacttgatcttaggaaggatttctttttcagttactcataccacattatgagaagtcttcagaagaacttggctgatccacaggatggatggaccttatacgagactatctttgtgtggaatgagtatctgacacggcggatccgtaattgtctcagaaatactttgtggactgttgcattggtccatggtttctttaagcaggataaattctcaatatctggcaaggatattatgttcacactcatcgctagacggtcgaggcattatgctggaaccagatatttaaagaggggggtgaatgagaagggaagagtagcaaatgatgttgagactgagcaaattgtctatgaagctgtgcctggacctactgaagtaagttctgttgtgcagaataggggctcaattccactattctggtcacaggagacatcaaaattgaatcttaaacctgatataatattgcatgagatgcagaataattatgaagctacagagcttcattttgaaaatcttagagcaagatatggaaaccctatcattatcttaaacttgattaagacacgtgagaggcgagagtctatactccgccgagaatttgataaggcgatcaagataataaacaagagcctgtcagaagagaatcatctgaggttcttacattgggatcttcatcaaaactctcaaggaaaacctacaaatgtactcgacgtccttctaaaagtggcatttcgggctctgaatttaactgagttcttctattgtcaagtcgcaccaaattctgagacttctgcacaatgccccaccctattgaatggtcttgatcaatatttatgtgatgacaacaatagtgacgacacagaatgcactgagattgttggtgatgtatcccaagaggatatctcaggcagctctgattcctctggtaatgcaaccacagaagataaatttgagaatagtggactgccaccaccaaaaccaccaaaattccaaaaaggtgttttgaggacaaactgtatagattgcttggatcgtacaaatgttgctcagtatgcacatggtttagctgctcttggacatcaattgcatgcgcttggttttatagaatctccagaactaggtttagaagctcccttggcccatcatttgatgcacttttatgagatgatgggtgacacacttgctgtacagtatagcggttctgctgctcataacaaggtattctctgcaaagagaggtcacttgaagctttttattcagtcacaagagttctttaggacacttcagcggcactacagcaacacctgtatagatgctaacaaacaggctgctataaacttgtttttgggatacttccagccacagcaggaaaaacctgcactgtgggagttagaatcatctgctgggaagcataacaataatctttttgatggccacccaagttaagtgcatcgcagcctgatgtccagaatgggtttcaattcccaacttcagaatccgattcacttcatgaaaatgacatttcatcagcttgtggaagtggagtagcacacctaaggtatactcctacagcctctgacgtgcttcatgtcccaagagctaaagttgaatattgccatgattctggtgattcaaactttttggatcttgaatggctttccacttcaggcaactcaagtgatgaaaggtctattgcaactagcacgccagatgcaaacctatcaaatgagaatgtcattagtggcataactcctgatatcatggaaaaccatcttgctgaaatgcagtatcagaagttacctcggaattttgtgcagtgggttaatcacggtgataccttttggtactaagatcgcaattactggaattcaatatgtcgccagcttcccagggtgggcattaacacggatctgagtagtagattatagagtgatatggatgctgcggcaaggcatttctcccgtgatatactccgcaccatccccaaagtcctttattggtccacgtgtttttacaatgggtgagtagatagatatctttctgttgaaagaaaatagagatgataattaggcttattattgttgacctgaaattgtcattattcatgggaacatgtcatattttcttgtgtaaatatatatgcttgaggtgcctttggtggtggttgttctgttgcggagcagctgtcgccccgacggaggacggtcgcagggcgaccacgtgcagctcccgcgcccgcgtcccatcctggctgagcgcacccgccgcgactattctcacttctcagtgcattgcgtcatttcaaaatccaaaa

SEQ ID NO: 51710 - DNA, 3070 bp, Zea Mays
tttctctctctcgtctctagacgtgcggtgcagcagctgtattcgccgcaacctcctcccatcccttgcgccagcggattccttggctgcgcggaattctcctagcctcccgagcctccccagctcgagaagggagctcacggtgacgcggcgcgaagggccgggtcagatcttggccgttggccccgaggcggcggtttcgcgtggggtccagcagagcccggcccgcgcgggagccgctctgattcgccgggggacgccgcggggaatgctctacctcaagctgccggcgggggatctagggttccgtccgggggcgccgaggcggggatccggcggcggcggggcctgagggtggcgcgggcgtcggaggcggccgccatggagcaggacccggagcgcgcctgccttcggagcttcgagctccacgagagcgagtcgagcctttacgttctaggaactaattctgacagaacactttggagactactcaagatcgatagatcagagccgtcagagcttgtgatagacgagtgttctactgtatatactgaaagtgaacatcctgacttgttgaagggtcttgatgacgagcacaggtcaactggcggagtaaaatttgttacaaagttttatggcataattggttttatcaaattccttgggccatattacatgttgattattactgagcagaaaaaaatcggggaaatctttggtcatccagtgtatcaggtgaccaggacttcaatggttgaattagcaaattctaagacaagatctacttttcaaaacttcaaggacgagaacagatacaggaagatcttgaatgcacttgatcttaggaaggatttctttttcagttactcataccacattatgagaagtcttcagaagaacttggctgatccacaggatggatggaccttatacgagactatctttgtgtggaatgagtatctgacacggcggatccgtaattgtctcagaaatactttgtggactgttgcattggtccatggtttctttaagcaggataaattctcaatatctggcaaggatattatgttcacactcatcgctagacggtcgaggcattatgctggaaccagatatttaaagaggggggtgaatgagaagggaagagtagcaaatgatgttgagactgagcaaattgtctatgaagctgtgcctggacctactgaagtaagttctgttgtgcagaataggggctcaattccactattctggtcacaggagacatcaaaattgaatcttaaacctgatataatattgcatgagatgcagaataattatgaagctacagagcttcattttgaaaatcttagagcaagatatggaaaccctatcattatcttaaacttgattaagacacgtgagaggcgagagtctatactccgccgagaatttgataaggcgatcaagataataaacaagagcctgtcagaagagaatcatctgaggttcttacattgggatcttcatcaaaactctcaaggaaaacctacaaatgtactcgacgtccttctaaaagtggcatttcgggctctgaatttaactgagttcttctattgtcaagtcgcaccaaattctgagacttctgcacaatgccccaccctattgaatggtcttgatcaatatttatgtgatgacaacaatagtgacgacacagaatgcactgagattgttggtgatgtatcccaagaggatatctcaggcagctctgattcctctggtaatgcaaccacagaagataaatttgagaatagtggactgccaccaccaaaaccaccaaaattccaaaaaggtgttttgaggacaaactgtatagattgcttggatcgtacaaatgttgctcagtatgcacatggtttagctgctcttggacatcaattgcatgcgcttggttttatagaatctccagaactaggtttagaagctcccttggcccatcatttgatgcacttttatgagatgatgggtgacacacttgctgtacagtatagcggttctgctgctcataacaaggtattctctgcaaagagaggtcacttgaagctttttattcagtcacaagagttctttaggacacttcagcggcactacagcaacacctgtatagatgctaacaaacaggctgctataaacttgtttttgggatacttccagccacagcaggaaaaacctgcactgtgggagttagaatcatctgctgggaagcataacaataatctttttgatggccacccaagtacattgaaaagagtaaaatcagatggcaccattcttcatgaaagtaatgcttctatatctggctctggtcgttgccataatgaacagttaagtgcatcgcagcctgatgtccagaatgggtttcaattcccaacttcagaatccgattcacttcatgaaaatgacatttcatcagcttgtggaagtggagtagcacacctaaggtatactcctacagcctctgacgtgcttcatgtcccaagagctaaagttgaatattgccatgattctggtgattcaaactttttggatcttgaatggctttccacttcaggcaactcaagtgatgaaaggtctattgcaactagcacgccagatgcaaacctatcaaatgagaatgtcattagtggcataactcctgatatcatggaaaaccatcttgctgaaatgcagtatcagaagttacctcggaattttgtgcagtgggttaatcacggtgataccttttggtactaagatcgcaattactggaattcaatatgtcgccagcttcccagggtgggcattaacacggatctgagtagtagattatagagtgatatggatgctgcggcaaggcatttctcccgtgatatactccgcaccatccccaaagtcctttattggtccacgtgtttttacaatggctgtcgccccgacggaggacggtcgcagggcgaccacgtgcagctcccgcgcccgcgtcccatcctggctgagcgcacccgccgcgactattctcacttctcagtgcattgcgtcatttcaaaatccaaaa

SEQ ID NO: 51711 - DNA, 2043 bp, Zea Mays
gtctatgaagctgtgcctggacctactgaagtaagttctgttgtgcagaataggggctcaattccactattctggtcacaggagacatcaaaattgaatcttaaacctgatataatataataattatgaagctacagagcttcattttgaaaatcttagagcaagatatggaaaccctatcattatcttaaacttgattaagacacgtgagaggcgagagtctatactccgccgagaatttgataaggcgatcaagataataaacaagagcctgtcagaagagaatcatctgaggttcttacattgggatcttcatcaaaactctcaaggaaaacctacaaatgtactcgacgtccttctaaaagtggcatttcgggctctgaatttaactgagttcttctattgtcaagtcgcaccaaattctgagacttctgcacaatgccccaccctattgaatggtcttgatcaatatttatgtgatgacaacaatagtgacgacacagaatgcactgagattgttggtgatgtatcccaagaggatatctcaggcagctctgattcctctggtaatgcaaccacagaagataaatttgagaatagtggactgccaccaccaaaaccaccaaaattccaaaaaggtgttttgaggacaaactgtatagattgcttggatcgtacaaatgttgctcagtatgcacatggtttagctgctcttggacatcaattgcatgcgcttggttttatagaatctccagaactaggtttagaagctcccttggcccatcatttgatgcacttttatgagatgatgggtgacacacttgctgtacagtatagcggttctgctgctcataacaaggtattctctgcaaagagaggtcacttgaagctttttattcagtcacaagagttctttaggacacttcagcggcactacagcaacacctgtatagatgctaacaaacaggctgctataaacttgtttttgggatacttccagccacagcaggaaaaacctgcactgtgggagttagaatcatctgctgggaagcataacaataatctttttgatggccacccaagtacattgaaaagagtaaaatcagatggcaccattcttcatgaaagtaatgcttctatatctggctctggtcgttgccataatgaacagttaagtgcatcgcagcctgatgtccagaatgggtttcaattcccaacttcagaatccgattcacttcatgaaaatgacatttcatcagcttgtggaagtggagtagcacacctaaggtatactcctacagcctctgacgtgcttcatgtcccaagagctaaagttgaatattgccatgattctggtgattcaaactttttggatcttgaatggctttccacttcaggcaactcaagtgatgaaaggtctattgcaactagcacgccagatgcaaacctatcaaatgagaatgtcattagtggcataactcctgatatcatggaaaaccatcttgctgaaatgcagtatcagaagttacctcggaattttgtgcagtgggttaatcacggtgataccttttggtactaagatcgcaattactggaattcaatatgtcgccagcttcccagggtgggcattaacacggatctgagtagtagattatagagtgatatggatgctgcggcaaggcatttctcccgtgatatactccgcaccatccccaaagtcctttattggtccacgtgtttttacaatgggtgagtagatagatatctttctgttgaaagaaaatagagatgataattaggcttattattgttgacctgaaattgtcattattcatgggaacatgtcatattttcttgtgtaaatatatatgcttgaggtgcctttggtggtggttgttctgttgcggagcagctgtcgccccgacggaggacggtcgcagggcgaccacgtgcagctcccgcgcccgcgtcccatcctggctgagcgcacccgccgcgactattctcacttctcagtgcattgcgtcatttcaaaatccaaaa

SEQ ID NO: 51712 - DNA, 5351 bp, Zea Mays
ctaaataaatgggagagcaatttctgctcgtctcttcctcttcccgaaaaccagtaactggcggaacaaacggtgataatttaatttctgctcgtttcttccccctccccacttccaccgttccacgttccacacacggcagcggcatggacgggcttgagaggagctcgctctcggtggaccaactccccgacgacgccctcgtgcagatcctctcgcgcctcggcgccaagtcgctgtgccgatccaagtgcgtctccaaaccgtggcgcgacctcatcgccgatcgcctctactgcaaggatctcccccaatcgctgcaagggttcctctacttcgacgtcggaagacgcggcgacggccacgatgctgctgctgctaatgcctacggcggcgatctcgccggcagccgcgacgggatgctgcttcgccacggccacgggcgtttcatcgacctgcttggtaaacccatgccactcctcgacccttcgttcgcctttttgaaggagcagccgggcgtcaatgctatcgagctcctcgattcctgcaacggcctcctcctctttggacacaggcgggtttcagacacatacgactccctgggctacatcgtgtgcaaccctgtcaccgaacagtgggtggcgataccatcctccggctggactccgactccagcagaagaaattgtggacgaacacgtcaaggacccgcgtccctttatcatcttcgacccatccctctcctcgaacttcgacattgtgcagttctggcaagatggcacggtggacgatgtggaaggggtgcatgttaaaataggatattttctatatatagtctaggatcttttgtatatggcagttcctaaattatagggttagattgttgatttgcaatcaccgtgatatggttgttgtaacttccttctgtaagccaccgcaggagggctgttctccttgcctatattaacacggaaccgagggcctgtattggtatcctcgttaatctacttttacatggtaccaaagccgcatagtcccaacggacattcatggcgttcgcctcttcctccgcagcgcaagcaactgccctcggcgtcttcctcatcccacccgccgagaaactctcgcgcagcaaccatgtgctttggaaagcacaagtcctagccgccatcaagggggcacaactcgatggcttcatcgagccgatggcggcggctctagatcggttcctcccgtcgaagtccgatgcgaaggaaggtgatcctctggtggcaaatccggagtatgcatcctgggtagcaaaggaccaaacggtcctgagctatcttctgtccaatcttggacgggacatcgccgcacaagtctccatgaaggtgacggcggcatctgcatgggcgcacatcgaagagatgttcgcctctcaaagccgtgcgcgtctgatctccacacgcatggcactggcaacgacgacaaagggaagcttcaccatgaatgagtacttcacgaagatgaagggcttggccgatgacatggcgtcggccggcaaaagaattgaagatgatgagctcgtagcctacatcctcaccgggctaaatgatcccgagtatgactcgatcgtcacgggcgtgagcaacaggactcagccgatctccgttggggagttgtatacccaactggcgagtcatgagcagagggtggagatgagaagcagtggtagccagtcgtccgccaacgtcgctgcgaaggggaatcgcagcaacttcaagccaaaccaaggaagtggtggccgccctaatggtggccgtggaggtttcaaccgtggccccaagggtggtcgcactggtacttggactccttccccggagtaccagaacggcgtcaagtgtcagatctgtggcctcaagggtcaccctgcctggaagtgctacaatcgattcgatgagcgctacaacggcaaccgtccacagaagtctgcctccgctgcatcaaccaactacggtgtggacacaaactggtacatggattcaggtgccaccgatcacatcactggagagctgaacaagatgaccgtccgtaacgagtatcacggaggagagcaggtgcatgcggccaacggctcaggggacgaagcaaatacttcatagaggcaagtgcgaggctggcctctatcctatcaagctatcctccagtgagtcatcatccaataagcagatccttggtgctgcaaaggtgtccccgtcgctgtggcatcataggctcggtcacccctctactccagtcgtccagcatatccttagtcatcatagtcttcctgttagtcgagaaagaaacaataatcatgtttgtgattcgtgtcaacagggcaaaatgcatcaattgccctatccaaagtcaaccagtgtgtctactagtcctttggagcttgtgttctctgatgtttggggacctgccccaacttcagttggtcgttatcagtactatgtgagtttcattgatgattactccaagtttacatggatttatttgcttcgtcataaatcagatgtgttttcatgtttccgtgaatttcaaaatctagtagaacgtcaatttgacaagaaaattcttgcattacagagtgattggggtggagagtatcaatctcttaattcattcttaaaaaatgttggcattactcattatgtctcatgtccccatgctcatcaacaaaatggtgcagccgagcgtaaacatcgtcatatagttgagatgggcatcacccttcttgcccatgcatctatgcccttgaaattttgggatgaagccttcctcacttctgtttttttgatcaatcgattaccatccaaagtacttgataatcaatcccctattgaatggctttatggacatgcaccagattacacttttcttcgcacttttggatgtgcagtatggccaaatcttaggccatacaactcacggaaactagaatttcgctccaaacaatgtgtgttcattggttacagcaactctcacaaaggattcaaatgcttggatccaaaagaaggtcgggtttacatctcaagagatgttgtgtttgatgagaatgtcttcccctttgcatcccttcacaaaaatgctggtgcacgtttgcgtgctgagctccaccttctgccagaaattcttcgcaatccatctatgcaatttggggatgcaattgtacttgatcaacaaccggggtctcctggtaatactaatgaagcttccagtactgttgatgtgcaggtgtcttctgaaaaaattttgagctccggggcttccaatggcgacatcaacctcgggctccacttcgtcgtcgtcgactgacagccacgcgacacacacggatccgatcgagggggagcaacaacagcagtcgacagcttcaacgacaggctctcagctctctggtgatccgatcggatcggctgtggctgaaccagccgggtctgcatccaactctgcggtgccggctcctgctcctgctgcacgtcctactaccaggtcacaacatgggatcactcgacccaaacagtataccgacggtacggtaagatggtgtatgcatagtactttatctgctgatgagcctcacagtgttggtgaagctctcaagagtcctcagtggtctcatgcgatggagaatgagcatcaagccttgctcagaaacggcacctggcatctcgtccctaggcccaaagggaagaatgtgattgggtgcaaatgggtgtataaagtgaagaggaaagcagatggttctattgaacgttacaaagcacggctagtggcaaaaggttacaagcaaaggtatggaattgattatgaagacacgtttagtccagttgtaaaagctgctactattcgattagtgttgtctgttgctgtgtcaaagggttggaccttaaggcagttggatgttcaaaatgctttcctccatggcattctagaagaggaggtttatatgcaacaacctccaggatatgaagaccacagatatcctaactatgtctgcaagcttgataaagctatttatggtctaaaacaagctccaagagcttggtatgctcggttatgtgctaagttagtatctttgggtttcataccatccaagtcagatacctccttgttctattttattcagggaaacctgagtatctttgttctggtgtatgttgatgatataattgtggcaagctcttcatctgaagctgttggcccattgttcaagaaattgcagaatgattttgctctgaaggaccttggggagttgcattttttcctcggcattgaagtaaagaaggtacaaaatggcctagtacttaatcaagagaggtatgctagagatatcttggtaagatcagggatgaacaaatgcaaagcaattgatacccctctctctagcagcgaaaaattaagtctggaggatggtaatcctctcagtcctgaagattgtacaaggtacagaagcatggttggagcacttcagtacttaacattgactagacctgatatatcttttgcagtaaataaagtttgccagtttcttcactcacccactacagttcattggagtgcagttaagagaattcttcgttatgttcaaggaacattgagcttggggttaagatttggtaaatccaagtccatggtagtaagtgctttctctgatgcagactgggcagggtgtgtagatgacagaagatcaactggaggttttgcagtattcctagggagtaatttaatttcctggagctctaggaaacaggcaactgtgtcaaggtccagcactgaggcagaatataagtcactggcaaatgcaacagcagagatgatttgggtgcaaaagttgttgagtgaaatgaggattcctcatgcatctacgactctgctatggtgcgacaacctaggtgcaacttatctctcagctaatccagtttttcatgcaagaactaaacacatagagatagattatcattttgtgagagaaagagtagcatcaaagttgttggacgtcaggtttgtaagttcaagtgatcaagtggctgatggttttactaaagctctgccacgtgcaaagttgttagactttaggaacaatctcaaccttgttcgtggctgagattgagggggagtgttaaaataggatattttctatatatagtctaggatcttttgtatatggcagttcctaaattatagggttagattgttgatttgcaatcaccgtgatatggttgttgtaacttccttctgtaagccaccgcaggagggctgttctccttgcctatattaacacggaaccgagggcctgtattggtatcctcgttaatctac

SEQ ID NO: 51713 - DNA, 5357 bp, Zea Mays
ctaaataaatgggagagcaatttctgctcgtctcttcctcttcccgaaaaccagtaactggcggaacaaacggtgataatttaatttctgctcgtttcttccccctccccacttccaccgttccacgttccacacacggcagcggcatggacgggcttgagaggagctcgctctcggtggaccaactccccgacgacgccctcgtgcagatcctctcgcgcctcggcgccaagtcgctgtgccgatccaagtgcgtctccaaaccgtggcgcgacctcatcgccgatcgcctctactgcaaggatctcccccaatcgctgcaagggttcctctacttcgacgtcggaagacgcggcgacggccacgatgctgctgctgctaatgcctacggcggcgatctcgccggcagccgcgacgggatgctgcttcgccacggccacgggcgtttcatcgacctgcttggtaaacccatgccactcctcgacccttcgttcgcctttttgaaggagcagccgggcgtcaatgctatcgagctcctcgattcctgcaacggcctcctcctctttggacacaggcgggtttcagacacatacgactccctgggctacatcgtgtgcaaccctgtcaccgaacagtgggtggcgataccatcctccggctggactccgactccagcagaagaaattgtggacgaacacgtcaaggacccgcgtccctttatcatcttcgacccatccctctcctcgaacttcgacattgtgcagttctggcaagatggcacggtggacgatgtggaaggggtgcatgttaaaataggatattttctatatatagtctaggatcttttgtatatggcagttcctaaattatagggttagattgttgatttgcaatcaccgtgatatggttgttgtaacttccttctgtaagccaccgcaggagggctgttctccttgcctatattaacacggaaccgagggcctgtattggtatcctcgttaatctacttttacatggtaccaaagccgcatagtcccaacggacattcatggcgttcgcctcttcctccgcagcgcaagcaactgccctcggcgtcttcctcatcccacccgccgagaaactctcgcgcagcaaccatgtgctttggaaagcacaagtcctagccgccatcaagggggcacaactcgatggcttcatcgagccgatggcggcggctctagatcggttcctcccgtcgaagtccgatgcgaaggaaggtgatcctctggtggcaaatccggagtatgcatcctgggtagcaaaggaccaaacggtcctgagctatcttctgtccaatcttggacgggacatcgccgcacaagtctccatgaaggtgacggcggcatctgcatgggcgcacatcgaagagatgttcgcctctcaaagccgtgcgcgtctgatctccacacgcatggcactggcaacgacgacaaagggaagcttcaccatgaatgagtacttcacgaagatgaagggcttggccgatgacatggcgtcggccggcaaaagaattgaagatgatgagctcgtagcctacatcctcaccgggctaaatgatcccgagtatgactcgatcgtcacgggcgtgagcaacaggactcagccgatctccgttggggagttgtatacccaactggcgagtcatgagcagagggtggagatgagaagcagtggtagccagtcgtccgccaacgtcgctgcgaaggggaatcgcagcaacttcaagccaaaccaaggaagtggtggccgccctaatggtggccgtggaggtttcaaccgtggccccaagggtggtcgcactggtacttggactccttccccggagtaccagaacggcgtcaagtgtcagatctgtggcctcaagggtcaccctgcctggaagtgctacaatcgattcgatgagcgctacaacggcaaccgtccacagaagtctgcctccgctgcatcaaccaactacggtgtggacacaaactggtacatggattcaggtgccaccgatcacatcactggagagctgaacaagatgaccgtccgtaacgagtatcacggaggagagcaggtgcatgcggccaacggctcaggaacaggggacgaagcaaatacttcatagaggcaagtgcgaggctggcctctatcctatcaagctatcctccagtgagtcatcatccaataagcagatccttggtgctgcaaaggtgtccccgtcgctgtggcatcataggctcggtcacccctctactccagtcgtccagcatatccttagtcatcatagtcttcctgttagtcgagaaagaaacaataatcatgtttgtgattcgtgtcaacagggcaaaatgcatcaattgccctatccaaagtcaaccagtgtgtctactagtcctttggagcttgtgttctctgatgtttggggacctgccccaacttcagttggtcgttatcagtactatgtgagtttcattgatgattactccaagtttacatggatttatttgcttcgtcataaatcagatgtgttttcatgtttccgtgaatttcaaaatctagtagaacgtcaatttgacaagaaaattcttgcattacagagtgattggggtggagagtatcaatctcttaattcattcttaaaaaatgttggcattactcattatgtctcatgtccccatgctcatcaacaaaatggtgcagccgagcgtaaacatcgtcatatagttgagatgggcatcacccttcttgcccatgcatctatgcccttgaaattttgggatgaagccttcctcacttctgtttttttgatcaatcgattaccatccaaagtacttgataatcaatcccctattgaatggctttatggacatgcaccagattacacttttcttcgcacttttggatgtgcagtatggccaaatcttaggccatacaactcacggaaactagaatttcgctccaaacaatgtgtgttcattggttacagcaactctcacaaaggattcaaatgcttggatccaaaagaaggtcgggtttacatctcaagagatgttgtgtttgatgagaatgtcttcccctttgcatcccttcacaaaaatgctggtgcacgtttgcgtgctgagctccaccttctgccagaaattcttcgcaatccatctatgcaatttggggatgcaattgtacttgatcaacaaccggggtctcctggtaatactaatgaagcttccagtactgttgatgtgcaggtgtcttctgaaaaaattttgagctccggggcttccaatggcgacatcaacctcgggctccacttcgtcgtcgtcgactgacagccacgcgacacacacggatccgatcgagggggagcaacaacagcagtcgacagcttcaacgacaggctctcagctctctggtgatccgatcggatcggctgtggctgaaccagccgggtctgcatccaactctgcggtgccggctcctgctcctgctgcacgtcctactaccaggtcacaacatgggatcactcgacccaaacagtataccgacggtacggtaagatggtgtatgcatagtactttatctgctgatgagcctcacagtgttggtgaagctctcaagagtcctcagtggtctcatgcgatggagaatgagcatcaagccttgctcagaaacggcacctggcatctcgtccctaggcccaaagggaagaatgtgattgggtgcaaatgggtgtataaagtgaagaggaaagcagatggttctattgaacgttacaaagcacggctagtggcaaaaggttacaagcaaaggtatggaattgattatgaagacacgtttagtccagttgtaaaagctgctactattcgattagtgttgtctgttgctgtgtcaaagggttggaccttaaggcagttggatgttcaaaatgctttcctccatggcattctagaagaggaggtttatatgcaacaacctccaggatatgaagaccacagatatcctaactatgtctgcaagcttgataaagctatttatggtctaaaacaagctccaagagcttggtatgctcggttatgtgctaagttagtatctttgggtttcataccatccaagtcagatacctccttgttctattttattcagggaaacctgagtatctttgttctggtgtatgttgatgatataattgtggcaagctcttcatctgaagctgttggcccattgttcaagaaattgcagaatgattttgctctgaaggaccttggggagttgcattttttcctcggcattgaagtaaagaaggtacaaaatggcctagtacttaatcaagagaggtatgctagagatatcttggtaagatcagggatgaacaaatgcaaagcaattgatacccctctctctagcagcgaaaaattaagtctggaggatggtaatcctctcagtcctgaagattgtacaaggtacagaagcatggttggagcacttcagtacttaacattgactagacctgatatatcttttgcagtaaataaagtttgccagtttcttcactcacccactacagttcattggagtgcagttaagagaattcttcgttatgttcaaggaacattgagcttggggttaagatttggtaaatccaagtccatggtagtaagtgctttctctgatgcagactgggcagggtgtgtagatgacagaagatcaactggaggttttgcagtattcctagggagtaatttaatttcctggagctctaggaaacaggcaactgtgtcaaggtccagcactgaggcagaatataagtcactggcaaatgcaacagcagagatgatttgggtgcaaaagttgttgagtgaaatgaggattcctcatgcatctacgactctgctatggtgcgacaacctaggtgcaacttatctctcagctaatccagtttttcatgcaagaactaaacacatagagatagattatcattttgtgagagaaagagtagcatcaaagttgttggacgtcaggtttgtaagttcaagtgatcaagtggctgatggttttactaaagctctgccacgtgcaaagttgttagactttaggaacaatctcaaccttgttcgtggctgagattgagggggagtgttaaaataggatattttctatatatagtctaggatcttttgtatatggcagttcctaaattatagggttagattgttgatttgcaatcaccgtgatatggttgttgtaacttccttctgtaagccaccgcaggagggctgttctccttgcctatattaacacggaaccgagggcctgtattggtatcctcgttaatctac

SEQ ID NO: 51714 - DNA, 303 bp, Zea Mays
tcttttcgacaatcatcaaacctctctagcaaagtggtgatatgtccatttatctaggtaataataatacagtggtaaatacgacacaatatcattctgatgggtcacacatattgttcttgggacttgttcaccaaagtatgcaacaaaagcaggatagcctatccgaggctctccaaaagtcatgagctgagaggtaagcaacatgacagatatagagatgtcctcgcccatggcagggtagcatatctccagcatgtcaagctccctgaaccgctccagaacccacatctttcactcatc

SEQ ID NO: 51715 - DNA, 1257 bp, Zea Mays
ccatcaattaccatagatgagcaagtttttgtatcctgatctagcaaccatggccggttgtcaagcaatataaggaactgattcttggtatgagggcacaaaaatattgtcagttctgcaagatatgattgtataaccctgcatttaaaatgaaagaaaaccttgtttacttccccattcatagtaaatagacatgaatttactaaaacttacaaagtatatcaggttatcagagtctacaaaatgggttatcggagtttacaaaaatattgatactctaacatagctctatagctggagtctacaaaacctctatagtataaaacaatcattttaatacatacactaaacaaaaatagttaattcatgttctactattgcataacggatagcaacacaagattacaagaaacccacagaatattgtatcatataacatcaaatacatggataactgtattttttctgaaacgaagaagagctgcatagttttatattaagaatatgagaaaatgagaggggggtaaggagcccctatgaaagcagagcctgcccatacacacaaaaaacactacaataaactcacgcactcacaaaacttagtgcaaaagtgccatccatgacagaacaaccccactatctccaatcataagtcaagtttcaatgtcttatttatttgtgctagtagattgtaagaataaagtaccattgaataaatatcatctaaaaagaatagtgcccgtgcgttgcaactcagaatgcttgtaaaattcatgtgtttctgaatttaaacataattatgaaaaagggcatcatcttgaaaaaatattgagcataacaaaatattgtaagttcagtggatacagaaaaggactgtttagacgatgctttcatgttcacagaaaataagtgtatgagtaggagtgttcatcattatttactgtgaaataacaaagaatttggttcttaattaagtaaaaccagtatgtgattttaaggtcatctaagaaacatgaatattcaaatctatcattatgttcttatgtaagtaggtgtgaaacatcagaaggttatataccaaagttacaatattaggtgcatagctatgagcctatgaaacagcataaaaaagaggatgacgagatgctcaacaatagcacacagaaaaaggatatgaggatgtcacagaacaagagtcctcttccagaggatgaaatgccttctccggctgcaaagtcttcctaagtgccatctgcg

SEQ ID NO: 51716 - DNA, 4645 bp, Zea Mays
catcgctcgcatcgcccggcatctcgcccgccacatcccagatctcccgtccccgccccgcatctcgcccgccagcgaccggcgagggggcgcgcgcccgccgccgccgcgatgtacctggcgtacgggtggccgcagtcgatcccgctggacccggacaactcggaccgcgtggtcctcctccgcttgctcggccgcttcctcctcgccgtctgcccggcctcgctccacctctggtccgccgcacaacaccgggtccgcctcgcccgctccgaccgctctccggagtctctctccgcccacggctacaacgcgcacgccgtgtggagccccgacgccaagaccgtcgctgtcctgacctcttccttctacctctacgtttacaaggttcagcacttggggaagcaactgatcgtcggtggcaagcaggtcccggggctttgcctggctagcatatccctaatcatcaccgagaaggttcctctcgccaatggcgttgctataacgagcaatttcgtgtgtgacaacaaaagcatgctcctcggactatccaacgggcatgtgcaggtcatgtcctggaacgctgaggtacatggaaacgcatgcaacttttgtttattttctcagacagcttcaagcttggttgctctgtgtgttcgtctgagaaacctactgctgtcatagatgcgttggtgtttgatcctgccagtttgcgagataacactaacgcaaggcctgctccttgctgcacaggcaattcttctattgtccatgttgagctgtcggtgaagctaaggttgctggttgctttgtactcaggctgtcgcattgccctctgtactattggtaagaagggattgaggcagcctggcagcatcagagtggagagatggttggacactgatgatgcgatgtgtacttctgtggcttctgagcaacagattcttgctgttgggtgcagtagaggtgttgttgaattgtatgatcttgcagaaaacacacggcatatacgaaccatttcgttgtatgattgggggtattcagtggaagataccgggcctgttgcttgtatatcttggacgcctgacaattgtgctttcgcagttgggtggaaatttaggggacttactgtatggtctgtgtctggatgtcggttgatgtgtactattcgtcaaactggttcaaattctgcctcatctcctatggtgaaacgttgcactctaaaatttgagcctctaatgggaggaacatcacacattcaatgggatgataatggatataagttatttgctgtcgaagaaaacttgtcagaaagggttcttgctttctcatttgccaaatgttgcctaaacagagggctttcgggcacaacatattcccatcaggttctttatggggatgatcgaatccttttggtgcaaccggatgatgctgatgaactgaagatattgcatcttaatgttccaatttcatacatttcccagaactggccacttctacatgtggtggcaagcaatgatgggatgtacttggcagttgctggctctcacgggctagtgctatatgatttgcgaaataaaaggtggcgtttttttggcgatgttacacaagagcaaaagatccaatgcaaaggcctattgtggctgagaaaaattgttattgtgtgcaactatgttgaaacgtcaaacacgtacgagcttctctttttcccaagatatcatcttgattatagctctttactctaccgaaaaccactgcttggaaggccaattgtcatggatgttttccaggattatatattagttacttacagtccatttgatgtacatatcttccatgtgatgatctcaggagaattatcgccttctagcaatccagttttacagctttcaacagtgcgagaactttcaatcatgagtccaaagagtccacctgtttcaatgcgcttcattcctgaacaaaatgacaaagaagtgctgaagcgagatactaatgaatcttatgatcttttgtcccagcaaccatcaagatgtttgatcttgcggaccaatggggagctttctgtgcttgacatggacgatggacatgaacacgctcttacaaattcaattgaactcttttgggtcacctgttcccagtttgaagagaagggtagtcttatcaaagaggtttcatggcttgactatggtcatcagggtatgcaggtgtggtacccatcacatggagcaggtccttttaagcaagaggattttttgcagctggatccggagcttgagtttgatcgcgaggtgtatcctcttggtcttcttccaaacgttggtgtggttgttggtgtttcccagaggatgtccttctcaactgcggagtttccatgctttgagccttcacctcaagcccaaacaatattgcattgtttattacgacatctccttcagagggacaagattgatgaagctttgcgcttggcaaatttgtcagcagaaaaacctcacttctctcactgtctagagtggcttctgtttacagtatttgatgcagatatatcaaggccaagtgcttcaaaaaatcaggcttcacaaaaagttgattctcccaagaattctcttcttgagaaaacttgtgacctgctacggaactttcctgaatatatggatgttgtagtcagtgttgctaggaaaactgatggtcgacactgggctgatcttttctctacagctggacgatccacagagatgtttgaggaatgcttccaacagaggtggtacaggactgctgcttgctacatactggtcattgctaagctggagggccctgcagtcagccagtattgtgcactccgtttgctacaagctacacttgatgagtctttgtatgagcttgctggggagttggttcgcttcttgctaagatctggaagagattttgagaatgccactccagactccgagaagctctctccaagatttctaggctattttctgttccgttcgccatataagaggcaatcttctgatttgagaagtaactcaatgaaagaacttagtccacatattgcttctgttatgaacattctagagcgtcatgctagctatttgatgtctggcaaggagctttctaaactcgttgcttttgtcaaggggactcaatttgatcttgtggaatatctacaacgagaaaggcaagggtctgctcgtctagagaattttgcttctgcactcgaactgattggacaaaagctccaaatggatacactgcaaagtcgacttgatgcagagttccttctagctcatatgtgttcagtcaagtttaaggaatggatcgtggtgctagctactttattgcggcgtgcagaggttttggtggatctctttaggcatgatttgcgattgtggaaagcatatagcattactctacagtcacatgatgtattcacagaatatcttgaccttcttaatatcttggaggaggagctttcatctgtctctgatcttacattgcaaaatggaccattgtcatgaatgctggacaatgacactgattggaaaaacagctgaatgcggcgttttaaccttgagttaattaacacatacagtttgatgagatctgcggtggggccaggaatctgatgtaaatagattattcagggggtttttccctttgagcaacaccccggaggcgctatgacagctatttgtgcagtgatcagctaagcacctattgttgtattatttgtttgttgcagcagagttgaatgtgcattcttcgccttatggtaagtatgtgctgcactcttaacactgtaagtcatatgagtttttgaccaacaagttgttttctccgttccatagaatcgtgttaagagctagaaatctagaacatgtagattgtcctcacctgatgtttgtagactacgagatattattaaaactgacactatgaggttctcttcattgcattttttacatgtcatactgatgtttttactctgggcaactaatggaaataccctaacctgcaggaggaggaatttatacattgtggggttgccttcccctgccctttggcaggttagtgaagtgtgccctagaggaaagtggcatgtttgagagcaattagattggagggggctaaaatcccctttgttatttaaaattaaatagaagaggaatttagcctctcggatcccctcaagtcccctgtatcccaaacaaacccttgaagtgttttctacagctttaggaaatgtggtttacttctatggtaggtacatgggcaaccaatgtatatacatttatttttacagcatcctggccccgttcatccacaacgtgttgcacatgtctagcctctccattgcaagggcgtacagatatgtatataaaaatctacacaatgcatgcgcatgcaccggagtgtatctgtatcgaccatgaaaggtttggtacaagtctgaaaaagtatacattgttgtcaatcgctatcatatttactgctgtcgcgatgtgtagtagccagtaggctgaccggtcactgatgtgcgtcatggccagatgcacccttcgctgtatgaatagtcgccaacatgggcagcacgtagtgatgtagccatgtaggtccgctgatgcccgaaggagttaattaggag

SEQ ID NO: 51717 - DNA, 4234 bp, Zea Mays
catcgctcgcatcgcccggcatctcgcccgccacatcccagatctcccgtccccgccccgcatctcgcccgccagcgaccggcgagggggcgcgcgcccgccgccgccgcgatgtacctggcgtacgggtggccgcagtcgatcccgctggacccggacaactcggaccgcgtggtcctcctccgcttgctcggccgcttcctcctcgccgtctgcccggcctcgctccacctctggtccgccgcacaacaccgggtccgcctcgcccgctccgaccgctctccggagtctctctccgcccacggctacaacgcgcacgccgtgtggagccccgacgccaagaccgtcgctgtcctgacctcttccttctacctctacgtttacaaggttcagcacttggggaagcaactgatcgtcggtggcaagcaggtcccggggctttgcctggctagcatatccctaatcatcaccgagaaggttcctctcgccaatggcgttgctataacgagcaatttcgtgtgtgacaacaaaagcatgctcctcggactatccaacgggcatgtgcaggtcatgtcctggaacgctgaggcaattcttctattgtccatgttgagctgtcggtgaagctaaggttgctggttgctttgtactcaggctgtcgcattgccctctgtactattggtaagaagggattgaggcagcctggcagcatcagagtggagagatggttggacactgatgatgcgatgtgtacttctgtggcttctgagcaacagattcttgctgttgggtgcagtagaggtgttgttgaattgtatgatcttgcagaaaacacacggcatatacgaaccatttcgttgtatgattgggggtattcagtggaagataccgggcctgttgcttgtatatcttggacgcctgacaattgtgctttcgcagttgggtggaaatttaggggacttactgtatggtctgtgtctggatgtcggttgatgtgtactattcgtcaaactggttcaaattctgcctcatctcctatggtgaaacgttgcactctaaaatttgagcctctaatgggaggaacatcacacattcaatgggatgataatggatataagttatttgctgtcgaagaaaacttgtcagaaagggttcttgctttctcatttgccaaatgttgcctaaacagagggctttcgggcacaacatattcccatcaggttctttatggggatgatcgaatccttttggtgcaaccggatgatgctgatgaactgaagatattgcatcttaatgttccaatttcatacatttcccagaactggccacttctacatgtggtggcaagcaatgatgggatgtacttggcagttgctggctctcacgggctagtgctatatgatttgcgaaataaaaggtggcgtttttttggcgatgttacacaagagcaaaagatccaatgcaaaggcctattgtggctgagaaaaattgttattgtgtgcaactatgttgaaacgtcaaacacgtacgagcttctctttttcccaagatatcatcttgattatagctctttactctaccgaaaaccactgcttggaaggccaattgtcatggatgttttccaggattatatattagttacttacagtccatttgatgtacatatcttccatgtgatgatctcaggagaattatcgccttctagcaatccagttttacagctttcaacagtgcgagaactttcaatcatgagtccaaagagtccacctgtttcaatgcgcttcattcctgaacaaaatgacaaagaagtgctgaagcgagatactaatgaatcttatgatcttttgtcccagcaaccatcaagatgtttgatcttgcggaccaatggggagctttctgtgcttgacatggacgatggacatgaacacgctcttacaaattcaattgaactcttttgggtcacctgttcccagtttgaagagaagggtagtcttatcaaagaggtttcatggcttgactatggtcatcagggtatgcaggtgtggtacccatcacatggagcaggtccttttaagcaagaggattttttgcagctggatccggagcttgagtttgatcgcgaggtgtatcctcttggtcttcttccaaacgttggtgtggttgttggtgtttcccagaggatgtccttctcaactgcggagtttccatgctttgagccttcacctcaagcccaaacaatattgcattgtttattacgacatctccttcagagggacaagattgatgaagctttgcgcttggcaaatttgtcagcagaaaaacctcacttctctcactgtctagagtggcttctgtttacagtatttgatgcagatatatcaaggccaagtgcttcaaaaaatcaggcttcacaaaaagttgattctcccaagaattctcttcttgagaaaacttgtgacctgctacggaactttcctgaatatatggatgttgtagtcagtgttgctaggaaaactgatggtcgacactgggctgatcttttctctacagctggacgatccacagagatgtttgaggaatgcttccaacagaggtggtacaggactgctgcttgctacatactggtcattgctaagctggagggccctgcagtcagccagtattgtgcactccgtttgctacaagctacacttgatgagtctttgtatgagcttgctggggagttggttcgcttcttgctaagatctggaagagattttgagaatgccactccagactccgagaagctctctccaagatttctaggctattttctgttccgttcgccatataagaggcaatcttctgatttgagaagtaactcaatgaaagaacttagtccacatattgcttctgttatgaacattctagagcgtcatgctagctatttgatgtctggcaaggagctttctaaactcgttgcttttgtcaaggggactcaatttgatcttgtggaatatctacaacgagaaaggcaagggtctgctcgtctagagaattttgcttctgcactcgaactgattggacaaaagctccaaatggatacactgcaaagtcgacttgatgcagagttccttctagctcatatgtgttcagtcaagtttaaggaatggatcgtggtgctagctactttattgcggcgtgcagaggttttggtggatctctttaggcatgatttgcgattgtggaaagcatatagcattactctacagtcacatgatgtattcacagaatatcttgaccttcttaatatcttggaggaggagctttcatctgtctctgatcttacattgcaaaatggaccattgtcatgaatgctggacaatgacactgattggaaaaacagctgaatgcggcgttttaaccttgagttaattaacacatacagtttgatgagatctgcggtggggccaggaatctgatgtaaatagattattcagggggtttttccctttgagcaacaccccggaggcgctatgacagctatttgtgcagtgatcagctaagcacctattgttgtattatttgtttgttgcagcagagttgaatgtgcattcttcgccttatggaggaggaatttatacattgtggggttgccttcccctgccctttggcaggttagtgaagtgtgccctagaggaaagtggcatgtttgagagcaattagattggagggggctaaaatcccctttgttatttaaaattaaatagaagaggaatttagcctctcggatcccctcaagtcccctgtatcccaaacaaacccttgaagtgttttctacagctttaggaaatgtggtttacttctatggtaggtacatgggcaaccaatgtatatacatttatttttacagcatcctggccccgttcatccacaacgtgttgcacatgtctagcctctccattgcaagggcgtacagatatgtatataaaaatctacacaatgcatgcgcatgcaccggagtgtatctgtatcgaccatgaaaggtttggtacaagtctgaaaaagtatacattgttgtcaatcgctatcatatttactgctgtcgcgatgtgtagtagccagtaggctgaccggtcactgatgtgcgtcatggccagatgcacccttcgctgtatgaatagtcgccaacatgggcagcacgtagtgatgtagccatgtaggtccgctgatgcccgaaggagttaattaggag

SEQ ID NO: 51718 - DNA, 4301 bp, Zea Mays
catcgctcgcatcgcccggcatctcgcccgccacatcccagatctcccgtccccgccccgcatctcgcccgccagcgaccggcgagggggcgcgcgcccgccgccgccgcgatgtacctggcgtacgggtggccgcagtcgatcccgctggacccggacaactcggaccgcgtggtcctcctccgcttgctcggccgcttcctcctcgccgtctgcccggcctcgctccacctctggtccgccgcacaacaccgggtccgcctcgcccgctccgaccgctctccggagtctctctccgcccacggctacaacgcgcacgccgtgtggagccccgacgccaagaccgtcgctgtcctgacctcttccttctacctctacgtttacaaggttcagcacttggggaagcaactgatcgtcggtggcaagcaggtcccggggctttgcctggctagcatatccctaatcatcaccgagaaggttcctctcgccaatggcgttgctataacgagcaatttcgtgtgtgacaacaaaagcatgctcctcggactatccaacgggcatgtgcaggtcatgtcctggaacgctgaggcaattcttctattgtccatgttgagctgtcggtgaagctaaggttgctggttgctttgtactcaggctgtcgcattgccctctgtactattggtaagaagggattgaggcagcctggcagcatcagagtggagagatggttggacactgatgatgcgatgtgtacttctgtggcttctgagcaacagattcttgctgttgggtgcagtagaggtgttgttgaattgtatgatcttgcagaaaacacacggcatatacgaaccatttcgttgtatgattgggggtattcagtggaagataccgggcctgttgcttgtatatcttggacgcctgacaattgtgctttcgcagttgggtggaaatttaggggacttactgtatggtctgtgtctggatgtcggttgatgtgtactattcgtcaaactggttcaaattctgcctcatctcctatggtgaaacgttgcactctaaaatttgagcctctaatgggaggaacatcacacattcaatgggatgataatggatataagttatttgctgtcgaagaaaacttgtcagaaagggttcttgctttctcatttgccaaatgttgcctaaacagagggctttcgggcacaacatattcccatcaggttctttatggggatgatcgaatccttttggtgcaaccggatgatgctgatgaactgaagatattgcatcttaatgttccaatttcatacatttcccagaactggccacttctacatgtggtggcaagcaatgatgggatgtacttggcagttgctggctctcacgggctagtgctatatgatttgcgaaataaaaggtggcgtttttttggcgatgttacacaagagcaaaagatccaatgcaaaggcctattgtggctgagaaaaattgttattgtgtgcaactatgttgaaacgtcaaacacgtacgagcttctctttttcccaagatatcatcttgattatagctctttactctaccgaaaaccactgcttggaaggccaattgtcatggatgttttccaggattatatattagttacttacagtccatttgatgtacatatcttccatgtgatgatctcaggagaattatcgccttctagcaatccagttttacagctttcaacagtgcgagaactttcaatcatgagtccaaagagtccacctgtttcaatgcgcttcattcctgaacaaaatgacaaagaagtgctgaagcgagatactaatgaatcttatgatcttttgtcccagcaaccatcaagatgtttgatcttgcggaccaatggggagctttctgtgcttgacatggacgatggacatgaacacgctcttacaaattcaattgaactcttttgggtcacctgttcccagtttgaagagaagggtagtcttatcaaagaggtttcatggcttgactatggtcatcagggtatgcaggtgtggtacccatcacatggagcaggtccttttaagcaagaggattttttgcagctggatccggagcttgagtttgatcgcgaggtgtatcctcttggtcttcttccaaacgttggtgtggttgttggtgtttcccagaggatgtccttctcaactgcggagtttccatgctttgagccttcacctcaagcccaaacaatattgcattgtttattacgacatctccttcagagggacaagattgatgaagctttgcgcttggcaaatttgtcagcagaaaaacctcacttctctcactgtctagagtggcttctgtttacagtatttgatgcagatatatcaaggccaagtgcttcaaaaaatcaggcttcacaaaaagttgattctcccaagaattctcttcttgagaaaacttgtgacctgctacggaactttcctgaatatatggatgttgtagtcagtgttgctaggaaaactgatggtcgacactgggctgatcttttctctacagctggacgatccacagagatgtttgaggaatgcttccaacagaggtggtacaggactgctgcttgctacatactggtcattgctaagctggagggccctgcagtcagccagtattgtgcactccgtttgctacaagctacacttgatgagtctttgtatgagcttgctggggagttggttcgcttcttgctaagatctggaagagattttgagaatgccactccagactccgagaagctctctccaagatttctaggctattttctgttccgttcgccatataagaggcaatcttctgatttgagaagtaactcaatgaaagaacttagtccacatattgcttctgttatgaacattctagagcgtcatgctagctatttgatgtctggcaaggagctttctaaactcgttgcttttgtcaaggggactcaatttgatcttgtggaatatctacaacgagaaaggcaagggtctgctcgtctagagaattttgcttctgcactcgaactgattggacaaaaggttctggtcaatatatcacaaagttttatggtttattctgcttatcggtgtaaatttattacatctgctccaaatggatacactgcaaagtcgacttgatgcagagttccttctagctcatatgtgttcagtcaagtttaaggaatggatcgtggtgctagctactttattgcggcgtgcagaggttttggtggatctctttaggcatgatttgcgattgtggaaagcatatagcattactctacagtcacatgatgtattcacagaatatcttgaccttcttaatatcttggaggaggagctttcatctgtctctgatcttacattgcaaaatggaccattgtcatgaatgctggacaatgacactgattggaaaaacagctgaatgcggcgttttaaccttgagttaattaacacatacagtttgatgagatctgcggtggggccaggaatctgatgtaaatagattattcagggggtttttccctttgagcaacaccccggaggcgctatgacagctatttgtgcagtgatcagctaagcacctattgttgtattatttgtttgttgcagcagagttgaatgtgcattcttcgccttatggaggaggaatttatacattgtggggttgccttcccctgccctttggcaggttagtgaagtgtgccctagaggaaagtggcatgtttgagagcaattagattggagggggctaaaatcccctttgttatttaaaattaaatagaagaggaatttagcctctcggatcccctcaagtcccctgtatcccaaacaaacccttgaagtgttttctacagctttaggaaatgtggtttacttctatggtaggtacatgggcaaccaatgtatatacatttatttttacagcatcctggccccgttcatccacaacgtgttgcacatgtctagcctctccattgcaagggcgtacagatatgtatataaaaatctacacaatgcatgcgcatgcaccggagtgtatctgtatcgaccatgaaaggtttggtacaagtctgaaaaagtatacattgttgtcaatcgctatcatatttactgctgtcgcgatgtgtagtagccagtaggctgaccggtcactgatgtgcgtcatggccagatgcacccttcgctgtatgaatagtcgccaacatgggcagcacgtagtgatgtagccatgtaggtccgctgatgcccgaaggagttaattaggag

SEQ ID NO: 51719 - DNA, 4181 bp, Zea Mays
catcgctcgcatcgcccggcatctcgcccgccacatcccagatctcccgtccccgccccgcatctcgcccgccagcgaccggcgagggggcgcgcgcccgccgccgccgcgatgtacctggcgtacgggtggccgcagtcgatcccgctggacccggacaactcggaccgcgtggtcctcctccgcttgctcggccgcttcctcctcgccgtctgcccggcctcgctccacctctggtccgccgcacaacaccgggtccgcctcgcccgctccgaccgctctccggagtctctctccgcccacggctacaacgcgcacgccgtgtggagccccgacgccaagaccgtcgctgtcctgacctcttccttctacctctacgtttacaaggttcagcacttggggaagcaactgatcgtcggtggcaagcaggtcccggggctttgcctggctagcatatccctaatcatcaccgagaaggttcctctcgccaatggcgttgctataacgagcaatttcgtgtgtgacaacaaaagcatgctcctcggactatccaacgggcatgtgcaggtcatgtcctggaacgctgaggcaattcttctattgtccatgttgagctgtcggtgaagctaaggttgctggttgctttgtactcaggctgtcgcattgccctctgtactattggtaagaagggattgaggcagcctggcagcatcagagtggagagatggttggacactgatgatgcgatgtgtacttctgtggcttctgagcaacagattcttgctgttgggtgcagtagaggtgttgttgaattgtatgatcttgcagaaaacacacggcatatacgaaccatttcgttgtatgattgggggtattcagtggaagataccgggcctgttgcttgtatatcttggacgcctgacaattgtgctttcgcagttgggtggaaatttaggggacttactgtatggtctgtgtctggatgtcggttgatgtgtactattcgtcaaactggttcaaattctgcctcatctcctatggtgaaacgttgcactctaaaatttgagcctctaatgggaggaacatcacacattcaatgggatgataatggatataagttatttgctgtcgaagaaaacttgtcagaaagggttcttgctttctcatttgccaaatgttgcctaaacagagggctttcgggcacaacatattcccatcaggttctttatggggatgatcgaatccttttggtgcaaccggatgatgctgatgaactgaagatattgcatcttaatgttccaatttcatacatttcccagaactggccacttctacatgtggtggcaagcaatgatgggatgtacttggcagttgctggctctcacgggctagtgctatatgatttgcgaaataaaaggtggcgtttttttggcgatgttacacaagagcaaaagatccaatgcaaaggcctattgtggctgagaaaaattgttattgtgtgcaactatgttgaaacgtcaaacacgtacgagcttctctttttcccaagatatcatcttgattatagctctttactctaccgaaaaccactgcttggaaggccaattgtcatggatgttttccaggattatatattagttacttacagtccatttgatgtacatatcttccatgtgatgatctcaggagaattatcgccttctagcaatccagttttacagctttcaacagtgcgagaactttcaatcatgagtccaaagagtccacctgtttcaatgcgcttcattcctgaacaaaatgacaaagaagtgctgaagcgagatactaatgaatcttatgatcttttgtcccagcaaccatcaagatgtttgatcttgcggaccaatggggagctttctgtgcttgacatggacgatggacatgaacacgctcttacaaattcaattgaactcttttgggtcacctgttcccagtttgaagagaagggtagtcttatcaaagaggtttcatggcttgactatggtcatcagggtatgcaggtgtggtacccatcacatggagcaggtccttttaagcaagaggattttttgcagctggatccggagcttgagtttgatcgcgaggtgtatcctcttggtcttcttccaaacgttggtgtggttgttggtgtttcccagaggatgtccttctcaactgcggagtttccatgctttgagccttcacctcaagcccaaacaatattgcattgtttattacgacatctccttcagagggacaagattgatgaagctttgcgcttggcaaatttgtcagcagaaaaacctcacttctctcactgtctagagtggcttctgtttacagtatttgatgcagatatatcaaggccaagtgcttcaaaaaatcaggcttcacaaaaagttgattctcccaagaattctcttcttgagaaaacttgtgacctgctacggaactttcctgaatatatggatgttgtagtcagtgttgctaggaaaactgatggtcgacactgggctgatcttttctctacagctggacgatccacagagatgtttgaggaatgcttccaacagaggtggtacaggactgctgcttgctacatactggtcattgctaagctggagggccctgcagtcagccagtattgtgcactccgtttgctacaagctacacttgatgagtctttgtatgagcttgctggggagttggttcgcttcttgctaagatctggaagagattttgagaatgccactccagactccgagaagctctctccaagatttctaggctattttctgttccgttcgccatataagaggcaatcttctgatttgagaagagcgtcatgctagctatttgatgtctggcaaggagctttctaaactcgttgcttttgtcaaggggactcaatttgatcttgtggaatatctacaacgagaaaggcaagggtctgctcgtctagagaattttgcttctgcactcgaactgattggacaaaagctccaaatggatacactgcaaagtcgacttgatgcagagttccttctagctcatatgtgttcagtcaagtttaaggaatggatcgtggtgctagctactttattgcggcgtgcagaggttttggtggatctctttaggcatgatttgcgattgtggaaagcatatagcattactctacagtcacatgatgtattcacagaatatcttgaccttcttaatatcttggaggaggagctttcatctgtctctgatcttacattgcaaaatggaccattgtcatgaatgctggacaatgacactgattggaaaaacagctgaatgcggcgttttaaccttgagttaattaacacatacagtttgatgagatctgcggtggggccaggaatctgatgtaaatagattattcagggggtttttccctttgagcaacaccccggaggcgctatgacagctatttgtgcagtgatcagctaagcacctattgttgtattatttgtttgttgcagcagagttgaatgtgcattcttcgccttatggaggaggaatttatacattgtggggttgccttcccctgccctttggcaggttagtgaagtgtgccctagaggaaagtggcatgtttgagagcaattagattggagggggctaaaatcccctttgttatttaaaattaaatagaagaggaatttagcctctcggatcccctcaagtcccctgtatcccaaacaaacccttgaagtgttttctacagctttaggaaatgtggtttacttctatggtaggtacatgggcaaccaatgtatatacatttatttttacagcatcctggccccgttcatccacaacgtgttgcacatgtctagcctctccattgcaagggcgtacagatatgtatataaaaatctacacaatgcatgcgcatgcaccggagtgtatctgtatcgaccatgaaaggtttggtacaagtctgaaaaagtatacattgttgtcaatcgctatcatatttactgctgtcgcgatgtgtagtagccagtaggctgaccggtcactgatgtgcgtcatggccagatgcacccttcgctgtatgaatagtcgccaacatgggcagcacgtagtgatgtagccatgtaggtccgctgatgcccgaaggagttaattaggag

SEQ ID NO: 51720 - DNA, 4434 bp, Zea Mays
catcgctcgcatcgcccggcatctcgcccgccacatcccagatctcccgtccccgccccgcatctcgcccgccagcgaccggcgagggggcgcgcgcccgccgccgccgcgatgtacctggcgtacgggtggccgcagtcgatcccgctggacccggacaactcggaccgcgtggtcctcctccgcttgctcggccgcttcctcctcgccgtctgcccggcctcgctccacctctggtccgccgcacaacaccgggtccgcctcgcccgctccgaccgctctccggagtctctctccgcccacggctacaacgcgcacgccgtgtggagccccgacgccaagaccgtcgctgtcctgacctcttccttctacctctacgtttacaaggttcagcacttggggaagcaactgatcgtcggtggcaagcaggtcccggggctttgcctggctagcatatccctaatcatcaccgagaaggttcctctcgccaatggcgttgctataacgagcaatttcgtgtgtgacaacaaaagcatgctcctcggactatccaacgggcatgtgcaggtcatgtcctggaacgctgagttctcagacagcttcaagcttggttgctctgtgtgttcgtctgagaaacctactgctgtcatagatgcgttggtgtttgatcctgccagtttgcgagataacactaacgcaaggcctgctccttgctgcacaggcaattcttctattgtccatgttgagctgtcggtgaagctaaggttgctggttgctttgtactcaggctgtcgcattgccctctgtactattggtaagaagggattgaggcagcctggcagcatcagagtggagagatggttggacactgatgatgcgatgtgtacttctgtggcttctgagcaacagattcttgctgttgggtgcagtagaggtgttgttgaattgtatgatcttgcagaaaacacacggcatatacgaaccatttcgttgtatgattgggggtattcagtggaagataccgggcctgttgcttgtatatcttggacgcctgacaattgtgctttcgcagttgggtggaaatttaggggacttactgtatggtctgtgtctggatgtcggttgatgtgtactattcgtcaaactggttcaaattctgcctcatctcctatggtgaaacgttgcactctaaaatttgagcctctaatgggaggaacatcacacattcaatgggatgataatggatataagttatttgctgtcgaagaaaacttgtcagaaagggttcttgctttctcatttgccaaatgttgcctaaacagagggctttcgggcacaacatattcccatcaggttctttatggggatgatcgaatccttttggtgcaaccggatgatgctgatgaactgaagatattgcatcttaatgttccaatttcatacatttcccagaactggccacttctacatgtggtggcaagcaatgatgggatgtacttggcagttgctggctctcacgggctagtgctatatgatttgcgaaataaaaggtggcgtttttttggcgatgttacacaagagcaaaagatccaatgcaaaggcctattgtggctgagaaaaattgttattgtgtgcaactatgttgaaacgtcaaacacgtacgagcttctctttttcccaagatatcatcttgattatagctctttactctaccgaaaaccactgcttggaaggccaattgtcatggatgttttccaggattatatattagttacttacagtccatttgatgtacatatcttccatgtgatgatctcaggagaattatcgccttctagcaatccagttttacagctttcaacagtgcgagaactttcaatcatgagtccaaagagtccacctgtttcaatgcgcttcattcctgaacaaaatgacaaagaagtgctgaagcgagatactaatgaatcttatgatcttttgtcccagcaaccatcaagatgtttgatcttgcggaccaatggggagctttctgtgcttgacatggacgatggacatgaacacgctcttacaaattcaattgaactcttttgggtcacctgttcccagtttgaagagaagggtagtcttatcaaagaggtttcatggcttgactatggtcatcagggtatgcaggtgtggtacccatcacatggagcaggtccttttaagcaagaggattttttgcagctggatccggagcttgagtttgatcgcgaggtgtatcctcttggtcttcttccaaacgttggtgtggttgttggtgtttcccagaggatgtccttctcaactgcggagtttccatgctttgagccttcacctcaagcccaaacaatattgcattgtttattacgacatctccttcagagggacaagattgatgaagctttgcgcttggcaaatttgtcagcagaaaaacctcacttctctcactgtctagagtggcttctgtttacagtatttgatgcagatatatcaaggccaagtgcttcaaaaaatcaggcttcacaaaaagttgattctcccaagaattctcttcttgagaaaacttgtgacctgctacggaactttcctgaatatatggatgttgtagtcagtgttgctaggaaaactgatggtcgacactgggctgatcttttctctacagctggacgatccacagagatgtttgaggaatgcttccaacagaggtggtacaggactgctgcttgctacatactggtcattgctaagctggagggccctgcagtcagccagtattgtgcactccgtttgctacaagctacacttgatgagtctttgtatgagcttgctggggagttggttcgcttcttgctaagatctggaagagattttgagaatgccactccagactccgagaagctctctccaagatttctaggctattttctgttccgttcgccatataagaggcaatcttctgatttgagaagtaactcaatgaaagaacttagtccacatattgcttctgttatgaacattctagagcgtcatgctagctatttgatgtctggcaaggagctttctaaactcgttgcttttgtcaaggggactcaatttgatcttgtggaatatctacaacgagaaaggcaagggtctgctcgtctagagaattttgcttctgcactcgaactgattggacaaaaggttctggtcaatatatcacaaagttttatggtttattctgcttatcggtgtaaatttattacatctgctccaaatggatacactgcaaagtcgacttgatgcagagttccttctagctcatatgtgttcagtcaagtttaaggaatggatcgtggtgctagctactttattgcggcgtgcagaggttttggtggatctctttaggcatgatttgcgattgtggaaagcatatagcattactctacagtcacatgatgtattcacagaatatcttgaccttcttaatatcttggaggaggagctttcatctgtctctgatcttacattgcaaaatggaccattgtcatgaatgctggacaatgacactgattggaaaaacagctgaatgcggcgttttaaccttgagttaattaacacatacagtttgatgagatctgcggtggggccaggaatctgatgtaaatagattattcagggggtttttccctttgagcaacaccccggaggcgctatgacagctatttgtgcagtgatcagctaagcacctattgttgtattatttgtttgttgcagcagagttgaatgtgcattcttcgccttatggaggaggaatttatacattgtggggttgccttcccctgccctttggcaggttagtgaagtgtgccctagaggaaagtggcatgtttgagagcaattagattggagggggctaaaatcccctttgttatttaaaattaaatagaagaggaatttagcctctcggatcccctcaagtcccctgtatcccaaacaaacccttgaagtgttttctacagctttaggaaatgtggtttacttctatggtaggtacatgggcaaccaatgtatatacatttatttttacagcatcctggccccgttcatccacaacgtgttgcacatgtctagcctctccattgcaagggcgtacagatatgtatataaaaatctacacaatgcatgcgcatgcaccggagtgtatctgtatcgaccatgaaaggtttggtacaagtctgaaaaagtatacattgttgtcaatcgctatcatatttactgctgtcgcgatgtgtagtagccagtaggctgaccggtcactgatgtgcgtcatggccagatgcacccttcgctgtatgaatagtcgccaacatgggcagcacgtagtgatgtagccatgtaggtccgctgatgcccgaaggagttaattaggag

SEQ ID NO: 51721 - DNA, 4381 bp, Zea Mays
catcgctcgcatcgcccggcatctcgcccgccacatcccagatctcccgtccccgccccgcatctcgcccgccagcgaccggcgagggggcgcgcgcccgccgccgccgcgatgtacctggcgtacgggtggccgcagtcgatcccgctggacccggacaactcggaccgcgtggtcctcctccgcttgctcggccgcttcctcctcgccgtctgcccggcctcgctccacctctggtccgccgcacaacaccgggtccgcctcgcccgctccgaccgctctccggagtctctctccgcccacggctacaacgcgcacgccgtgtggagccccgacgccaagaccgtcgctgtcctgacctcttccttctacctctacgtttacaaggttcagcacttggggaagcaactgatcgtcggtggcaagcaggtcccggggctttgcctggctagcatatccctaatcatcaccgagaaggttcctctcgccaatggcgttgctataacgagcaatttcgtgtgtgacaacaaaagcatgctcctcggactatccaacgggcatgtgcaggtcatgtcctggaacgctgagttctcagacagcttcaagcttggttgctctgtgtgttcgtctgagaaacctactgctgtcatagatgcgttggtgtttgatcctgccagtttgcgagataacactaacgcaaggcctgctccttgctgcacaggcaattcttctattgtccatgttgagctgtcggtgaagctaaggttgctggttgctttgtactcaggctgtcgcattgccctctgtactattggtaagaagggattgaggcagcctggcagcatcagagtggagagatggttggacactgatgatgcgatgtgtacttctgtggcttctgagcaacagattcttgctgttgggtgcagtagaggtgttgttgaattgtatgatcttgcagaaaacacacggcatatacgaaccatttcgttgtatgattgggggtattcagtggaagataccgggcctgttgcttgtatatcttggacgcctgacaattgtgctttcgcagttgggtggaaatttaggggacttactgtatggtctgtgtctggatgtcggttgatgtgtactattcgtcaaactggttcaaattctgcctcatctcctatggtgaaacgttgcactctaaaatttgagcctctaatgggaggaacatcacacattcaatgggatgataatggatataagttatttgctgtcgaagaaaacttgtcagaaagggttcttgctttctcatttgccaaatgttgcctaaacagagggctttcgggcacaacatattcccatcaggttctttatggggatgatcgaatccttttggtgcaaccggatgatgctgatgaactgaagatattgcatcttaatgttccaatttcatacatttcccagaactggccacttctacatgtggtggcaagcaatgatgggatgtacttggcagttgctggctctcacgggctagtgctatatgatttgcgaaataaaaggtggcgtttttttggcgatgttacacaagagcaaaagatccaatgcaaaggcctattgtggctgagaaaaattgttattgtgtgcaactatgttgaaacgtcaaacacgtacgagcttctctttttcccaagatatcatcttgattatagctctttactctaccgaaaaccactgcttggaaggccaattgtcatggatgttttccaggattatatattagttacttacagtccatttgatgtacatatcttccatgtgatgatctcaggagaattatcgccttctagcaatccagttttacagctttcaacagtgcgagaactttcaatcatgagtccaaagagtccacctgtttcaatgcgcttcattcctgaacaaaatgacaaagaagtgctgaagcgagatactaatgaatcttatgatcttttgtcccagcaaccatcaagatgtttgatcttgcggaccaatggggagctttctgtgcttgacatggacgatggacatgaacacgctcttacaaattcaattgaactcttttgggtcacctgttcccagtttgaagagaagggtagtcttatcaaagaggtttcatggcttgactatggtcatcagggtatgcaggtgtggtacccatcacatggagcaggtccttttaagcaagaggattttttgcagctggatccggagcttgagtttgatcgcgaggtgtatcctcttggtcttcttccaaacgttggtgtggttgttggtgtttcccagaggatgtccttctcaactgcggagtttccatgctttgagccttcacctcaagcccaaacaatattgcattgtttattacgacatctccttcagagggacaagattgatgaagctttgcgcttggcaaatttgtcagcagaaaaacctcacttctctcactgtctagagtggcttctgtttacagtatttgatgcagatatatcaaggccaagtgcttcaaaaaatcaggcttcacaaaaagttgattctcccaagaattctcttcttgagaaaacttgtgacctgctacggaactttcctgaatatatggatgttgtagtcagtgttgctaggaaaactgatggtcgacactgggctgatcttttctctacagctggacgatccacagagatgtttgaggaatgcttccaacagaggtggtacaggactgctgcttgctacatactggtcattgctaagctggagggccctgcagtcagccagtattgtgcactccgtttgctacaagctacacttgatgagtctttgtatgagcttgctggggagttggttcgcttcttgctaagatctggaagagattttgagaatgccactccagactccgagaagctctctccaagatttctaggctattttctgttccgttcgccatataagaggcaatcttctgatttgagaagagcgtcatgctagctatttgatgtctggcaaggagctttctaaactcgttgcttttgtcaaggggactcaatttgatcttgtggaatatctacaacgagaaaggcaagggtctgctcgtctagagaattttgcttctgcactcgaactgattggacaaaaggttctggtcaatatatcacaaagttttatggtttattctgcttatcggtgtaaatttattacatctgctccaaatggatacactgcaaagtcgacttgatgcagagttccttctagctcatatgtgttcagtcaagtttaaggaatggatcgtggtgctagctactttattgcggcgtgcagaggttttggtggatctctttaggcatgatttgcgattgtggaaagcatatagcattactctacagtcacatgatgtattcacagaatatcttgaccttcttaatatcttggaggaggagctttcatctgtctctgatcttacattgcaaaatggaccattgtcatgaatgctggacaatgacactgattggaaaaacagctgaatgcggcgttttaaccttgagttaattaacacatacagtttgatgagatctgcggtggggccaggaatctgatgtaaatagattattcagggggtttttccctttgagcaacaccccggaggcgctatgacagctatttgtgcagtgatcagctaagcacctattgttgtattatttgtttgttgcagcagagttgaatgtgcattcttcgccttatggaggaggaatttatacattgtggggttgccttcccctgccctttggcaggttagtgaagtgtgccctagaggaaagtggcatgtttgagagcaattagattggagggggctaaaatcccctttgttatttaaaattaaatagaagaggaatttagcctctcggatcccctcaagtcccctgtatcccaaacaaacccttgaagtgttttctacagctttaggaaatgtggtttacttctatggtaggtacatgggcaaccaatgtatatacatttatttttacagcatcctggccccgttcatccacaacgtgttgcacatgtctagcctctccattgcaagggcgtacagatatgtatataaaaatctacacaatgcatgcgcatgcaccggagtgtatctgtatcgaccatgaaaggtttggtacaagtctgaaaaagtatacattgttgtcaatcgctatcatatttactgctgtcgcgatgtgtagtagccagtaggctgaccggtcactgatgtgcgtcatggccagatgcacccttcgctgtatgaatagtcgccaacatgggcagcacgtagtgatgtagccatgtaggtccgctgatgcccgaaggagttaattaggag

SEQ ID NO: 51722 - DNA, 4749 bp, Zea Mays
ccagagagttgtacttgtacacacagtgagacactagtgacgaggcatggacatcgccgtatccgtacatgactggttccagacgcgtgtgccgccgcagtacccagccgcccaggcaacgtgaccagccgagccgagccggagcggacgagcccccggcgtcgcgagataaaaaaagatcgggagcagaagagaagagagcaggagcagccgggcctaaacagaacagaacagaaaggaaaggagagacgcgtgtcctcccagccactgccaccctcccccacctctgcctctctcgaccccacccgacccggcgcggaaccggagccgcccgcccgcccgcagccccgccgcgccccgaacggtgccgacgagctccagcagcgcccaatggcggcggccttcctcgccctggagccccgcgtgacatgatccctggcttggctcccgagcaggggaatatccgcgcgagcacccccacccccacaccccagccatagggccccccaattctcgccttccccaccgcaaatccttctcgactcccgtatctcccctctcctcctccgccgcctcgcgcgccgcaattggcgttgtgctcgcgtggacccagatcgccgccaggaagtgtctaattggtggtgcgcataggactggctggatttcaatcgtgataatactgatatacggagactcattgctgatccagtgagcctattcgcgccaacttgattacagcctttctcacacaagtatggcgccctctgctgccgtcccgggtggctctgaggttgaggggtcaccacgcatggccaagttcctctgcagctttggaggcagtatccttccccgaccactcgatggctgtcttaggtatgttggcggcgagacaaggattgtcatgttgccgcgtgacatatcatatgccgacctggctgcacggatgagagagctctataaggatgctgatatcatcaaataccagcaacctgatgaggatttagatgcgctggtctcggttgtgaacgacgacgatgtggtgaacatgatggaggagtatgacaaggtcattgcgacaggggaggcgttcactcggctcaggatcttcttattttctcagcatttggatgatgatgctgcatcagtggatgtgcattacaatgtagacgagcgggaaacagagagaaggtatgtagatgcgcttaacagccttggtgatgttaagtcaccttcctcccctgtgtctgtggagcagctttttggcattggaggcaatgattcaggaattcctgattttgctggcttgagacatttgaatgtccctcgtccaacacatagtcagaggtatggagagatggattctccttggagccctgcctatgtctcaccaggccagtacggggtacatgacccaagggattttccaatttcaccatcatctgcaaggtttcaagtaggagcggaggattttgatgagaggactcctgacgactttgtaaggcagtcaccaaaatatcgtcattatgaggcgcattcaccatcacatatggataatttagtctggcttccacctggtgctgtaattcagcaaaatgcaggctttcctggtaatttgagccggtccaacaatttcttggatgggagcaatggatgtgatcactgccgttcaccattccataaggttcaaggttcagtgaatgatcctatctatatgaaccctcgttggactcggccagtccaacaacattttgaccaaccaagcatgattaatgattatcccggtcaccatgctaattcttgtccagattactgccgccctggtgatcattatgtgggaggtcaagatgttagattggaaaatggtgtttatgttaaagagcaaaatggtggtcatcctcccatgttctataatgagtcacatcctcacgatagagtctggcatgtgcataccaagcaaagtcatcagcgatacgaggatccaaggctgcatcatcctgctaatggtagagtgatcgagccatacattatggatgccaacaaagtatatgaagttcattcagcatctcttgctcgttctagccatgagagtcctcactattatcacggtagcagtgaggtcataaatgacacgtatcacaaccaacaagttggaggcagtgggtcgtatgtgcagccagcagggtttgaagaatcccctagccaccattacaaccactcttcggcctatggtgcagattccttttaccaaatgcagcagaatttgccacccattcaatctctgagaaggagagcgaacagccctgttcacactgcctcaccatatgattccccacacctgccaatatcaaatgggaccattaacacaaacttcgtaagaaatacaggtgatgtcagtccgaggataccagggctacctggatatgatcgaatgccaaacacatggactcctcccaacggcagcataccatatagagttgttgggcatgatgttcatgctgcctccatggaaaacactagtgcctttggtcctaggtctaatccaactgctgctcagtatgttcagcatttcattgctcctgaatcaatccagcatcaacctggagctccattgagggaggttcatcctgaaagatcataccctgaacccatgccgtcgtcatatgttgatggcaaagtagctgtttctgcattgcctctcactgatcaattatccaggttggatacaaacacaataaagaaacctgaaggtccagatgatgttaactcaactcaaaatgtgaatgaaacaactcctttgcatgctgtggatgaaccaagtaccttaccccaccatgttgtagttgtacatgaagttgatactaagcaggggaagccaaccgaacatgaaagcaggcaaaagcaacatgaagctggggctacagcactgcaggaatgtggggatatttcagaggatagattgaatttccttcctgaattgattgcctctgttaaaaaggcagcactggaagatgctgctgagacacggatagcccaatcagatgctaatggtgctgtttcacctgttcctgatgatgatgatgataatgaaaagaagttggatgcagcagctgctggtactacagatgcaaatcaggaccctgatttgcaaggaagcattgatcggcagaagagctccaagattgagtctacaactgctgaagctgaagctttgtctaaaggactacagactataaaaaatgacgatttggaggaaattagagagctgggttcaggtacttatggggcagtttatcatggtaaatggagaggatgtgatgtcgctgttaaaagaataaaagcgagttgctttgtaggaagaccatctgagagagagcgtttgattgcggatttctggaaagaagctctgatcctaagctcactccatcatccaaatgtggtttcattttatggtgtagttcgtgatggtccagatggaagcttagcaactgttactgagtttatgatcaatggatctctaaaacagtttctgaggaaaaaagacaggacaattgatcgccggaagagagtaatattagccatggatgctgcatttggcatggagtatttgcatgggaagaatatagtccattttgacctgaaatgtgagaatctactggtgaacatgagggatccgcagcgaccaatttgcaagatcggtgatcttggactgtcaaaggttaaacagcatactttggtatctggtggtgttagaggaaccttaccatggatggcaccagagcttctgagtgggaaaagtaatatggtgtcagacaagattgatgtctattcgtttggaattgtcatgtgggagttgcttactggggaagagccatactctggcatgcgtgctgctgaaattattgggggcattgtaaacgattccctacgtcctcaaattccttcatggtgtgatcctgagtggaagggattgatggaaagctgttggtccagtgatccagctgagagaccgtccttcacggatatatctcaaaggttgaggaaaatggccgccgcaatgaatgtgaagtaaagcatcgcagttgatgaccctactccaagtgataatttaacaagtgctgacttcatgggagaaaatctatgtcatggagattccaaagcatgtttgatgttttcttttaatcctggagtaaaccggctaccatttgccttccgccgaaaacaagtatgctatatggcgcattgtcttgatgggagctgttgcactgtcatgtaaataagttttgacttgctggcccgtagtagatgtgcaaagtaataggcacgatcacacagttacttttttttttcccatataaattgtgttctaggataggtagaacgaacatgactggagcgatccttgttcagattgtaaagaaaaggacagacccagtgctgacggttcttatatgagtggggtctggttaaagaataaccaaaacaagtcttatacttttatcttgcagagaggttgcatcgaatctaggactttggctcggtagaaaggtttttcaccactgcgttaggcctatacttttttcagtttaaccactgtgctagacctgcccccttttttgagtttgtacttggtctaaaaataagagtatactgttttccatgtgtatatatcatcacttcctatttgaatgccccaaaaaacaagagtacactgtttgtcatgtatacaccatcacttccaaatacttgcag

SEQ ID NO: 51723 - DNA, 4771 bp, Zea Mays
ccagagagttgtacttgtacacacagtgagacactagtgacgaggcatggacatcgccgtatccgtacatgactggttccagacgcgtgtgccgccgcagtacccagccgcccaggcaacgtgaccagccgagccgagccggagcggacgagcccccggcgtcgcgagataaaaaaagatcgggagcagaagagaagagagcaggagcagccgggcctaaacagaacagaacagaaaggaaaggagagacgcgtgtcctcccagccactgccaccctcccccacctctgcctctctcgaccccacccgacccggcgcggaaccggagccgcccgcccgcccgcagccccgccgcgccccgaacggtgccgacgagctccagcagcgcccaatggcggcggccttcctcgccctggagccccgcgtgacatgatccctggcttggctcccgagcaggggaatatccgcgcgagcacccccacccccacaccccagccatagggccccccaattctcgccttccccaccgcaaatccttctcgactcccgtatctcccctctcctcctccgccgcctcgcgcgccgcaattggcgttgtgctcgcgtggacccagatcgccgccaggaagtgtctaattggtggtgcgcataggactggctggatttcaatcgtgataatactgatatacggagactcattgctgatccagtgagcctattcgcgccaacttgattacagcctttctcacacaagtatggcgccctctgctgccgtcccgggtggctctgaggttgaggggtcaccacgcatggccaagttcctctgcagctttggaggcagtatccttccccgaccactcgatggctgtcttaggtatgttggcggcgagacaaggattgtcatgttgccgcgtgacatatcatatgccgacctggctgcacggatgagagagctctataaggatgctgatatcatcaaataccagcaacctgatgaggatttagatgcgctggtctcggttgtgaacgacgacgatgtggtgaacatgatggaggagtatgacaaggtcattgcgacaggggaggcgttcactcggctcaggatcttcttattttctcagcatttggatgatgatgctgcatcagtggatgtgcattacaatgtagacgagcgggaaacagagagaaggtatgtagatgcgcttaacagccttggtgatgttaagtcaccttcctcccctgtgtctgtggagcagctttttggcattggaggcaatgattcaggaattcctgattttgctggcttgagacatttgaatgtccctcgtccaacacatagtcagaggtatggagagatggattctccttggagccctgcctatgtctcaccaggccagtacggggtacatgacccaagggattttccaatttcaccatcatctgcaaggtttcaagtaggagcggaggattttgatgagaggactcctgacgactttgtaaggcagtcaccaaaatatcgtcattatgaggcgcattcaccatcacatatggataatttagtctggcttccacctggtgctgtaattcagcaaaatgcaggctttcctggtaatttgagccggtccaacaatttcttggatgggagcaatggatgtgatcactgccgttcaccattccataaggttcaaggttcagtgaatgatcctatctatatgaaccctcgttggactcggccagtccaacaacattttgaccaaccaagcatgattaatgattatcccggtcaccatgctaattcttgtccagattactgccgccctggtgatcattatgtgggaggtcaagatgttagattggaaaatggtgtttatgttaaagagcaaaatggtggtcatcctcccatgttctataatgagtcacatcctcacgatagagtctggcatgtgcataccaagcaaagtcatcagcgatacgaggatccaaggctgcatcatcctgctaatggtagagtgatcgagccatacattatggatgccaacaaagtatatgaagttcattcagcatctcttgctcgttctagccatgagagtcctcactattatcacggtagcagtgaggtcataaatgacacgtatcacaaccaacaagttggaggcagtgggtcgtatgtgcagccagcagggtttgaagaatcccctagccaccattacaaccactcttcggcctatggtgcagattccttttaccaaatgcagcagaatttgccacccattcaatctctgagaaggagagcgaacagccctgttcacactgcctcaccatatgattccccacacctgccaatatcaaatgggaccattaacacaaacttcgtaagaaatacaggtgatgtcagtccgaggataccagggctacctggatatgatcgaatgccaaacacatggactcctcccaacggcagcataccatatagagttgttgggcatgatgttcatgctgcctccatggaaaacactagtgcctttggtcctaggtctaatccaactgctgctcagtatgttcagcatttcattgctcctgaatcaatccagcatcaacctggagctccattgagggaggttcatcctgaaagatcataccctgaacccatgccgtcgtcatatgttgatggcaaagtagctgtttctgcattgcctctcactgatcaattatccaggttggatacaaacacaataaagaaacctgaaggtccagatgatgttaactcaactcaaaatgtgaatgaaacaactcctttgcatgctgtggatgaaccaagtaccttaccccaccatgttgtagttgtacatgaagttgatactaagcaggggaagccaaccgaacatgaaagcaggcaaaagcaacatgaagctggggctacagcactgcaggaatgtggggatatttcagaggatagattgaatttccttcctgaattgattgcctctgttaaaaaggcagcactggaagatgctgctgagacacggatagcccaatcagatgctaatggtgctgtttcacctgttcctgatgatgatgatgataatgaaaagaagttggatgcagcagctgctggtactacagatgcaaatcaggaccctgatttgcaaggaagcattgatcggcagaagagctccaagattgagtctacaactgctgaagctgaagctttgtctaaaggactacagactataaaaaatgacgatttggaggaaattagagagctgggttcaggtacttatggggcagtttatcatggtaaatggagaggatgtgatgtcgctgttaaaagaataaaagcgagttgctttgtaggaagaccatctgagagagagcgtttgattgcggatttctggaaagaagctctgatcctaagctcactccatcatccaaatgtggtttcattttatggtgtagttcgtgatggtccagatggaagcttagcaactgttactgagtttatgatcaatggatctctaaaacagtttctgaggaaaaaagacaggacaattgatcgccggaagagagtaatattagccatggatgctgcatttggcatggagtatttgcatgggaagaatatagtccattttgacctgaaatgtgagaatctactggtgaacatgagggatccgcagcgaccaatttgcaagatcggtgatcttggactgtcaaaggttaaacagcatactttggtatctggtggtgttagaggaaccttaccatggatggcaccagagcttctgagtgggaaaagtaatatggtgtcagacaagattgatgtctattcgtttggaattgtcatgtgggagttgcttactggggaagagccatactctggcatgcgtgctgctgaaattattgggggcattgtaaacgattccctacgtcctcaaattccttcatggtgtgatcctgagtggaagggattgatggaaagctgttggtccagtgatccagctgagagaccgtccttcacggatatatctcaaaggttgaggaaaatggccgccgcaatgaatgtgaagtaaaggtccggaagccatatttgtcttcatcgcagttgatgaccctactccaagtgataatttaacaagtgctgacttcatgggagaaaatctatgtcatggagattccaaagcatgtttgatgttttcttttaatcctggagtaaaccggctaccatttgccttccgccgaaaacaagtatgctatatggcgcattgtcttgatgggagctgttgcactgtcatgtaaataagttttgacttgctggcccgtagtagatgtgcaaagtaataggcacgatcacacagttacttttttttttcccatataaattgtgttctaggataggtagaacgaacatgactggagcgatccttgttcagattgtaaagaaaaggacagacccagtgctgacggttcttatatgagtggggtctggttaaagaataaccaaaacaagtcttatacttttatcttgcagagaggttgcatcgaatctaggactttggctcggtagaaaggtttttcaccactgcgttaggcctatacttttttcagtttaaccactgtgctagacctgcccccttttttgagtttgtacttggtctaaaaataagagtatactgttttccatgtgtatatatcatcacttcctatttgaatgccccaaaaaacaagagtacactgtttgtcatgtatacaccatcacttccaaatacttgcag

SEQ ID NO: 51724 - DNA, 4749 bp, Zea Mays
gtgaccagccgagccgagccggagcggacgagcccccggcgtcgcgagataaaaaaagatcgggagcagaagagaagagagcaggagcagccgggcctaaacagaacagaacagaaaggaaaggagagacgcgtgtcctcccagccactgccaccctcccccacctctgcctctctcgaccccacccgacccggcgcggaaccggagccgcccgcccgcccgcagccccgccgcgccccgaacggtgccgacgagctccagcagcgcccaatggcggcggccttcctcgccctggagccccgcgtgacatgatccctggcttggctcccgagcaggggaatatccgcgcgagcacccccacccccacaccccagccatagggccccccaattctcgccttccccaccgcaaatccttctcgactcccgtatctcccctctcctcctccgccgcctcgcgcgccgcaattggcgttgtgctcgcgtggacccagatcgccgccagtgtctaattggtggtgcgcataggactggctggatttcaatcgtgataatactgatatacggagactcattgctgatccagtgagcctattcgcgccaacttgattacagcctttctcacacaagtatggcgccctctgctgccgtcccgggtggctctgaggttgaggggtcaccacgcatggccaagttcctctgcagctttggaggcagtatccttccccgaccactcgatggctgtcttaggtatgttggcggcgagacaaggattgtcatgttgccgcgtgacatatcatatgccgacctggctgcacggatgagagagctctataaggatgctgatatcatcaaataccagcaacctgatgaggatttagatgcgctggtctcggttgtgaacgacgacgatgtggtgaacatgatggaggagtatgacaaggtcattgcgacaggggaggcgttcactcggctcaggatcttcttattttctcagcatttggatgatgatgctgcatcagtggatgtgcattacaatgtagacgagcgggaaacagagagaaggtatgtagatgcgcttaacagccttggtgatgttaagtcaccttcctcccctgtgtctgtggagcagctttttggcattggaggcaatgattcaggaattcctgattttgctggcttgagacatttgaatgtccctcgtccaacacatagtcagaggtatggagagatggattctccttggagccctgcctatgtctcaccaggccagtacggggtacatgacccaagggattttccaatttcaccatcatctgcaaggtttcaagtaggagcggaggattttgatgagaggactcctgacgactttgtaaggcagtcaccaaaatatcgtcattatgaggcgcattcaccatcacatatggataatttagtctggcttccacctggtgctgtaattcagcaaaatgcaggctttcctggtaatttgagccggtccaacaatttcttggatgggagcaatggatgtgatcactgccgttcaccattccataaggttcaaggttcagtgaatgatcctatctatatgaaccctcgttggactcggccagtccaacaacattttgaccaaccaagcatgattaatgattatcccggtcaccatgctaattcttgtccagattactgccgccctggtgatcattatgtgggaggtcaagatgttagattggaaaatggtgtttatgttaaagagcaaaatggtggtcatcctcccatgttctataatgagtcacatcctcacgatagagtctggcatgtgcataccaagcaaagtcatcagcgatacgaggatccaaggctgcatcatcctgctaatggtagagtgatcgagccatacattatggatgccaacaaagtatatgaagttcattcagcatctcttgctcgttctagccatgagagtcctcactattatcacggtagcagtgaggtcataaatgacacgtatcacaaccaacaagttggaggcagtgggtcgtatgtgcagccagcagggtttgaagaatcccctagccaccattacaaccactcttcggcctatggtgcagattccttttaccaaatgcagcagaatttgccacccattcaatctctgagaaggagagcgaacagccctgttcacactgcctcaccatatgattccccacacctgccaatatcaaatgggaccattaacacaaacttcgtaagaaatacaggtgatgtcagtccgaggataccagggctacctggatatgatcgaatgccaaacacatggactcctcccaacggcagcataccatatagagttgttgggcatgatgttcatgctgcctccatggaaaacactagtgcctttggtcctaggtctaatccaactgctgctcagtatgttcagcatttcattgctcctgaatcaatccagcatcaacctggagctccattgagggaggttcatcctgaaagatcataccctgaacccatgccgtcgtcatatgttgatggcaaagtagctgtttctgcattgcctctcactgatcaattatccaggttggatacaaacacaataaagaaacctgaaggtccagatgatgttaactcaactcaaaatgtgaatgaaacaactcctttgcatgctgtggatgaaccaagtaccttaccccaccatgttgtagttgtacatgaagttgatactaagcaggggaagccaaccgaacatgaaagcaggcaaaagcaacatgaagctggggctacagcactgcaggaatgtggggatatttcagaggatagattgaatttccttcctgaattgattgcctctgttaaaaaggcagcactggaagatgctgctgagacacggatagcccaatcagatgctaatggtgctgtttcacctgttcctgatgatgatgatgataatgaaaagaagttggatgcagcagctgctggtactacagatgcaaatcaggaccctgatttgcaaggaagcattgatcggcagaagagctccaagattgagtctacaactgctgaagctgaagctttgtctaaaggactacagactataaaaaatgacgatttggaggaaattagagagctgggttcaggtacttatggggcagtttatcatggtaaatggagaggatgtgatgtcgctgttaaaagaataaaagcgagttgctttgtaggaagaccatctgagagagagcgtttgattgcggatttctggaaagaagctctgatcctaagctcactccatcatccaaatgtggtttcattttatggtgtagttcgtgatggtccagatggaagcttagcaactgttactgagtttatgatcaatggatctctaaaacagtttctgaggaaaaaagacaggacaattgatcgccggaagagagtaatattagccatggatgctgcatttggcatggagtatttgcatgggaagaatatagtccattttgacctgaaatgtgagaatctactggtgaacatgagggatccgcagcgaccaatttgcaagatcggtgatcttggactgtcaaaggttaaacagcatactttggtatctggtggtgttagaggaaccttaccatggatggcaccagagcttctgagtgggaaaagtaatatggtgtcagacaagattgatgtctattcgtttggaattgtcatgtgggagttgcttactggggaagagccatactctggcatgcgtgctgctgaaattattgggggcattgtaaacgattccctacgtcctcaaattccttcatggtgtgatcctgagtggaagggattgatggaaagctgttggtccagtgatccagctgagagaccgtccttcacggatatatctcaaaggttgaggaaaatggccgccgcaatgaatgtgaagtaaaggtccggaagccatatttgtcttgtatgtgtgttccccgcatccaatatatatagcgatatacaagaggaaggcagagttgaaacaggattattttgagtaaatatgttccatatgtcttggcagcatcgcagttgatgaccctactccaagtgataatttaacaagtgctgacttcatgggagaaaatctatgtcatggagattccaaagcatgtttgatgttttcttttaatcctggagtaaaccggctaccatttgccttccgccgaaaacaagtatgctatatggcgcattgtcttgatgggagctgttgcactgtcatgtaaataagttttgacttgctggcccgtagtagatgtgcaaagtaataggcacgatcacacagttacttttttttttcccatataaattgtgttctaggataggtagaacgaacatgactggagcgatccttgttcagattgtaaagaaaaggacagacccagtgctgacggttcttatatgagtggggtctggttaaagaataaccaaaacaagtcttatacttttatcttgcagagaggttgcatcgaatctaggactttggctcggtagaaaggtttttcaccactgcgttaggcctatacttttttcagtttaaccactgtgctagacctgcccccttttttgagtttgtacttggtctaaaaataagagtatactgttttccatgtgtatatatcatcacttcctatttgaatgccccaaaaaacaagagtacactgtttgtcatgtatacaccatcacttccaaatacttgcag

SEQ ID NO: 51725 - DNA, 4476 bp, Zea Mays
gtgaccagccgagccgagccggagcggacgagcccccggcgtcgcgagataaaaaaagatcgggagcagaagagaagagagcaggagcagccgggcctaaacagaacagaacagaaaggaaaggagagacgcgtgtcctcccagccactgccaccctcccccacctctgcctctctcgaccccacccgacccggcgcggaaccggagccgcccgcccgcccgcagccccgccgcgccccgaacggtgccgacgagctccagcagcgcccaatggcggcggccttcctcgccctggagccccgcgtgacatgatccctggcttggctcccgagcaggggaatatccgcgcgagcacccccacccccacaccccagccatagggccccccaattctcgccttccccaccgcaaatccttctcgactcccgtatctcccctctcctcctccgccgcctcgcgcgccgcaattggcgttgtgctcgcgtggacccagatcgccgccaggaagtgtctaattggtggtgcgcataggactggctggatttcaatcgtgataatactgatatacggagactcattgctgatccagtgagcctattcgcgccaacttgattacagcctttctcacacaagtatggcgccctctgctgccgtcccgggtggctctgaggttgaggggtcaccacgcatggccaagttcctctgcagctttggaggcagtatccttccccgaccactcgatggctgtcttaggtatgttggcggcgagacaaggattgtcatgttgccgcgtgacatatcatatgccgacctggctgcacggatgagagagctctataaggatgctgatatcatcaaataccagcaacctgatgaggatttagatgcgctggtctcggttgtgaacgacgacgatgtggtgaacatgatggaggagtatgacaaggtcattgcgacaggggaggcgttcactcggctcaggatcttcttattttctcagcatttggatgatgatgctgcatcagtggatgtgcattacaatgtagacgagcgggaaacagagagaaggtatgtagatgcgcttaacagccttggtgatgttaagtcaccttcctcccctgtgtctgtggagcagctttttggcattggaggcaatgattcaggaattcctgattttgctggcttgagacatttgaatgtccctcgtccaacacatagtcagaggtatggagagatggattctccttggagccctgcctatgtctcaccaggccagtacggggtacatgacccaagggattttccaatttcaccatcatctgcaaggtttcaagtaggagcggaggattttgatgagaggactcctgacgactttgtaaggcagtcaccaaaatatcgtcattatgaggcgcattcaccatcacatatggataatttagtctggcttccacctggtgctgtaattcagcaaaatgcaggctttcctggtaatttgagccggtccaacaatttcttggatgggagcaatggatgtgatcactgccgttcaccattccataaggttcaaggttcagtgaatgatcctatctatatgaaccctcgttggactcggccagtccaacaacattttgaccaaccaagcatgattaatgattatcccggtcaccatgctaattcttgtccagattactgccgccctggtgatcattatgtgggaggtcaagatgttagattggaaaatggtgtttatgttaaagagcaaaatggtggtcatcctcccatgttctataatgagtcacatcctcacgatagagtctggcatgtgcataccaagcaaagtcatcagcgatacgaggatccaaggctgcatcatcctgctaatggtagagtgatcgagccatacattatggatgccaacaaagtatatgaagttcattcagcatctcttgctcgttctagccatgagagtcctcactattatcacggtagcagtgaggtcataaatgacacgtatcacaaccaacaagttggaggcagtgggtcgtatgtgcagccagcagggtttgaagaatcccctagccaccattacaaccactcttcggcctatggtgcagattccttttaccaaatgcagcagaatttgccacccattcaatctctgagaaggagagcgaacagccctgttcacactgcctcaccatatgattccccacacctgccaatatcaaatgggaccattaacacaaacttcgtaagaaatacaggtgatgtcagtccgaggataccagggctacctggatatgatcgaatgccaaacacatggactcctcccaacggcagcataccatatagagttgttgggcatgatgttcatgctgcctccatggaaaacactagtgcctttggtcctaggtctaatccaactgctgctcagtatgttcagcatttcattgctcctgaatcaatccagcatcaacctggagctccattgagggaggttcatcctgaaagatcataccctgaacccatgccgtcgtcatatgttgatggcaaagtagctgtttctgcattgcctctcactgatcaattatccaggttggatacaaacacaataaagaaacctgaaggtccagatgatgttaactcaactcaaaatgtgaatgaaacaactcctttgcatgctgtggatgaaccaagtaccttaccccaccatgttgtagttgtacatgaagttgatactaagcaggggaagccaaccgaacatgaaagcaggcaaaagcaacatgaagctggggctacagcactgcaggaatgtggggatatttcagaggatagattgaatttccttcctgaattgattgcctctgttaaaaaggcagcactggaagatgctgctgagacacggatagcccaatcagatgctaatggtgctgtttcacctgttcctgatgatgatgatgataatgaaaagaagttggatgcagcagctgctggtactacagatgcaaatcaggaccctgatttgcaaggaagcattgatcggcagaagagctccaagattgagtctacaactgctgaagctgaagctttgtctaaaggactacagattgcggatttctggaaagaagctctgatcctaagctcactccatcatccaaatgtggtttcattttatggtgtagttcgtgatggtccagatggaagcttagcaactgttactgagtttatgatcaatggatctctaaaacagtttctgaggaaaaaagacaggacaattgatcgccggaagagagtaatattagccatggatgctgcatttggcatggagtatttgcatgggaagaatatagtccattttgacctgaaatgtgagaatctactggtgaacatgagggatccgcagcgaccaatttgcaagatcggtgatcttggactgtcaaaggttaaacagcatactttggtatctggtggtgttagaggaaccttaccatggatggcaccagagcttctgagtgggaaaagtaatatggtgtcagacaagattgatgtctattcgtttggaattgtcatgtgggagttgcttactggggaagagccatactctggcatgcgtgctgctgaaattattgggggcattgtaaacgattccctacgtcctcaaattccttcatggtgtgatcctgagtggaagggattgatggaaagctgttggtccagtgatccagctgagagaccgtccttcacggatatatctcaaaggttgaggaaaatggccgccgcaatgaatgtgaagtaaagcatcgcagttgatgaccctactccaagtgataatttaacaagtgctgacttcatgggagaaaatctatgtcatggagattccaaagcatgtttgatgttttcttttaatcctggagtaaaccggctaccatttgccttccgccgaaaacaagtatgctatatggcgcattgtcttgatgggagctgttgcactgtcatgtaaataagttttgacttgctggcccgtagtagatgtgcaaagtaataggcacgatcacacagttacttttttttttcccatataaattgtgttctaggataggtagaacgaacatgactggagcgatccttgttcagattgtaaagaaaaggacagacccagtgctgacggttcttatatgagtggggtctggttaaagaataaccaaaacaagtcttatacttttatcttgcagagaggttgcatcgaatctaggactttggctcggtagaaaggtttttcaccactgcgttaggcctatacttttttcagtttaaccactgtgctagacctgcccccttttttgagtttgtacttggtctaaaaataagagtatactgttttccatgtgtatatatcatcacttcctatttgaatgccccaaaaaacaagagtacactgtttgtcatgtatacaccatcacttccaaatacttgcag

SEQ ID NO: 51726 - DNA, 4498 bp, Zea Mays
gtgaccagccgagccgagccggagcggacgagcccccggcgtcgcgagataaaaaaagatcgggagcagaagagaagagagcaggagcagccgggcctaaacagaacagaacagaaaggaaaggagagacgcgtgtcctcccagccactgccaccctcccccacctctgcctctctcgaccccacccgacccggcgcggaaccggagccgcccgcccgcccgcagccccgccgcgccccgaacggtgccgacgagctccagcagcgcccaatggcggcggccttcctcgccctggagccccgcgtgacatgatccctggcttggctcccgagcaggggaatatccgcgcgagcacccccacccccacaccccagccatagggccccccaattctcgccttccccaccgcaaatccttctcgactcccgtatctcccctctcctcctccgccgcctcgcgcgccgcaattggcgttgtgctcgcgtggacccagatcgccgccaggaagtgtctaattggtggtgcgcataggactggctggatttcaatcgtgataatactgatatacggagactcattgctgatccagtgagcctattcgcgccaacttgattacagcctttctcacacaagtatggcgccctctgctgccgtcccgggtggctctgaggttgaggggtcaccacgcatggccaagttcctctgcagctttggaggcagtatccttccccgaccactcgatggctgtcttaggtatgttggcggcgagacaaggattgtcatgttgccgcgtgacatatcatatgccgacctggctgcacggatgagagagctctataaggatgctgatatcatcaaataccagcaacctgatgaggatttagatgcgctggtctcggttgtgaacgacgacgatgtggtgaacatgatggaggagtatgacaaggtcattgcgacaggggaggcgttcactcggctcaggatcttcttattttctcagcatttggatgatgatgctgcatcagtggatgtgcattacaatgtagacgagcgggaaacagagagaaggtatgtagatgcgcttaacagccttggtgatgttaagtcaccttcctcccctgtgtctgtggagcagctttttggcattggaggcaatgattcaggaattcctgattttgctggcttgagacatttgaatgtccctcgtccaacacatagtcagaggtatggagagatggattctccttggagccctgcctatgtctcaccaggccagtacggggtacatgacccaagggattttccaatttcaccatcatctgcaaggtttcaagtaggagcggaggattttgatgagaggactcctgacgactttgtaaggcagtcaccaaaatatcgtcattatgaggcgcattcaccatcacatatggataatttagtctggcttccacctggtgctgtaattcagcaaaatgcaggctttcctggtaatttgagccggtccaacaatttcttggatgggagcaatggatgtgatcactgccgttcaccattccataaggttcaaggttcagtgaatgatcctatctatatgaaccctcgttggactcggccagtccaacaacattttgaccaaccaagcatgattaatgattatcccggtcaccatgctaattcttgtccagattactgccgccctggtgatcattatgtgggaggtcaagatgttagattggaaaatggtgtttatgttaaagagcaaaatggtggtcatcctcccatgttctataatgagtcacatcctcacgatagagtctggcatgtgcataccaagcaaagtcatcagcgatacgaggatccaaggctgcatcatcctgctaatggtagagtgatcgagccatacattatggatgccaacaaagtatatgaagttcattcagcatctcttgctcgttctagccatgagagtcctcactattatcacggtagcagtgaggtcataaatgacacgtatcacaaccaacaagttggaggcagtgggtcgtatgtgcagccagcagggtttgaagaatcccctagccaccattacaaccactcttcggcctatggtgcagattccttttaccaaatgcagcagaatttgccacccattcaatctctgagaaggagagcgaacagccctgttcacactgcctcaccatatgattccccacacctgccaatatcaaatgggaccattaacacaaacttcgtaagaaatacaggtgatgtcagtccgaggataccagggctacctggatatgatcgaatgccaaacacatggactcctcccaacggcagcataccatatagagttgttgggcatgatgttcatgctgcctccatggaaaacactagtgcctttggtcctaggtctaatccaactgctgctcagtatgttcagcatttcattgctcctgaatcaatccagcatcaacctggagctccattgagggaggttcatcctgaaagatcataccctgaacccatgccgtcgtcatatgttgatggcaaagtagctgtttctgcattgcctctcactgatcaattatccaggttggatacaaacacaataaagaaacctgaaggtccagatgatgttaactcaactcaaaatgtgaatgaaacaactcctttgcatgctgtggatgaaccaagtaccttaccccaccatgttgtagttgtacatgaagttgatactaagcaggggaagccaaccgaacatgaaagcaggcaaaagcaacatgaagctggggctacagcactgcaggaatgtggggatatttcagaggatagattgaatttccttcctgaattgattgcctctgttaaaaaggcagcactggaagatgctgctgagacacggatagcccaatcagatgctaatggtgctgtttcacctgttcctgatgatgatgatgataatgaaaagaagttggatgcagcagctgctggtactacagatgcaaatcaggaccctgatttgcaaggaagcattgatcggcagaagagctccaagattgagtctacaactgctgaagctgaagctttgtctaaaggactacagattgcggatttctggaaagaagctctgatcctaagctcactccatcatccaaatgtggtttcattttatggtgtagttcgtgatggtccagatggaagcttagcaactgttactgagtttatgatcaatggatctctaaaacagtttctgaggaaaaaagacaggacaattgatcgccggaagagagtaatattagccatggatgctgcatttggcatggagtatttgcatgggaagaatatagtccattttgacctgaaatgtgagaatctactggtgaacatgagggatccgcagcgaccaatttgcaagatcggtgatcttggactgtcaaaggttaaacagcatactttggtatctggtggtgttagaggaaccttaccatggatggcaccagagcttctgagtgggaaaagtaatatggtgtcagacaagattgatgtctattcgtttggaattgtcatgtgggagttgcttactggggaagagccatactctggcatgcgtgctgctgaaattattgggggcattgtaaacgattccctacgtcctcaaattccttcatggtgtgatcctgagtggaagggattgatggaaagctgttggtccagtgatccagctgagagaccgtccttcacggatatatctcaaaggttgaggaaaatggccgccgcaatgaatgtgaagtaaaggtccggaagccatatttgtcttcatcgcagttgatgaccctactccaagtgataatttaacaagtgctgacttcatgggagaaaatctatgtcatggagattccaaagcatgtttgatgttttcttttaatcctggagtaaaccggctaccatttgccttccgccgaaaacaagtatgctatatggcgcattgtcttgatgggagctgttgcactgtcatgtaaataagttttgacttgctggcccgtagtagatgtgcaaagtaataggcacgatcacacagttacttttttttttcccatataaattgtgttctaggataggtagaacgaacatgactggagcgatccttgttcagattgtaaagaaaaggacagacccagtgctgacggttcttatatgagtggggtctggttaaagaataaccaaaacaagtcttatacttttatcttgcagagaggttgcatcgaatctaggactttggctcggtagaaaggtttttcaccactgcgttaggcctatacttttttcagtttaaccactgtgctagacctgcccccttttttgagtttgtacttggtctaaaaataagagtatactgttttccatgtgtatatatcatcacttcctatttgaatgccccaaaaaacaagagtacactgtttgtcatgtatacaccatcacttccaaatacttgcag

SEQ ID NO: 51727 - DNA, 4904 bp, Zea Mays
gtgaccagccgagccgagccggagcggacgagcccccggcgtcgcgagataaaaaaagatcgggagcagaagagaagagagcaggagcagccgggcctaaacagaacagaacagaaaggaaaggagagacgcgtgtcctcccagccactgccaccctcccccacctctgcctctctcgaccccacccgacccggcgcggaaccggagccgcccgcccgcccgcagccccgccgcgccccgaacggtgccgacgagctccagcagcgcccaatggcggcggccttcctcgccctggagccccgcgtgacatgatccctggcttggctcccgagcaggggaatatccgcgcgagcacccccacccccacaccccagccatagggccccccaattctcgccttccccaccgcaaatccttctcgactcccgtatctcccctctcctcctccgccgcctcgcgcgccgcaattggcgttgtgctcgcgtggacccagatcgccgccaggaagtgtctaattggtggtgcgcataggactggctggatttcaatcgtgataatactgatatacggagactcattgctgatccagtgagcctattcgcgccaacttgattacagcctttctcacacaagtatggcgccctctgctgccgtcccgggtggctctgaggttgaggggtcaccacgcatggccaagttcctctgcagctttggaggcagtatccttccccgaccactcgatggctgtcttaggtatgttggcggcgagacaaggattgtcatgttgccgcgtgacatatcatatgccgacctggctgcacggatgagagagctctataaggatgctgatatcatcaaataccagcaacctgatgaggatttagatgcgctggtctcggttgtgaacgacgacgatgtggtgaacatgatggaggagtatgacaaggtcattgcgacaggggaggcgttcactcggctcaggatcttcttattttctcagcatttggatgatgatgctgcatcagtggatgtgcattacaatgtagacgagcgggaaacagagagaaggtatgtagatgcgcttaacagccttggtgatgttaagtcaccttcctcccctgtgtctgtggagcagctttttggcattggaggcaatgattcaggaattcctgattttgctggcttgagacatttgaatgtccctcgtccaacacatagtcagaggtatggagagatggattctccttggagccctgcctatgtctcaccaggccagtacggggtacatgacccaagggattttccaatttcaccatcatctgcaaggtttcaagtaggagcggaggattttgatgagaggactcctgacgactttgtaaggcagtcaccaaaatatcgtcattatgaggcgcattcaccatcacatatggataatttagtctggcttccacctggtgctgtaattcagcaaaatgcaggctttcctggtaatttgagccggtccaacaatttcttggatgggagcaatggatgtgatcactgccgttcaccattccataaggttcaaggttcagtgaatgatcctatctatatgaaccctcgttggactcggccagtccaacaacattttgaccaaccaagcatgattaatgattatcccggtcaccatgctaattcttgtccagattactgccgccctggtgatcattatgtgggaggtcaagatgttagattggaaaatggtgtttatgttaaagagcaaaatggtggtcatcctcccatgttctataatgagtcacatcctcacgatagagtctggcatgtgcataccaagcaaagtcatcagcgatacgaggatccaaggctgcatcatcctgctaatggtagagtgatcgagccatacattatggatgccaacaaagtatatgaagttcattcagcatctcttgctcgttctagccatgagagtcctcactattatcacggtagcagtgaggtcataaatgacacgtatcacaaccaacaagttggaggcagtgggtcgtatgtgcagccagcagggtttgaagaatcccctagccaccattacaaccactcttcggcctatggtgcagattccttttaccaaatgcagcagaatttgccacccattcaatctctgagaaggagagcgaacagccctgttcacactgcctcaccatatgattccccacacctgccaatatcaaatgggaccattaacacaaacttcgtaagaaatacaggtgatgtcagtccgaggataccagggctacctggatatgatcgaatgccaaacacatggactcctcccaacggcagcataccatatagagttgttgggcatgatgttcatgctgcctccatggaaaacactagtgcctttggtcctaggtctaatccaactgctgctcagtatgttcagcatttcattgctcctgaatcaatccagcatcaacctggagctccattgagggaggttcatcctgaaagatcataccctgaacccatgccgtcgtcatatgttgatggcaaagtagctgtttctgcattgcctctcactgatcaattatccaggttggatacaaacacaataaagaaacctgaaggtccagatgatgttaactcaactcaaaatgtgaatgaaacaactcctttgcatgctgtggatgaaccaagtaccttaccccaccatgttgtagttgtacatgaagttgatactaagcaggggaagccaaccgaacatgaaagcaggcaaaagcaacatgaagctggggctacagcactgcaggaatgtggggatatttcagaggatagattgaatttccttcctgaattgattgcctctgttaaaaaggcagcactggaagatgctgctgagacacggatagcccaatcagatgctaatggtgctgtttcacctgttcctgatgatgatgatgataatgaaaagaagttggatgcagcagctgctggtactacagatgcaaatcaggaccctgatttgcaaggaagcattgatcggcagaagagctccaagattgagtctacaactgctgaagctgaagctttgtctaaaggactacaggtatgttatgtgatctctgtgtgaattttactttatgtttcatttatactgtttatggatcatgcagactataaaaaatgacgatttggaggaaattagagagctgggttcaggtacttatggggcagtttatcatggtaaatggagaggatgtgatgtcgctgttaaaagaataaaagcgagttgctttgtaggaagaccatctgagagagagcgtttggtatgtctaattttcttgtcagttccatctattttaggttttgtgcttgcagatgtttgcactgacattacagtactggttcctcaaagtccttcacattattttctgaatgatattttgagctatccagctgggctgaggagaaagtaaatttgaacatatttttctgttcaaaatgattctagttcagatttatctaattttgcagattgcggatttctggaaagaagctctgatcctaagctcactccatcatccaaatgtggtttcattttatggtgtagttcgtgatggtccagatggaagcttagcaactgttactgagtttatgatcaatggatctctaaaacagtttctgaggaaaaaagacaggacaattgatcgccggaagagagtaatattagccatggatgctgcatttggcatggagtatttgcatgggaagaatatagtccattttgacctgaaatgtgagaatctactggtgaacatgagggatccgcagcgaccaatttgcaagatcggtgatcttggactgtcaaaggttaaacagcatactttggtatctggtggtgttagaggaaccttaccatggatggcaccagagcttctgagtgggaaaagtaatatggtgtcagacaagattgatgtctattcgtttggaattgtcatgtgggagttgcttactggggaagagccatactctggcatgcgtgctgctgaaattattgggggcattgtaaacgattccctacgtcctcaaattccttcatggtgtgatcctgagtggaagggattgatggaaagctgttggtccagtgatccagctgagagaccgtccttcacggatatatctcaaaggttgaggaaaatggccgccgcaatgaatgtgaagtaaagcatcgcagttgatgaccctactccaagtgataatttaacaagtgctgacttcatgggagaaaatctatgtcatggagattccaaagcatgtttgatgttttcttttaatcctggagtaaaccggctaccatttgccttccgccgaaaacaagtatgctatatggcgcattgtcttgatgggagctgttgcactgtcatgtaaataagttttgacttgctggcccgtagtagatgtgcaaagtaataggcacgatcacacagttacttttttttttcccatataaattgtgttctaggataggtagaacgaacatgactggagcgatccttgttcagattgtaaagaaaaggacagacccagtgctgacggttcttatatgagtggggtctggttaaagaataaccaaaacaagtcttatacttttatcttgcagagaggttgcatcgaatctaggactttggctcggtagaaaggtttttcaccactgcgttaggcctatacttttttcagtttaaccactgtgctagacctgcccccttttttgagtttgtacttggtctaaaaataagagtatactgttttccatgtgtatatatcatcacttcctatttgaatgccccaaaaaacaagagtacactgtttgtcatgtatacaccatcacttccaaatacttgcag

SEQ ID NO: 51728 - DNA, 4518 bp, Zea Mays
gtgaccagccgagccgagccggagcggacgagcccccggcgtcgcgagataaaaaaagatcgggagcagaagagaagagagcaggagcagccgggcctaaacagaacagaacagaaaggaaaggagagacgcgtgtcctcccagccactgccaccctcccccacctctgcctctctcgaccccacccgacccggcgcggaaccggagccgcccgcccgcccgcagccccgccgcgccccgaacggtgccgacgagctccagcagcgcccaatggcggcggccttcctcgccctggagccccgcgtgacatgatccctggcttggctcccgagcaggggaatatccgcgcgagcacccccacccccacaccccagccatagggccccccaattctcgccttccccaccgcaaatccttctcgactcccgtatctcccctctcctcctccgccgcctcgcgcgccgcaattggcgttgtgctcgcgtggacccagatcgccgccaggaagtgtctaattggtggtgcgcataggactggctggatttcaatcgtgataatactgatatacggagactcattgctgatccagtgagcctattcgcgccaacttgattacagcctttctcacacaagtatggcgccctctgctgccgtcccgggtggctctgaggttgaggggtcaccacgcatggccaagttcctctgcagctttggaggcagtatccttccccgaccactcgatggctgtcttaggtatgttggcggcgagacaaggattgtcatgttgccgcgtgacatatcatatgccgacctggctgcacggatgagagagctctataaggatgctgatatcatcaaataccagcaacctgatgaggatttagatgcgctggtctcggttgtgaacgacgacgatgtggtgaacatgatggaggagtatgacaaggtcattgcgacaggggaggcgttcactcggctcaggatcttcttattttctcagcatttggatgatgatgctgcatcagtggatgtgcattacaatgtagacgagcgggaaacagagagaaggtatgtagatgcgcttaacagccttggtgatgttaagtcaccttcctcccctgtgtctgtggagcagctttttggcattggaggcaatgattcaggaattcctgattttgctggcttgagacatttgaatgtccctcgtccaacacatagtcagaggtatggagagatggattctccttggagccctgcctatgtctcaccaggccagtacggggtacatgacccaagggattttccaatttcaccatcatctgcaaggtttcaagtaggagcggaggattttgatgagaggactcctgacgactttgtaaggcagtcaccaaaatatcgtcattatgaggcgcattcaccatcacatatggataatttagtctggcttccacctggtgctgtaattcagcaaaatgcaggctttcctggtaatttgagccggtccaacaatttcttggatgggagcaatggatgtgatcactgccgttcaccattccataaggttcaaggttcagtgaatgatcctatctatatgaaccctcgttggactcggccagtccaacaacattttgaccaaccaagcatgattaatgattatcccggtcaccatgctaattcttgtccagattactgccgccctggtgatcattatgtgggaggtcaagatgttagattggaaaatggtgtttatgttaaagagcaaaatggtggtcatcctcccatgttctataatgagtcacatcctcacgatagagtctggcatgtgcataccaagcaaagtcatcagcgatacgaggatccaaggctgcatcatcctgctaatggtagagtgatcgagccatacattatggatgccaacaaagtatatgaagttcattcagcatctcttgctcgttctagccatgagagtcctcactattatcacggtagcagtgaggtcataaatgacacgtatcacaaccaacaagttggaggcagtgggtcgtatgtgcagccagcagggtttgaagaatcccctagccaccattacaaccactcttcggcctatggtgcagattccttttaccaaatgcagcagaatttgccacccattcaatctctgagaaggagagcgaacagccctgttcacactgcctcaccatatgattccccacacctgccaatatcaaatgggaccattaacacaaacttcgtaagaaatacaggtgatgtcagtccgaggataccagggctacctggatatgatcgaatgccaaacacatggactcctcccaacggcagcataccatatagagttgttgggcatgatgttcatgctgcctccatggaaaacactagtgcctttggtcctaggtctaatccaactgctgctcagtatgttcagcatttcattgctcctgaatcaatccagcatcaacctggagctccattgagggaggttcatcctgaaagatcataccctgaacccatgccgtcgtcatatgttgatggcaaagtagctgtttctgcattgcctctcactgatcaattatccaggttggatacaaacacaataaagaaacctgaaggtccagatgatgttaactcaactcaaaatgtgaatgaaacaactcctttgcatgctgtggatgaaccaagtaccttaccccaccatgttgtagttgtacatgaagttgatactaagcaggggaagccaaccgaacatgaaagcaggcaaaagcaacatgaagctggggctacagcactgcaggaatgtggggatatttcagaggatagattgaatttccttcctgaattgattgcctctgttaaaaaggcagcactggaagatgctgctgagacacggatagcccaatcagatgctaatggtgctgtttcacctgttcctgatgatgatgatgataatgaaaagaagttggatgcagcagctgctggtactataaaaaatgacgatttggaggaaattagagagctgggttcaggtacttatggggcagtttatcatggtaaatggagaggatgtgatgtcgctgttaaaagaataaaagcgagttgctttgtaggaagaccatctgagagagagcgtttgattgcggatttctggaaagaagctctgatcctaagctcactccatcatccaaatgtggtttcattttatggtgtagttcgtgatggtccagatggaagcttagcaactgttactgagtttatgatcaatggatctctaaaacagtttctgaggaaaaaagacaggacaattgatcgccggaagagagtaatattagccatggatgctgcatttggcatggagtatttgcatgggaagaatatagtccattttgacctgaaatgtgagaatctactggtgaacatgagggatccgcagcgaccaatttgcaagatcggtgatcttggactgtcaaaggttaaacagcatactttggtatctggtggtgttagaggaaccttaccatggatggcaccagagcttctgagtgggaaaagtaatatggtgtcagacaagattgatgtctattcgtttggaattgtcatgtgggagttgcttactggggaagagccatactctggcatgcgtgctgctgaaattattgggggcattgtaaacgattccctacgtcctcaaattccttcatggtgtgatcctgagtggaagggattgatggaaagctgttggtccagtgatccagctgagagaccgtccttcacggatatatctcaaaggttgaggaaaatggccgccgcaatgaatgtgaagtaaagcatcgcagttgatgaccctactccaagtgataatttaacaagtgctgacttcatgggagaaaatctatgtcatggagattccaaagcatgtttgatgttttcttttaatcctggagtaaaccggctaccatttgccttccgccgaaaacaagtatgctatatggcgcattgtcttgatgggagctgttgcactgtcatgtaaataagttttgacttgctggcccgtagtagatgtgcaaagtaataggcacgatcacacagttacttttttttttcccatataaattgtgttctaggataggtagaacgaacatgactggagcgatccttgttcagattgtaaagaaaaggacagacccagtgctgacggttcttatatgagtggggtctggttaaagaataaccaaaacaagtcttatacttttatcttgcagagaggttgcatcgaatctaggactttggctcggtagaaaggtttttcaccactgcgttaggcctatacttttttcagtttaaccactgtgctagacctgcccccttttttgagtttgtacttggtctaaaaataagagtatactgttttccatgtgtatatatcatcacttcctatttgaatgccccaaaaaacaagagtacactgtttgtcatgtatacaccatcacttccaaatacttgcag

SEQ ID NO: 51729 - DNA, 1751 bp, Zea Mays
actgaattcgctgaagtggtgatgctataggacaattgtaaaacgtaaaatgctgaaggtgcttgtgggtatgtgattctaaaagcagctgctgagaatactttgcaacactagtaagcacaagttacagcaggttataatcatagtttgaactcgattgaagtcactgaaatgattatgcaactgggagtgatgcacagcagcaacgcaatctagtttgctagtgacaatcctgttatgtccacgggtaccctcatgctactcagtagtcagagcaattattcaaaattaacatatgacggagttgacttaatgggtgaaaggctagcagaggaggttcgacaagttgttcagaggagaagaaacttgaggaaaatatcttttgttgctcattcacttggcggcttagtaacaagatatgcaataggaaaactttatgaacctgccatggatgaaacatcttcttgtgacattgataagccttctgatgaacaaaatgtacgtgatgttggtaaaatagctggtttggaaccaatcaattttattacatctgctacacctcacttgggctcaaggttgaataagcaacttcccttcctttttggtgtcccacttttggagaaaactgctgcaggaacagcacattttatagttggaagaactggtaaacatctattccttacagacaatgatgatgggaagcctcctcttctcctacgaatggttgaagattgtgacgacgggaaattcatgtctgctttgcgctgtttcaagcgtcgtgttgcctatgctaatgtaacatatgatcatatagttggttggagaacatcatcgcttcgacgtcaacatgaattaccaaaactcaagctaacagcaaacgatgaaaagtatcctcatattattaatgtcgataaaggaaatctagaggatcatcggcaagagggatctgtagaagattcactggcagatagttatgaagaggtgatgatccgtggccttacacaagtggcctgggaacgtgtggacgtatgctttcataagagttggctaagatacaacgcccataataacatccaggttaggatccatccaattaattcagatggagaagacgtcatataccatatgatagacaattttgtagtgtagccaagtagtccgtccggtgaatgccaactactacgtaaaagattactgctatttccagtggattcgccttgagaggtcattaatcttttaccatgtgggttgctatgcacaacagctagataattggcatcaatcagcacgtaactcatacgtgctgctaggtgattcgagcgtaggacctgtgcttgttggttgttgctggcaatgtaaatataagtgttaggtaatgcaaatatttgcatgacagtgcatattcttgtaaatgggaatttaccatgttattggaaatccaaagttcaaactatctcaagcttgttggttgctgtgctgaaataaaaaagatgttccttttctgccatgtgcacacctgcctgattgaagtcgtgacttcctcgaggcgatggtaagacgcggcatcggccttgtccagaaatgttcctttccgatgaacttgacaatagtttgagatccaggtcctgtctgtctgcaaccatctgattacctcatatgcttagcagaaaaactggaaggggtaactggtagttacccgtcgaatcggttgaattttacaaaacgaacatgatagacattctgaactcgct

SEQ ID NO: 51730 - DNA, 1511 bp, Zea Mays
ccacgggtaccctcatgctactcagtagtcagagcaattattcaaaattaacatatgacggagttgacttaatgggtgaaaggctagcagaggaggttcgacaagttgttcagaggagaagaaacttgaggaaaatatcttttgttgctcattcacttggcggcttagtaacaagatatgcaataggaaaactttatgaacctgccatggatgaaacatcttcttgtgacattgataagccttctgatgaacaaaatgtacgtgatgttggtaaaatagctggtttggaaccaatcaattttattacatctgctacacctcacttgggctcaaggttgaataagcaacttcccttcctttttggtgtcccacttttggagaaaactgctgcaggaacagcacattttatagttggaagaactggtaaacatctattccttacagacaatgatgatgggaagcctcctcttctcctacgaatggttgaagattgtgacgacgggaaattcatgtctgctttgcgctgtttcaagcgtcgtgttgcctatgctaatgtaacatatgatcgtatccaactgatgctacacattttctattttctgcatcattttatgaattgattatcaagggtatccgtttacatgtgcccttaacttatcgaaatagatatagttggttggagaacatcatcgcttcgacgtcaacatgaattaccaaaactcaagctaacagcaaacgatgaaaagtatcctcatattattaatgtcgataaaggaaatctagaggatcatcggcaagagggatctgtagaagattcactggcagatagttatgaaggttaggatccatccaattaattcagatggagaagacgtcatataccatatgatagacaattttgtagtgtagccaagtagtccgtccggtgaatgccaactactacgtaaaagattactgctatttccagtggattcgccttgagaggtcattaatcttttaccatgtgggttgctatgcacaacagctagataattggcatcaatcagcacgtaactcatacgtgctgctaggtgattcgagcgtaggacctgtgcttgttggttgttgctggcaatgtaaatataagtgttaggtaatgcaaatatttgcatgacagtgcatattcttgtaaatgggaatttaccatgttattggaaatccaaagttcaaactatctcaagcttgttggttgctgtgctgaaataaaaaagatgttccttttctgccatgtgcacacctgcctgattgaagtcgtgacttcctcgaggcgatggtaagacgcggcatcggccttgtccagaaatgttcctttccgatgaacttgacaatagtttgagatccaggtcctgtctgtctgcaaccatctgattacctcatatgcttagcagaaaaactggaaggggtaactggtagttacccgtcgaatcggttgaattttacaaaacgaacatgatagacattctgaactcgct

SEQ ID NO: 51731 - DNA, 934 bp, Zea Mays
ggaattcttccaaagcagtggtccagtagaagggtgcaagctcatcagaaaagaaaaggtggatctttctttattttaattaaaaaatgtctatagatagcttgtaaccgataaatccataccccacctgtccctagcacctactcgcccactcacctgtaaaattgtggctgccttttcagattgctctttgcatctgatttttggctttgctttccccgtatgtctcaagtctagttaccatttatggctttcgcacctgtaaacatttatggttgcttttgttgattcatactagcatctatgctaatttttaatgcacgaccttaatgctacttttaggtgtatttatgatcaatcaccatgtattttacgctcttcggttctttatgtcaaaaaatgggtttttacgctgatttatatgtgtgcctatgctgcaacacatacaattctaactaaatatgcataaagcagcgcgccagcacctcatattttattctcattgtttctacttcgttaattcattgacccatgtctctgtcttagtatattctggagacagatccccacgtctagagttacaagaagaccaagcttggctgtggctgctgctgtgttgcctcctcttgttggaccgaagagagggaggggagaagcagctggcgtgcagacttctactcaggtggtcttttattctctatggggattctaggatacatcttctccagaagcaccataagtcttgtcttgggcattacaccagggctagccactctgctacttggcactctcagtctgaagttctggaggagcggcagatccatcttcctgcttatcttggctcagaggtgatgctgatgtgcaagcatcttcaccttgagttctgccttgccagaatgaatcaagtttattttcccatcctgctccatttgag

SEQ ID NO: 51732 - DNA, 2318 bp, Zea Mays
aaggcatcgtcccgagacccgattccccgtcccagagacgagagacggcacaacccttgctgccgtcctggtcgccacacggccacaccaacccaacacctcttcttcctccgctctcagcttaccccaccacaggcgagggaggcgactccttcctcgcggctgcccgctccggccccgatcgcatctcctttgcacgccacggcccgcggcccgcgcgcagtgtccatcggcacggccgtcctccgtgtgtgggggcgcatctggtgctagcttgccgggctagggtttggcttggcctcgtctaccgccccgtctcgtctgataggcacagagcattagagcaattatcttggagttgcagatctgtacctgaagattcatattgaaatctggaagcttctgctgttgagtacagagaaatatttcttgccttttgaggaagactgcagagcccctaaatgtgaaacttgtttcttttcttgtctactcctgaatgctgacgaactcagcctctcacgttacttagctgaaggtcgtactggtacagacaccgaggatggagcaagcaacaggtgtaagtggtcctgaacacataattgatattccaagggaaattggtcctcctgcttcggtttctcgtagtgctggtagagagaaccatgaagaatcgaatcctgtggacaggccttcaacaagagctctagtacctgccttgcaggcaccatcagcaataggtgctgtacctattacagggcatacttcaggcactaggagaaatgacaactatgttcgtcggcacagaagcccattgaattctggactgtggatttcaattgaagttattgttaactttagccagattgttgctgccattgttgttctttgtgtgtcaagaaaggaacacccacaagctccattacttgagtgggtcataggttacactgttggttgttttgcaacgttaccccatctctattggcgctatatacaccgtaatattgtaaatggtgagcatgagtcatcacatacacctcaagggtccgctcataacaactcaaatgaagcgactcatgctgcaagtgcatcagaacgccgcagaaatgctgcccgaaatgctgtgcttgctaatcctaggatcaatgcgctgtttgaccacttcaagatggccctggattgtttctttgccgtctggtttgttgttggaaacgtgtggatatttggtggccgttcttctgctgctgatgcaccgaacttgtacaggttgtgcattgtgttcctcacttttagttgcattgggtatgccatgccattcatcctatgtgcaatgatatgctgttgccttccctgcattatatctattatgggttttagagaagatacaaacaatacaaggggtgcttcctcagaatctatcaatgctttgcctacatataaattcaaaatcaagaaacgtcgccatggttcaggcagtgaaactgaaggtcaggaaggagggatattggctgcaggaactgacaaggagcgatcactctctgctgaagacgcagtttgctgcatctgtcttgcaaaatatgcgcacaatgatgagctccgtgaacttccatgtgcacactgtttccacaaggactgtgttgataaatggctcaagataaatgcactttgccctctgtgcaaatctgagatagtgagctcgtctggtacttctgatgcccgccaatcagaccagaacaccgttcctgtgcaggagatcgaaatgcattaggttggtctgttcccgcagcttatcacataaggatacatctgatttgtggctctcaatcttcatgtataaagttggagattgatgtatggattgtagagacgcgtaggtttttttttgtatttaacactgctatcttggagaagttacagctattctcgctgtcacccaactatggcaagccaatactacccaggttttcccccatagcgtgggttgcaccttatgttctgctctttatgacattgcatgacttctttcgagtttctagagcgaaataggcagaagatgttggagatagtctaatcaagtggttgtagtgaaacattttcgtgcatgcaacttttgaaatactccctccattctaaactatactataggacggttggttttttctatatatatattgtttttgctatgcacttagatatatattacatctagatatatcatatatagttataatgtatttagatgaaattgtcttatagtttgggacttggaatggagggtgtattttcatgctacaaattgaagttaccgatatcagtttatg

SEQ ID NO: 51733 - DNA, 2070 bp, Zea Mays
tcgtgatacagttggttagaagcttcacgcttcagttagtgtggttcaattctcgactgccaatatggcagtcatttagattggggagcattagagcaattatcttggagttgcagatctgtacctgaagattcatattgaaatctggaagcttctgctgttgagtacagagaaatatttcttgccttttgaggaagactgcagagcccctaaatgtgaaacttgtttcttttcttgtctactcctgaatgctgacgaactcagcctctcacgttacttagctgaaggtcgtactggtacagacaccgaggatggagcaagcaacaggtgtaagtggtcctgaacacataattgatattccaagggaaattggtcctcctgcttcggtttctcgtagtgctggtagagagaaccatgaagaatcgaatcctgtggacaggccttcaacaagagctctagtacctgccttgcaggcaccatcagcaataggtgctgtacctattacagggcatacttcaggcactaggagaaatgacaactatgttcgtcggcacagaagcccattgaattctggactgtggatttcaattgaagttattgttaactttagccagattgttgctgccattgttgttctttgtgtgtcaagaaaggaacacccacaagctccattacttgagtgggtcataggttacactgttggttgttttgcaacgttaccccatctctattggcgctatatacaccgtaatattgtaaatggtgagcatgagtcatcacatacacctcaagggtccgctcataacaactcaaatgaagcgactcatgctgcaagtgcatcagaacgccgcagaaatgctgcccgaaatgctgtgcttgctaatcctaggatcaatgcgctgtttgaccacttcaagatggccctggattgtttctttgccgtctggtttgttgttggaaacgtgtggatatttggtggccgttcttctgctgctgatgcaccgaacttgtacaggttgtgcattgtgttcctcacttttagttgcattgggtatgccatgccattcatcctatgtgcaatgatatgctgttgccttccctgcattatatctattatgggttttagagaagatacaaacaatacaaggggtgcttcctcagaatctatcaatgctttgcctacatataaattcaaaatcaagaaacgtcgccatggttcaggcagtgaaactgaaggtcaggaaggagggatattggctgcaggaactgacaaggagcgatcactctctgctgaagacgcagtttgctgcatctgtcttgcaaaatatgcgcacaatgatgagctccgtgaacttccatgtgcacactgtttccacaaggactgtgttgataaatggctcaagataaatgcactttgccctctgtgcaaatctgagatagtgagctcgtctggtacttctgatgcccgccaatcagaccagaacaccgttcctgtgcaggagatcgaaatgcattaggttggtctgttcccgcagcttatcacataaggatacatctgatttgtggctctcaatcttcatgtataaagttggagattgatgtatggattgtagagacgcgtaggtttttttttgtatttaacactgctatcttggagaagttacagctattctcgctgtcacccaactatggcaagccaatactacccaggttttcccccatagcgtgggttgcaccttatgttctgctctttatgacattgcatgacttctttcgagtttctagagcgaaataggcagaagatgttggagatagtctaatcaagtggttgtagtgaaacattttcgtgcatgcaacttttgaaatactccctccattctaaactatactataggacggttggttttttctatatatatattgtttttgctatgcacttagatatatattacatctagatatatcatatatagttataatgtatttagatgaaattgtcttatagtttgggacttggaatggagggtgtattttcatgctacaaattgaagttaccgatatcagtttatg

SEQ ID NO: 51734 - DNA, 2062 bp, Zea Mays
cttggatggaatgagaagggttatcttatgctgactagccacaataaattagaagacattgttcatgaattgatggggagcattagagcaattatcttggagttgcagatctgtacctgaagattcatattgaaatctggaagcttctgctgttgagtacagagaaatatttcttgccttttgaggaagactgcagagcccctaaatgtgaaacttgtttcttttcttgtctactcctgaatgctgacgaactcagcctctcacgttacttagctgaaggtcgtactggtacagacaccgaggatggagcaagcaacaggtgtaagtggtcctgaacacataattgatattccaagggaaattggtcctcctgcttcggtttctcgtagtgctggtagagagaaccatgaagaatcgaatcctgtggacaggccttcaacaagagctctagtacctgccttgcaggcaccatcagcaataggtgctgtacctattacagggcatacttcaggcactaggagaaatgacaactatgttcgtcggcacagaagcccattgaattctggactgtggatttcaattgaagttattgttaactttagccagattgttgctgccattgttgttctttgtgtgtcaagaaaggaacacccacaagctccattacttgagtgggtcataggttacactgttggttgttttgcaacgttaccccatctctattggcgctatatacaccgtaatattgtaaatggtgagcatgagtcatcacatacacctcaagggtccgctcataacaactcaaatgaagcgactcatgctgcaagtgcatcagaacgccgcagaaatgctgcccgaaatgctgtgcttgctaatcctaggatcaatgcgctgtttgaccacttcaagatggccctggattgtttctttgccgtctggtttgttgttggaaacgtgtggatatttggtggccgttcttctgctgctgatgcaccgaacttgtacaggttgtgcattgtgttcctcacttttagttgcattgggtatgccatgccattcatcctatgtgcaatgatatgctgttgccttccctgcattatatctattatgggttttagagaagatacaaacaatacaaggggtgcttcctcagaatctatcaatgctttgcctacatataaattcaaaatcaagaaacgtcgccatggttcaggcagtgaaactgaaggtcaggaaggagggatattggctgcaggaactgacaaggagcgatcactctctgctgaagacgcagtttgctgcatctgtcttgcaaaatatgcgcacaatgatgagctccgtgaacttccatgtgcacactgtttccacaaggactgtgttgataaatggctcaagataaatgcactttgccctctgtgcaaatctgagatagtgagctcgtctggtacttctgatgcccgccaatcagaccagaacaccgttcctgtgcaggagatcgaaatgcattaggttggtctgttcccgcagcttatcacataaggatacatctgatttgtggctctcaatcttcatgtataaagttggagattgatgtatggattgtagagacgcgtaggtttttttttgtatttaacactgctatcttggagaagttacagctattctcgctgtcacccaactatggcaagccaatactacccaggttttcccccatagcgtgggttgcaccttatgttctgctctttatgacattgcatgacttctttcgagtttctagagcgaaataggcagaagatgttggagatagtctaatcaagtggttgtagtgaaacattttcgtgcatgcaacttttgaaatactccctccattctaaactatactataggacggttggttttttctatatatatattgtttttgctatgcacttagatatatattacatctagatatatcatatatagttataatgtatttagatgaaattgtcttatagtttgggacttggaatggagggtgtattttcatgctacaaattgaagttaccgatatcagtttatg

SEQ ID NO: 51735 - DNA, 2058 bp, Zea Mays
cgtcagaccccttcgatctactagggcggctgaatcagtttggctgagcaggaagataacacaaaaatggacaaagcattagagcaattatcttggagttgcagatctgtacctgaagattcatattgaaatctggaagcttctgctgttgagtacagagaaatatttcttgccttttgaggaagactgcagagcccctaaatgtgaaacttgtttcttttcttgtctactcctgaatgctgacgaactcagcctctcacgttacttagctgaaggtcgtactggtacagacaccgaggatggagcaagcaacaggtgtaagtggtcctgaacacataattgatattccaagggaaattggtcctcctgcttcggtttctcgtagtgctggtagagagaaccatgaagaatcgaatcctgtggacaggccttcaacaagagctctagtacctgccttgcaggcaccatcagcaataggtgctgtacctattacagggcatacttcaggcactaggagaaatgacaactatgttcgtcggcacagaagcccattgaattctggactgtggatttcaattgaagttattgttaactttagccagattgttgctgccattgttgttctttgtgtgtcaagaaaggaacacccacaagctccattacttgagtgggtcataggttacactgttggttgttttgcaacgttaccccatctctattggcgctatatacaccgtaatattgtaaatggtgagcatgagtcatcacatacacctcaagggtccgctcataacaactcaaatgaagcgactcatgctgcaagtgcatcagaacgccgcagaaatgctgcccgaaatgctgtgcttgctaatcctaggatcaatgcgctgtttgaccacttcaagatggccctggattgtttctttgccgtctggtttgttgttggaaacgtgtggatatttggtggccgttcttctgctgctgatgcaccgaacttgtacaggttgtgcattgtgttcctcacttttagttgcattgggtatgccatgccattcatcctatgtgcaatgatatgctgttgccttccctgcattatatctattatgggttttagagaagatacaaacaatacaaggggtgcttcctcagaatctatcaatgctttgcctacatataaattcaaaatcaagaaacgtcgccatggttcaggcagtgaaactgaaggtcaggaaggagggatattggctgcaggaactgacaaggagcgatcactctctgctgaagacgcagtttgctgcatctgtcttgcaaaatatgcgcacaatgatgagctccgtgaacttccatgtgcacactgtttccacaaggactgtgttgataaatggctcaagataaatgcactttgccctctgtgcaaatctgagatagtgagctcgtctggtacttctgatgcccgccaatcagaccagaacaccgttcctgtgcaggagatcgaaatgcattaggttggtctgttcccgcagcttatcacataaggatacatctgatttgtggctctcaatcttcatgtataaagttggagattgatgtatggattgtagagacgcgtaggtttttttttgtatttaacactgctatcttggagaagttacagctattctcgctgtcacccaactatggcaagccaatactacccaggttttcccccatagcgtgggttgcaccttatgttctgctctttatgacattgcatgacttctttcgagtttctagagcgaaataggcagaagatgttggagatagtctaatcaagtggttgtagtgaaacattttcgtgcatgcaacttttgaaatactccctccattctaaactatactataggacggttggttttttctatatatatattgtttttgctatgcacttagatatatattacatctagatatatcatatatagttataatgtatttagatgaaattgtcttatagtttgggacttggaatggagggtgtattttcatgctacaaattgaagttaccgatatcagtttatg

SEQ ID NO: 51736 - DNA, 2418 bp, Zea Mays
tctagaaggcggggctctccttctgcagaaaaagagagagaattaaaaaatattcctctacaaataggtaagtgtaactaaggaaagtaatcctctgatcctatcgctaccaccttcaacccggtgtccttctccttcactcctacttggcactttgacagagacaaaaaccaaacccgcggcgcctgtcgtcgctccttcgttctcgccgctgccgcactcccgacggccaccttaacaagcctctggcggaggaccaaatactctcgcgatcgccgtagcgccaccgcgtcgcccaatccgttgggagccgtcgcgcgatgcaggcggacgagcaggcggaggcgccgcgccgcgccaaggaggccggcaacgacgcctaccgcaagtccttgctcgaggaggccgtggagcactacaccctcggcgcgctccttgaccccagtgacatcgccttcctcaccaatcgcgccgccgcctacctccgcatgggcaagtacgaggagtgcgtgagggactgcgatgaggccgtgaagcgcggcagggagctcagctccggcagcgagctgatcgcgaaggcgctgtctcggaaggcgtcggcgctgctcgagctcgcgtgctgcgccgcagactacgcaccggctatcggcgccctcaagctgtcgctggccgaaaattacagcgaggagacgctcgagaagctcaacgacgcggagagcgtgaggaaggaggttgaggaacaggagcgattggatcaggaggccgccaaccaatgccgcgaggaaggcatttagcaacagagctcaatgccacatccatctgggagcctttcctcaaggtcttgaggatgccgagaaatgcattgaactagatccaacttttctgaagggctatgtgcgtaaagctaaagtccagttcctgatggaaagttatgaaaatgctttggcaacttacctagagggtctgaagtgtgacccaaataatatggaggttctggatggcttaagaagatgtgcagcatgtgttaagaggtctaatgcgggtgatgttgagatcgaggatttgaaatatgttgatattgatgaattgaaatatttctcgggtggtggtccaaacactgtacaccagcagaggaggagtggggtgatgacttctgagtgtcaatgcaacaccaaggacattgacgagtcatccgccgagaggctgtacgacgcagtgaagtacaccacggacaacatgatgctgatccaggtcccagtgttaggaacaacgaaggaattctggtgattatctgacaaagcgactaggatcagcagaaaacttgcattgatactgaggagccaccactccgtcggcaagtacctagctgctcctctgcaggtgtccaacatctggattgggagcaatgggagtgtcaagctaaggggggtcagtttcactggtcaaggcttcagcactgagcgtgtgagagatgactacaaacgcatgtccaggatcctgatggcgttaattactctctcgggtggggacagaagcaaattgcctccggactacaaagagttcctcctgctcttggaatcggacacccttacaatggaagatgaattcttgattgtaaacaatgctgcactgctgcccataaaaaaccgcactgaggtctttctgatgctacacgatagaattgtcgattatcttgggagtacggacaaaacgaagaagaagaaaaagaagaggatactctctagtcttccctacaaggaagactggctagatactgccaaggcaaatacaaaaatcaaccagtgggttgccaatgttcagaacgagtacagagcgactccacatgatctgctgcggctcaacagaaatgtaagaagccacatgcatcgctacagcgacggtgacgacatcgaggaagttctgtattgcgaatggcccgagctgctcatggtcatgcagaagatgttgcacttggaaggcgagctcgaaggcactgacattcagaacaagtttggctaggcgtcctacttaagctactgttcttcgatcgagttcaggggccgaaagtttatgctggtggagtgatggtcgatgtaagtttgtcgctctcatcatgaaggtaaagctggatcagctttataaaatgtatgctaaaatgtaaagtaaactttaaaccattctatctgagaaggtcttttcttaatacaataccgggagtatgtctcgtcttgcttgtaaatcgtgcctgggtatctggctgtaggtttgtcttgcttgatcttgtgaggatgctgctcgcgttccttggagatcaagcatgcaaacgtctgtaaacaacatccttctcctcttactgaagataaagctggaccagctttataaaagtattatgaaaaatgttgcattaaaactctaaac

SEQ ID NO: 51737 - DNA, 3773 bp, Zea Mays
tctagaaggcggggctctccttctgcagaaaaagagagagaattaaaaaatattcctctacaaataggtaagtgtaactaaggaaagtaatcctctgatcctatcgctaccaccttcaacccggtgtccttctccttcactcctacttggcactttgacagagacaaaaaccaaacccgcggcgcctgtcgtcgctccttcgttctcgccgctgccgcactcccgacggccaccttaacaagcctctggcggaggaccaaatactctcgcgatcgccgtagcgccaccgcgtcgcccaatccgttgggagccgtcgcgcgatgcaggcggacgagcaggcggaggcgccgcgccgcgccaaggaggccggcaacgacgcctaccgcaagtccttgctcgaggaggccgtggagcactacaccctcggcgcgctccttgaccccagtgacatcgccttcctcaccaatcgcgccgccgcctacctccgcatgggcaagtacgaggagtgcgtgagggactgcgatgaggccgtgaagcgcggcagggagctcagctccggcagcgagctgatcgcgaaggcgctgtctcggaaggcgtcggcgctgctcgagctcgcgtgctgcgccgcagactacgcaccggctatcggcgccctcaagctgtcgctggccgaaaattacagcgaggagacgctcgagaagctcaacgacgcggagagcgtgaggaaggaggttgaggaacaggagcgattggatcaggaggccgccaaccaatgccgcgaggaaggcaatgaattttttaggcagaagaaatacaatgaagcagcaatacaatacacacgagctataaaaatgaacccaaaggatccaagagtaagcatattggttgttaccctgattttccttctcaagtaaaggtaattccagaacactagtaaagtagtactatcttcagtcaaatatagatgattttcaggcaagaaaacaagaagattataagccaactgtcccatgtctaaacatcaagtaaatatgactggaggtggtacccttttttttttttgaaatttctaagatttctgataaattgaattttttcattggtaaaacatcattaatgataactcttattttccatgcaccttggctgtaaaaacattctctggagttgactttttttttcctttggcactccttgttgtagtaatttgtttagtttatgactgatcttacaggcatttagcaacagagctcaatgccacatccatctgggagcctttcctcaaggtcttgaggatgccgagaaatgcattgaactagatccaacttttctgaagggctatgtgcgtaaagctaaagtccagttcctgatggaaagttatgaaaatgctttggcaacttacctagagggtctgaagtgtgacccaaataatatggaggttctggatggcttaagaagatgtgcagcatgtgttaagaggtctaatgcgggtgatgttgagatcgaggatttgaaatatgttgatattgatgaattgaaatatttctcggtacattttatatgaagtagagcaagagaactacatgatgaagagcaggccgaatggccatcgaaagtcaatcgacctctatcctgcatgccatgccatcatgaacaattggctattcagcttgactgaaggtctcgggtctatatctcctttgtttatcctgtccagtcctaccatccctatccttttctcttccattagctctggcagctttctgcacaagtgacctcggtctcaccgtcagtgcatgatgcaggtctgaatctacatcgatattaacaaaatactgccattaacatacagtgttctccatttccttcccccttttgtgcccataccatactgtgtttgtgcttgttcagacaatgctggctgcagcggctgatggtcttgatttcatgtgtcgcaatttaatttagtaaaacattaaatccttgacagcatattcagaattccacaatctagattgatacttaatcctaagcaaaattttaccttttcaagatttaaggttatgattttattgaagtcgaacccatgtgtgcaaggtcatcctctgacagatcatctagatcgccttatgcgtgcatgacttaatttggggacttagggtagtaatatgagaatttcagcggctcggcctttgacaaccttcctatgacaattgacaagagatttatttccttttaaaaaaaacaaaacactggtctttctttaaaggaaactgatgaggatcctcctggaccaatatgtgttactgagacctgagaagttagtacagttatttccacttgaaatatttcggtttagtgtgcttgattgggtatttttgtcagggtggtggtccaaacactgtacaccagcagaggaggagtggggtgatgacttctgagtgtcaatgcaacaccaaggacattgacgagtcatccgccgagaggctgtacgacgcagtgaagtacaccacggacaacatgatgctgatccaggtcccagtgttaggaacaacgaaggaattctggtgattatctgacaaagcgactaggatcagcagaaaacttgcattgatactgaggagccaccactccgtcggcaagtacctagctgctcctctgcaggtgtccaacatctggattgggagcaatgggagtgtcaagctaaggggggtcagtttcactggtcaaggcttcagcactgagcgtgtgagagatgactacaaacgcatgtccaggatcctgatggcgttaattactctctcgggtggggacagaagcaaattgcctccggactacaaagagttcctcctgctcttggaatcggacacccttacaatggaagatgaattcttgattgtaaacaatgctgcactgctgcccataaaaaaccggtaatgtctttacttattttacctttattttaccacatgctcattttgttacttgtgtccgcacttcacagcactgaggtctttctgatgctacacgatagaattgtcgattatcttgggagtacggacaaaacgaagaagaagaaaaagaagaggatactctctagtcttccctacaaggaagactggctagatactgccaaggcaaatacaaaaatcaaccagtgggttgccaatgttcagaacgagtacagagcgactccacatgatctgctgcggctcaacagaaatgtaagaagccacatgcatcgctacagcgacggtgacgacatcgaggaagttctgtattgcgaatggcccgagctgctcatggtcatgcagaagatgttgcacttggaaggcgagctcgaaggcactgacattcagaacaagtttggctaggcgtcctacttaagctactgttcttcgatcgagttcaggggccgaaagtttatgctggtggagtgatggtcgatgtaagtttgtcgctctcatcatgaaggtaaagctggatcagctttataaaatgtatgctaaaatgtaaagtaaactttaaaccattctatctgagaaggtcttttcttaatacaataccgggagtatgtctcgtcttgcttgtaaatcgtgcctgggtatctggctgtaggtttgtcttgcttgatcttgtgaggatgctgctcgcgttccttggagatcaagcatgcaaacgtctgtaaacaacatccttctcctcttactgaagataaagctggaccagctttataaaagtattatgaaaaatgttgcattaaaactctaaac

SEQ ID NO: 51738 - DNA, 2504 bp, Zea Mays
tctagaaggcggggctctccttctgcagaaaaagagagagaattaaaaaatattcctctacaaataggtaagtgtaactaaggaaagtaatcctctgatcctatcgctaccaccttcaacccggtgtccttctccttcactcctacttggcactttgacagagacaaaaaccaaacccgcggcgcctgtcgtcgctccttcgttctcgccgctgccgcactcccgacggccaccttaacaagcctctggcggaggaccaaatactctcgcgatcgccgtagcgccaccgcgtcgcccaatccgttgggagccgtcgcgcgatgcaggcggacgagcaggcggaggcgccgcgccgcgccaaggaggccggcaacgacgcctaccgcaagtccttgctcgaggaggccgtggagcactacaccctcggcgcgctccttgaccccagtgacatcgccttcctcaccaatcgcgccgccgcctacctccgcatgggcaagtacgaggagtgcgtgagggactgcgatgaggccgtgaagcgcggcagggagctcagctccggcagcgagctgatcgcgaaggcgctgtctcggaaggcgtcggcgctgctcgagctcgcgtgctgcgccgcagactacgcaccggctatcggcgccctcaagctgtcgctggccgaaaattacagcgaggagacgctcgagaagctcaacgacgcggagagcgtgaggaaggaggttgaggaacaggagcgattggatcaggaggccgccaaccaatgccgcgaggaaggcaatgaattttttaggcagaagaaatacaatgaagcagcaatacaatacacacgagctataaaaatgaacccaaaggatccaagagcatttagcaacagagctcaatgccacatccatctgggagcctttcctcaaggtcttgaggatgccgagaaatgcattgaactagatccaacttttctgaagggctatgtgcgtaaagctaaagtccagttcctgatggaaagttatgaaaatgctttggcaacttacctagagggtctgaagtgtgacccaaataatatggaggttctggatggcttaagaagatgtgcagcatgtgttaagaggtctaatgcgggtgatgttgagatcgaggatttgaaatatgttgatattgatgaattgaaatatttctcgggtggtggtccaaacactgtacaccagcagaggaggagtggggtgatgacttctgagtgtcaatgcaacaccaaggacattgacgagtcatccgccgagaggctgtacgacgcagtgaagtacaccacggacaacatgatgctgatccaggtcccagtgttaggaacaacgaaggaattctggtgattatctgacaaagcgactaggatcagcagaaaacttgcattgatactgaggagccaccactccgtcggcaagtacctagctgctcctctgcaggtgtccaacatctggattgggagcaatgggagtgtcaagctaaggggggtcagtttcactggtcaaggcttcagcactgagcgtgtgagagatgactacaaacgcatgtccaggatcctgatggcgttaattactctctcgggtggggacagaagcaaattgcctccggactacaaagagttcctcctgctcttggaatcggacacccttacaatggaagatgaattcttgattgtaaacaatgctgcactgctgcccataaaaaaccgcactgaggtctttctgatgctacacgatagaattgtcgattatcttgggagtacggacaaaacgaagaagaagaaaaagaagaggatactctctagtcttccctacaaggaagactggctagatactgccaaggcaaatacaaaaatcaaccagtgggttgccaatgttcagaacgagtacagagcgactccacatgatctgctgcggctcaacagaaatgtaagaagccacatgcatcgctacagcgacggtgacgacatcgaggaagttctgtattgcgaatggcccgagctgctcatggtcatgcagaagatgttgcacttggaaggcgagctcgaaggcactgacattcagaacaagtttggctaggcgtcctacttaagctactgttcttcgatcgagttcaggggccgaaagtttatgctggtggagtgatggtcgatgtaagtttgtcgctctcatcatgaaggtaaagctggatcagctttataaaatgtatgctaaaatgtaaagtaaactttaaaccattctatctgagaaggtcttttcttaatacaataccgggagtatgtctcgtcttgcttgtaaatcgtgcctgggtatctggctgtaggtttgtcttgcttgatcttgtgaggatgctgctcgcgttccttggagatcaagcatgcaaacgtctgtaaacaacatccttctcctcttactgaagataaagctggaccagctttataaaagtattatgaaaaatgttgcattaaaactctaaac

SEQ ID NO: 51739 - DNA, 2745 bp, Zea Mays
tctagaaggcggggctctccttctgcagaaaaagagagagaattaaaaaatattcctctacaaataggtaagtgtaactaaggaaagtaatcctctgatcctatcgctaccaccttcaacccggtgtccttctccttcactcctacttggcactttgacagagacaaaaaccaaacccgcggcgcctgtcgtcgctccttcgttctcgccgctgccgcactcccgacggccaccttaacaagcctctggcggaggaccaaatactctcgcgatcgccgtagcgccaccgcgtcgcccaatccgttgggagccgtcgcgcgatgcaggcggacgagcaggcggaggcgccgcgccgcgccaaggaggccggcaacgacgcctaccgcaagtccttgctcgaggaggccgtggagcactacaccctcggcgcgctccttgaccccagtgacatcgccttcctcaccaatcgcgccgccgcctacctccgcatgggcaagtacgaggagtgcgtgagggactgcgatgaggccgtgaagcgcggcagggagctcagctccggcagcgagctgatcgcgaaggcgctgtctcggaaggcgtcggcgctgctcgagctcgcgtgctgcgccgcagactacgcaccggctatcggcgccctcaagctgtcgctggccgaaaattacagcgaggagacgctcgagaagctcaacgacgcggagagcgtgaggaaggaggttgaggaacaggagcgattggatcaggaggccgccaaccaatgccgcgaggaaggcaatgaattttttaggcagaagaaatacaatgaagcagcaatacaatacacacgagctataaaaatgaacccaaaggatccaagagtaagcatattggttgttaccctgattttccttctcaagtaaaggtaattccagaacactagtaaagtagtactatcttcagtcaaatatagatgattttcaggcaagaaaacaagaagattataagccaactgtcccatgtctaaacatcaagtaaatatgactggaggtggtacccttttttttttttgaaatttctaagatttctgataaattgaattttttcattggtaaaacatcattaatgataactcttattttccatgcaccttggctgtaaaaacattctctggagttgactttttttttcctttggcactccttgttgtagtaatttgtttagtttatgactgatcttacaggcatttagcaacagagctcaatgccacatccatctgggagcctttcctcaaggtcttgaggatgccgagaaatgcattgaactagatccaacttttctgaagggctatgtgcgtaaagctaaagtccagttcctgatggaaagttatgaaaatgctttggcaacttacctagagggtctgaagtgtgacccaaataatatggaggttctggatggcttaagaagggtggtggtccaaacactgtacaccagcagaggaggagtggggtgatgacttctgagtgtcaatgcaacaccaaggacattgacgagtcatccgccgagaggctgtacgacgcagtgaagtacaccacggacaacatgatgctgatccaggtcccagtgttaggaacaacgaaggaattctggtgattatctgacaaagcgactaggatcagcagaaaacttgcattgatactgaggagccaccactccgtcggcaagtacctagctgctcctctgcaggtgtccaacatctggattgggagcaatgggagtgtcaagctaaggggggtcagtttcactggtcaaggcttcagcactgagcgtgtgagagatgactacaaacgcatgtccaggatcctgatggcgttaattactctctcgggtggggacagaagcaaattgcctccggactacaaagagttcctcctgctcttggaatcggacacccttacaatggaagatgaattcttgattgtaaacaatgctgcactgctgcccataaaaaaccgaattgtcgattatcttgggagtacggacaaaacgaagaagaagaaaaagaagaggatactctctagtcttccctacaaggaagactggctagatactgccaaggcaaatacaaaaatcaaccagtgggttgccaatgttcagaacgagtacagagcgactccacatgatctgctgcggctcaacagaaatgtaagaagccacatgcatcgctacagcgacggtgacgacatcgaggaagttctgtattgcgaatggcccgagctgctcatggtcatgcagaagatgttgcacttggaaggcgagctcgaaggcactgacattcagaacaagtttggctaggcgtcctacttaagctactgttcttcgatcgagttcaggggccgaaagtttatgctggtggagtgatggtcgatgtaagtttgtcgctctcatcatgaaggtaaagctggatcagctttataaaatgtatgctaaaatgtaaagtaaactttaaaccattctatctgagaaggtcttttcttaatacaataccgggagtatgtctcgtcttgcttgtaaatcgtgcctgggtatctggctgtaggtttgtcttgcttgatcttgtgaggatgctgctcgcgttccttggagatcaagcatgcaaacgtctgtaaacaacatccttctcctcttactgaagataaagctggaccagctttataaaagtattatgaaaaatgttgcattaaaactctaaac

SEQ ID NO: 51740 - DNA, 3389 bp, Zea Mays
tctagaaggcggggctctccttctgcagaaaaagagagagaattaaaaaatattcctctacaaataggtaagtgtaactaaggaaagtaatcctctgatcctatcgctaccaccttcaacccggtgtccttctccttcactcctacttggcactttgacagagacaaaaaccaaacccgcggcgcctgtcgtcgctccttcgttctcgccgctgccgcactcccgacggccaccttaacaagcctctggcggaggaccaaatactctcgcgatcgccgtagcgccaccgcgtcgcccaatccgttgggagccgtcgcgcgatgcaggcggacgagcaggcggaggcgccgcgccgcgccaaggaggccggcaacgacgcctaccgcaagtccttgctcgaggaggccgtggagcactacaccctcggcgcgctccttgaccccagtgacatcgccttcctcaccaatcgcgccgccgcctacctccgcatgggcaagtacgaggagtgcgtgagggactgcgatgaggccgtgaagcgcggcagggagctcagctccggcagcgagctgatcgcgaaggcgctgtctcggaaggcgtcggcgctgctcgagctcgcgtgctgcgccgcagactacgcaccggctatcggcgccctcaagctgtcgctggccgaaaattacagcgaggagacgctcgagaagctcaacgacgcggagagcgtgaggaaggaggttgaggaacaggagcgattggatcaggaggccgccaaccaatgccgcgaggaaggtttggatgttgctcgattacagcaccattgaaatgggaaattgggcaatgtttctttgaggatgttgggaaggggagaaccttacccaattttaaattaaaattaaatgcaaggtgtacatatgcaaagccaagcggcaaagaatggaaaacacaaggaccacaagagaaagacaaaagaaaaacaagaagaaggaaaaggaattagaaattaaaggaaaagaaaataaaaaatacttgttttctcaatctgttgatagctttcgccttgttttttttttgttgttctgcattcccttaccaatcacaaaagaaacacacattttggtcgacaatgaaatactctcagaaattcccatttagttcttttgtgcgtatatggtattgggatttccatgcgaaagaagacagagcacaaaagaaagggggcgagtagacacttctcctagtaatctactaatctgtgttttttaagcatcatgtatccaattcctaagtactagttgcatgccatacaatgatacaattgcccaaatgctgcaggcaatgaattttttaggcagaagaaatacaatgaagcagcaatacaatacacacgagctataaaaatgaacccaaaggatccaagagtaagcatattggttgttaccctgattttccttctcaagtaaaggtaattccagaacactagtaaagtagtactatcttcagtcaaatatagatgattttcaggcaagaaaacaagaagattataagccaactgtcccatgtctaaacatcaagtaaatatgactggaggtggtacccttttttttttttgaaatttctaagatttctgataaattgaattttttcattggtaaaacatcattaatgataactcttattttccatgcaccttggctgtaaaaacattctctggagttgactttttttttcctttggcactccttgttgtagtaatttgtttagtttatgactgatcttacaggcatttagcaacagagctcaatgccacatccatctgggagcctttcctcaaggtcttgaggatgccgagaaatgcattgaactagatccaacttttctgaagggctatgtgcgtaaagctaaagtccagttcctgatggaaagttatgaaaatgctttggcaacttacctagagggtctgaagtgtgacccaaataatatggaggttctggatggcttaagaagggtggtggtccaaacactgtacaccagcagaggaggagtggggtgatgacttctgagtgtcaatgcaacaccaaggacattgacgagtcatccgccgagaggctgtacgacgcagtgaagtacaccacggacaacatgatgctgatccaggtcccagtgttaggaacaacgaaggaattctggtgattatctgacaaagcgactaggatcagcagaaaacttgcattgatactgaggagccaccactccgtcggcaagtacctagctgctcctctgcaggtgtccaacatctggattgggagcaatgggagtgtcaagctaaggggggtcagtttcactggtcaaggcttcagcactgagcgtgtgagagatgactacaaacgcatgtccaggatcctgatggcgttaattactctctcgggtggggacagaagcaaattgcctccggactacaaagagttcctcctgctcttggaatcggacacccttacaatggaagatgaattcttgattgtaaacaatgctgcactgctgcccataaaaaaccggtaatgtctttacttattttacctttattttaccacatgctcattttgttacttgtgtccgcacttcacagcactgaggtctttctgatgctacacgatagaattgtcgattatcttgggagtacggacaaaacgaagaagaagaaaaagaagaggatactctctagtcttccctacaaggaagactggctagatactgccaaggcaaatacaaaaatcaaccagtgggttgccaatgttcagaacgagtacagagcgactccacatgatctgctgcggctcaacagaaatgtaagaagccacatgcatcgctacagcgacggtgacgacatcgaggaagttctgtattgcgaatggcccgagctgctcatggtcatgcagaagatgttgcacttggaaggcgagctcgaaggcactgacattcagaacaagtttggctaggcgtcctacttaagctactgttcttcgatcgagttcaggggccgaaagtttatgctggtggagtgatggtcgatgtaagtttgtcgctctcatcatgaaggtaaagctggatcagctttataaaatgtatgctaaaatgtaaagtaaactttaaaccattctatctgagaaggtcttttcttaatacaataccgggagtatgtctcgtcttgcttgtaaatcgtgcctgggtatctggctgtaggtttgtcttgcttgatcttgtgaggatgctgctcgcgttccttggagatcaagcatgcaaacgtctgtaaacaacatccttctcctcttactgaagataaagctggaccagctttataaaagtattatgaaaaatgttgcattaaaactctaaac

SEQ ID NO: 51741 - DNA, 3027 bp, Zea Mays
tctagaaggcggggctctccttctgcagaaaaagagagagaattaaaaaatattcctctacaaataggtaagtgtaactaaggaaagtaatcctctgatcctatcgctaccaccttcaacccggtgtccttctccttcactcctacttggcactttgacagagacaaaaaccaaacccgcggcgcctgtcgtcgctccttcgttctcgccgctgccgcactcccgacggccaccttaacaagcctctggcggaggaccaaatactctcgcgatcgccgtagcgccaccgcgtcgcccaatccgttgggagccgtcgcgcgatgcaggcggacgagcaggcggaggcgccgcgccgcgccaaggaggccggcaacgacgcctaccgcaagtccttgctcgaggaggccgtggagcactacaccctcggcgcgctccttgaccccagtgacatcgccttcctcaccaatcgcgccgccgcctacctccgcatgggcaagtacgaggagtgcgtgagggactgcgatgaggccgtgaagcgcggcagggagctcagctccggcagcgagctgatcgcgaaggcgctgtctcggaaggcgtcggcgctgctcgagctcgcgtgctgcgccgcagactacgcaccggctatcggcgccctcaagctgtcgctggccgaaaattacagcgaggagacgctcgagaagctcaacgacgcggagagcgtgaggaaggaggttgaggaacaggagcgattggatcaggaggccgccaaccaatgccgcgaggaaggtttggatgttgctcgattacagcaccattgaaatgggaaattgggcaatgtttctttgaggatgttgggaaggggagaaccttacccaattttaaattaaaattaaatgcaaggtgtacatatgcaaagccaagcggcaaagaatggaaaacacaaggaccacaagagaaagacaaaagaaaaacaagaagaaggaaaaggaattagaaattaaaggaaaagaaaataaaaaatacttgttttctcaatctgttgatagctttcgccttgttttttttttgttgttctgcattcccttaccaatcacaaaagaaacacacattttggtcgacaatgaaatactctcagaaattcccatttagttcttttgtgcgtatatggtattgggatttccatgcgaaagaagacagagcacaaaagaaagggggcgagtagacacttctcctagtaatctactaatctgtgttttttaagcatcatgtatccaattcctaagtactagttgcatgccatacaatgatacaattgcccaaatgctgcaggcaatgaattttttaggcagaagaaatacaatgaagcagcaatacaatacacacgagctataaaaatgaacccaaaggatccaagagcatttagcaacagagctcaatgccacatccatctgggagcctttcctcaaggtcttgaggatgccgagaaatgcattgaactagatccaacttttctgaagggctatgtgcgtaaagctaaagtccagttcctgatggaaagttatgaaaatgctttggcaacttacctagagggtctgaagtgtgacccaaataatatggaggttctggatggcttaagaagggtggtggtccaaacactgtacaccagcagaggaggagtggggtgatgacttctgagtgtcaatgcaacaccaaggacattgacgagtcatccgccgagaggctgtacgacgcagtgaagtacaccacggacaacatgatgctgatccaggtcccagtgttaggaacaacgaaggaattctggtgattatctgacaaagcgactaggatcagcagaaaacttgcattgatactgaggagccaccactccgtcggcaagtacctagctgctcctctgcaggtgtccaacatctggattgggagcaatgggagtgtcaagctaaggggggtcagtttcactggtcaaggcttcagcactgagcgtgtgagagatgactacaaacgcatgtccaggatcctgatggcgttaattactctctcgggtggggacagaagcaaattgcctccggactacaaagagttcctcctgctcttggaatcggacacccttacaatggaagatgaattcttgattgtaaacaatgctgcactgctgcccataaaaaaccggtaatgtctttacttattttacctttattttaccacatgctcattttgttacttgtgtccgcacttcacagcactgaggtctttctgatgctacacgatagaattgtcgattatcttgggagtacggacaaaacgaagaagaagaaaaagaagaggatactctctagtcttccctacaaggaagactggctagatactgccaaggcaaatacaaaaatcaaccagtgggttgccaatgttcagaacgagtacagagcgactccacatgatctgctgcggctcaacagaaatgtaagaagccacatgcatcgctacagcgacggtgacgacatcgaggaagttctgtattgcgaatggcccgagctgctcatggtcatgcagaagatgttgcacttggaaggcgagctcgaaggcactgacattcagaacaagtttggctaggcgtcctacttaagctactgttcttcgatcgagttcaggggccgaaagtttatgctggtggagtgatggtcgatgtaagtttgtcgctctcatcatgaaggtaaagctggatcagctttataaaatgtatgctaaaatgtaaagtaaactttaaaccattctatctgagaaggtcttttcttaatacaataccgggagtatgtctcgtcttgcttgtaaatcgtgcctgggtatctggctgtaggtttgtcttgcttgatcttgtgaggatgctgctcgcgttccttggagatcaagcatgcaaacgtctgtaaacaacatccttctcctcttactgaagataaagctggaccagctttataaaagtattatgaaaaatgttgcattaaaactctaaac

SEQ ID NO: 51742 - DNA, 3454 bp, Zea Mays
tctagaaggcggggctctccttctgcagaaaaagagagagaattaaaaaatattcctctacaaataggtaagtgtaactaaggaaagtaatcctctgatcctatcgctaccaccttcaacccggtgtccttctccttcactcctacttggcactttgacagagacaaaaaccaaacccgcggcgcctgtcgtcgctccttcgttctcgccgctgccgcactcccgacggccaccttaacaagcctctggcggaggaccaaatactctcgcgatcgccgtagcgccaccgcgtcgcccaatccgttgggagccgtcgcgcgatgcaggcggacgagcaggcggaggcgccgcgccgcgccaaggaggccggcaacgacgcctaccgcaagtccttgctcgaggaggccgtggagcactacaccctcggcgcgctccttgaccccagtgacatcgccttcctcaccaatcgcgccgccgcctacctccgcatgggcaagtacgaggagtgcgtgagggactgcgatgaggccgtgaagcgcggcagggagctcagctccggcagcgagctgatcgcgaaggcgctgtctcggaaggcgtcggcgctgctcgagctcgcgtgctgcgccgcagactacgcaccggctatcggcgccctcaagctgtcgctggccgaaaattacagcgaggagacgctcgagaagctcaacgacgcggagagcgtgaggaaggaggttgaggaacaggagcgattggatcaggaggccgccaaccaatgccgcgaggaaggtttggatgttgctcgattacagcaccattgaaatgggaaattgggcaatgtttctttgaggatgttgggaaggggagaaccttacccaattttaaattaaaattaaatgcaaggtgtacatatgcaaagccaagcggcaaagaatggaaaacacaaggaccacaagagaaagacaaaagaaaaacaagaagaaggaaaaggaattagaaattaaaggaaaagaaaataaaaaatacttgttttctcaatctgttgatagctttcgccttgttttttttttgttgttctgcattcccttaccaatcacaaaagaaacacacattttggtcgacaatgaaatactctcagaaattcccatttagttcttttgtgcgtatatggtattgggatttccatgcgaaagaagacagagcacaaaagaaagggggcgagtagacacttctcctagtaatctactaatctgtgttttttaagcatcatgtatccaattcctaagtactagttgcatgccatacaatgatacaattgcccaaatgctgcaggcaatgaattttttaggcagaagaaatacaatgaagcagcaatacaatacacacgagctataaaaatgaacccaaaggatccaagagtaagcatattggttgttaccctgattttccttctcaagtaaaggtaattccagaacactagtaaagtagtactatcttcagtcaaatatagatgattttcaggcaagaaaacaagaagattataagccaactgtcccatgtctaaacatcaagtaaatatgactggaggtggtacccttttttttttttgaaatttctaagatttctgataaattgaattttttcattggtaaaacatcattaatgataactcttattttccatgcaccttggctgtaaaaacattctctggagttgactttttttttcctttggcactccttgttgtagtaatttgtttagtttatgactgatcttacaggcatttagcaacagagctcaatgccacatccatctgggagcctttcctcaaggtcttgaggatgccgagaaatgcattgaactagatccaacttttctgaagggctatgtgcgtaaagctaaagtccagttcctgatggaaagttatgaaaatgctttggcaacttacctagagggtctgaagtgtgacccaaataatatggaggttctggatggcttaagaaggtagctttccagttctcttctagtcttctttagtcatggtgtgatttaaattgactttgtgtttgattgaattagatgtgcagcatgtgttaagaggtctaatgcgggtgatgttgagatcgaggatttgaaatatgttgatattgatgaattgaaatatttctcgggtggtggtccaaacactgtacaccagcagaggaggagtggggtgatgacttctgagtgtcaatgcaacaccaaggacattgacgagtcatccgccgagaggctgtacgacgcagtgaagtacaccacggacaacatgatgctgatccaggtcccagtgttaggaacaacgaaggaattctggtgattatctgacaaagcgactaggatcagcagaaaacttgcattgatactgaggagccaccactccgtcggcaagtacctagctgctcctctgcaggtgtccaacatctggattgggagcaatgggagtgtcaagctaaggggggtcagtttcactggtcaaggcttcagcactgagcgtgtgagagatgactacaaacgcatgtccaggatcctgatggcgttaattactctctcgggtggggacagaagcaaattgcctccggactacaaagagttcctcctgctcttggaatcggacacccttacaatggaagatgaattcttgattgtaaacaatgctgcactgctgcccataaaaaaccgaattgtcgattatcttgggagtacggacaaaacgaagaagaagaaaaagaagaggatactctctagtcttccctacaaggaagactggctagatactgccaaggcaaatacaaaaatcaaccagtgggttgccaatgttcagaacgagtacagagcgactccacatgatctgctgcggctcaacagaaatgtaagaagccacatgcatcgctacagcgacggtgacgacatcgaggaagttctgtattgcgaatggcccgagctgctcatggtcatgcagaagatgttgcacttggaaggcgagctcgaaggcactgacattcagaacaagtttggctaggcgtcctacttaagctactgttcttcgatcgagttcaggggccgaaagtttatgctggtggagtgatggtcgatgtaagtttgtcgctctcatcatgaaggtaaagctggatcagctttataaaatgtatgctaaaatgtaaagtaaactttaaaccattctatctgagaaggtcttttcttaatacaataccgggagtatgtctcgtcttgcttgtaaatcgtgcctgggtatctggctgtaggtttgtcttgcttgatcttgtgaggatgctgctcgcgttccttggagatcaagcatgcaaacgtctgtaaacaacatccttctcctcttactgaagataaagctggaccagctttataaaagtattatgaaaaatgttgcattaaaactctaaac

SEQ ID NO: 51743 - DNA, 2070 bp, Zea Mays
ggcagatctgggcctagtctgcatataccgagtagaatagagaggggagagggctagggttcagagcacgacgagccataacttcaacaagcagcgggcgggtctcgggcgtgcgaccttgcggctgtgctcaggcggggcgttgcgtgaagcgctagggagtcgggtgtgcgacgggcggcgctcgttcctcaggcatgtgcggacgacgctcagacgcatggctgtgtcgaccacttgcagacgacgccgacacagatccaggtccaggtccaggttaagtattgttttttggtgtgtggacgtgattcttctagtgagatatgttctgaagcggcaaggtaaaccctcttagtctacttgtttaacttttaaaatatacccatcggtttgaatgatgcaaaactacaataatcttcatgtacttgattgactaatgagttggatatgattcgtattctatttcttaaaaaagtaaggcagaagatagctagattcatgatttggcaaatacaacctcaaattaacttgcctattcatcgattatgttcaggaaataatgtatcaattaattgaaggaagtaatagtagtggctcatctagaactcattcgattcctagttctaactatgaccactaacttttgccttgctagctggctatgtacaagcctgcaacacattcttatgataccatcatgtcattaaatgtcaagggctgagtatccccggacagcagggcctcgactacgcagttcgtagtcgtgacccatcttctccggcgagattttgcccctcagccacaggttttgttggtgagtggagaggagagattagagagaataaactttgcttaatccttccagccggctggttacacatatatatatggccgatcggccctaataaactagagataattactccttgatcctagggatagctatctaatcattcctaacaaccagcccctcccccctaaatcttctccttaattctaggaacttgaaacaaaaagtaaccatgttctatctgtaacaaaccagtgcgtgcgcgcctaaccgcccacgcgtatcgcacgctcttttgcccggcgcacgtcgttggcgcgcctgcgcctggtgtaggtacgtccgcacatgacatatactagagtctaaagtccattgaaattttaaattatatactttcatgtatggatggtgtttggagtgcaaacgtgcctttttatgttccacaaaatcattttactattgatccattccatcttttatactctttaatctattatggcattgatttccttcagttgcgtgtttccattttctgccactagttctatagaagttcactgatgtgtttaaagttataatggttacctagactaggctaagtagagtatacgtattgtagttctactgccttgaacaagaaaattcttgtctttgatgatgtagtttcttggttttttttcatctacaacaaatttatgatttattctcatttccttttgcaagttcatggagcatggttaccaccttggtttgcggcacaatatgctcattacgcggaggttgtcgcaggtcactagaataaacaagggaaacctgctgtgcagaatgttttgcataagagaaaatggttgccctcaagaaaaatgtaggaccttatgtataaaaggtatcaacaagatgttaatgggataaacctcatattgagaccgctaagatgaaatggattcatgttaaggagaaattggttgtcctcaagaaaaatgcagaaccttatgtacaaatggattgtcttcaaaatgttgttcttgtagctacaacaaagagaaacaacaatggtggtgatgctatacgtgtagaagtagcaatgttggtcttgtagctccaagattttgttattttgttgttgatgaatgatatctatgataatatattgctaagtgtatgtgatgatcattggttgttgtttaattataatggtttgtgcttattgtgctacattgacattggtaataattaaaaaattaaaatggccttggttgggccaaatgttttgtgac

SEQ ID NO: 51744 - DNA, 1995 bp, Zea Mays
ggcagatctgggcctagtctgcatataccgagtagaatagagaggggagagggctagggttcagagcacgacgagccataacttcaacaagcagcgggcgggtctcgggcggcgcgcgggcgcttggtggacgacgctcaaacgcatggctgtgtcgaccacttgcagacgacgccgacacagatccaggtccaggtccaggttaagtattgttttttggtgtgtggacgtgattcttctagtgagatatgttctgaagcggcaaggtaaaccctcttagtctacttgtttaacttttaaaatatacccatcggtttgaatgatgcaaaactacaataatcttcatgtacttgattgactaatgagttggatatgattcgtattctatttcttaaaaaagtaaggcagaagatagctagattcatgatttggcaaatacaacctcaaattaacttgcctattcatcgattatgttcaggaaataatgtatcaattaattgaaggaagtaatagtagtggctcatctagaactcattcgattcctagttctaactatgaccactaacttttgccttgctagctggctatgtacaagcctgcaacacattcttatgataccatcatgtcattaaatgtcaagggctgagtatccccggacagcagggcctcgactacgcagttcgtagtcgtgacccatcttctccggcgagattttgcccctcagccacaggttttgttggtgagtggagaggagagattagagagaataaactttgcttaatccttccagccggctggttacacatatatatatggccgatcggccctaataaactagagataattactccttgatcctagggatagctatctaatcattcctaacaaccagcccctcccccctaaatcttctccttaattctaggaacttgaaacaaaaagtaaccatgttctatctgtaacaaaccagtgcgtgcgcgcctaaccgcccacgcgtatcgcacgctcttttgcccggcgcacgtcgttggcgcgcctgcgcctggtgtaggtacgtccgcacatgacatatactagagtctaaagtccattgaaattttaaattatatactttcatgtatggatggtgtttggagtgcaaacgtgcctttttatgttccacaaaatcattttactattgatccattccatcttttatactctttaatctattatggcattgatttccttcagttgcgtgtttccattttctgccactagttctatagaagttcactgatgtgtttaaagttataatggttacctagactaggctaagtagagtatacgtattgtagttctactgccttgaacaagaaaattcttgtctttgatgatgtagtttcttggttttttttcatctacaacaaatttatgatttattctcatttccttttgcaagttcatggagcatggttaccaccttggtttgcggcacaatatgctcattacgcggaggttgtcgcaggtcactagaataaacaagggaaacctgctgtgcagaatgttttgcataagagaaaatggttgccctcaagaaaaatgtaggaccttatgtataaaaggtatcaacaagatgttaatgggataaacctcatattgagaccgctaagatgaaatggattcatgttaaggagaaattggttgtcctcaagaaaaatgcagaaccttatgtacaaatggattgtcttcaaaatgttgttcttgtagctacaacaaagagaaacaacaatggtggtgatgctatacgtgtagaagtagcaatgttggtcttgtagctccaagattttgttattttgttgttgatgaatgatatctatgataatatattgctaagtgtatgtgatgatcattggttgttgtttaattataatggtttgtgcttattgtgctacattgacattggtaataattaaaaaattaaaatggccttggttgggccaaatgttttgtgac

SEQ ID NO: 51745 - DNA, 2128 bp, Zea Mays
atataccgagtagaatagagaggggagagggctagggttcagagcacgacgagccataacttcaacaagcagcgggcgggtctcgggcggcgcgcgggcgcttggtggacgacgctcaagcggaggcgggcagcgcttgggagtcaggcgtgcgaccttgcggctgtgctcaggcggggcgttgcgtgaagcgctagggagtcgggtgtgcgacgggcggcgctcgttcctcaggcatgtgcggacgacgctcagacgcatggctgtgtcgaccacttgcagacgacgccgacacagatccaggtccaggtccaggttaagtattgttttttggtgtgtggacgtgattcttctagtgagatatgttctgaagcggcaaggtaaaccctcttagtctacttgtttaacttttaaaatatacccatcggtttgaatgatgcaaaactacaataatcttcatgtacttgattgactaatgagttggatatgattcgtattctatttcttaaaaaagtaaggcagaagatagctagattcatgatttggcaaatacaacctcaaattaacttgcctattcatcgattatgttcaggaaataatgtatcaattaattgaaggaagtaatagtagtggctcatctagaactcattcgattcctagttctaactatgaccactaacttttgccttgctagctggctatgtacaagcctgcaacacattcttatgataccatcatgtcattaaatgtcaagggctgagtatccccggacagcagggcctcgactacgcagttcgtagtcgtgacccatcttctccggcgagattttgcccctcagccacaggttttgttggtgagtggagaggagagattagagagaataaactttgcttaatccttccagccggctggttacacatatatatatggccgatcggccctaataaactagagataattactccttgatcctagggatagctatctaatcattcctaacaaccagcccctcccccctaaatcttctccttaattctaggaacttgaaacaaaaagtaaccatgttctatctgtaacaaaccagtgcgtgcgcgcctaaccgcccacgcgtatcgcacgctcttttgcccggcgcacgtcgttggcgcgcctgcgcctggtgtaggtacgtccgcacatgacatatactagagtctaaagtccattgaaattttaaattatatactttcatgtatggatggtgtttggagtgcaaacgtgcctttttatgttccacaaaatcattttactattgatccattccatcttttatactctttaatctattatggcattgatttccttcagttgcgtgtttccattttctgccactagttctatagaagttcactgatgtgtttaaagttataatggttacctagactaggctaagtagagtatacgtattgtagttctactgccttgaacaagaaaattcttgtctttgatgatgtagtttcttggttttttttcatctacaacaaatttatgatttattctcatttccttttgcaagttcatggagcatggttaccaccttggtttgcggcacaatatgctcattacgcggaggttgtcgcaggtcactagaataaacaagggaaacctgctgtgcagaatgttttgcataagaaatgtattcctgttacagagaaaatggttgccctcaagaaaaatgtaggaccttatgtataaaaggtatcaacaagatgttaatgggataaacctcatattgagaccgctaagatgaaatggattcatgttaaggagaaattggttgtcctcaagaaaaatgcagaaccttatgtacaaatggattgtcttcaaaatgttgttcttgtagctacaacaaagagaaacaacaatggtggtgatgctatacgtgtagaagtagcaatgttggtcttgtagctccaagattttgttattttgttgttgatgaatgatatctatgataatatattgctaagtgtatgtgatgatcattggttgttgtttaattataatggtttgtgcttattgtgctacattgacattggtaataattaaaaaattaaaatggccttggttgggccaaatgttttgtgac

SEQ ID NO: 51746 - DNA, 1719 bp, Zea Mays
atataccgagtagaatagagaggggagagggctagggttcagagcacgacgagccataacttcaacaagcagcgggcgggtctcgggcggcgcgcgggcgcttggtggacgacgctcaagcggaggcgggcagcgcttgggagtcaggcgtgcgaccttgcggctgtgctcaggcggggcgttgcgtgaagcgctagggagtcgggtgtgcgacgggcggcgctcgttcctcaggcatgtgcggacgacgctcagacgcatggctgtgtcgaccacttgcagacgacgccgacacagatccaggtccaggtccaggttaagtattgttttttggtgtgtggacgtgattcttctagtgagatatgttctgaagcggcaaggtaaaccctcttagtctacttgtttaacttttaaaatatacccatcggtttgaatgatgcaaaactacaataatcttcatgtacttgattgactaatgagttggatatgattcgtattctatttcttaaaaaagtaaggcagaagatagctagattcatgatttggcaaatacaacctcaaattaacttgcctattcatcgattatgttcaggaaataatgtatcaattaattgaaggaagtaatagtagtggctcatctagaactcattcgattcctagttctaactatgaccactaacttttgccttgctagctggctatgtacaagcctgcaacacattcttatgataccatcatgtcattaaatgtcaagggctgagtatccccggacagcagggcctcgactacgcagttcgtagtcgtgacccatcttctccggcgagattttgcccctcagccacaggttttgttggtgagtggagaggagagattagagagaataaactttgcttaatccttccagccggctggttacacatatatatatggccgatcggccctaataaactagagataattactccttgatcctagggatagctatctaatcattcctaacaaccagcccctcccccctaaatcttctccttaattctaggaacttgaaacaaaaagtaaccatgttctatctgtaacaaaccagtgcgtgcgcgcctaaccgcccacgcgtatcgcacgctcttttgcccggcgcacgtcgttggcgcgcctgcgcctggtgtagttcatggagcatggttaccaccttggtttgcggcacaatatgctcattacgcggaggttgtcgcaggtcactagaataaacaagggaaacctgctgtgcagaatgttttgcataagagaaaatggttgccctcaagaaaaatgtaggaccttatgtataaaaggtatcaacaagatgttaatgggataaacctcatattgagaccgctaagatgaaatggattcatgttaaggagaaattggttgtcctcaagaaaaatgcagaaccttatgtacaaatggattgtcttcaaaatgttgttcttgtagctacaacaaagagaaacaacaatggtggtgatgctatacgtgtagaagtagcaatgttggtcttgtagctccaagattttgttattttgttgttgatgaatgatatctatgataatatattgctaagtgtatgtgatgatcattggttgttgtttaattataatggtttgtgcttattgtgctacattgacattggtaataattaaaaaattaaaatggccttggttgggccaaatgttttgtgac

SEQ ID NO: 51747 - DNA, 2263 bp, Zea Mays
atataccgagtagaatagagaggggagagggctagggttcagagcacgacgagccataacttcaacaagcagcgggcgggtctcgggcggcgcgcgggcgcttggtggacgacgctcaagcggaggcgggcagcgcttgggagtcaggcgtgcgaccttgcggctgtgctcaggcggggcgttgcgtgaagcgctagggagtcgggtgtgcgacgggcggcgctcgttcctcaggcatgtgcggacgacgctcagacgcatggctgtgtcgaccacttgcagacgacgccgacacagatccaggtccaggtccaggttaagtattgttttttggtgtgtggacgtgattcttctagtgagatatgttctgaagcggcaaggtaaaccctcttagtctacttgtttaacttttaaaatatacccatcggtttgaatgatgcaaaactacaataatcttcatgtacttgattgactaatgagttggatatgattcgtattctatttcttaaaaaagtaaggcagaagatagctagattcatgatttggcaaatacaacctcaaattaacttgcctattcatcgattatgttcaggaaataatgtatcaattaattgaaggaagtaatagtagtggctcatctagaactcattcgattcctagttctaactatgaccactaacttttgccttgctagctggctatgtacaagcctgcaacacattcttatgataccatcatgtcattaaatgtcaagggctgagtatccccggacagcagggcctcgactacgcagttcgtagtcgtgacccatcttctccggcgagattttgcccctcagccacaggttttgttggtgagtggagaggagagattagagagaataaactttgcttaatccttccagccggctggttacacatatatatatggccgatcggccctaataaactagagataattactccttgatcctagggatagctatctaatcattcctaacaaccagcccctcccccctaaatcttctccttaattctaggaacttgaaacaaaaagtaaccatgttctatctgtaacaaaccagtgcgtgcgcgcctaaccgcccacgcgtatcgcacgctcttttgcccggcgcacgtcgttggcgcgcctgcgcctggtgtaggtacgtccgcacatgacatatactagagtctaaagtccattgaaattttaaattatatactttcatgtatggatggtgtttggagtgcaaacgtgcctttttatgttccacaaaatcattttactattgatccattccatcttttatactctttaatctattatggcattgatttccttcagttgcgtgtttccattttctgccactagttctatagaagttcactgatgtgtttaaagttataatggttacctagactaggctaagtagagtatacgtattgtagttctactgccttgaacaagaaaattcttgtctttgatgatgtagtttcttggttttttttcatctacaacaaatttatgatttattctcatttccttttgcaagttcatggagcatggttaccaccttggtttgcggcacaatatgctcattacgcggaggttgtcgcaggtcactagaataaacaagggaaacctgctgtgcagaatgttttgcataagttcaggcataaaaaaattagcacaagcaaagaaatgggctaaagctcatattgagatactaagatgagaaaatggttgccctcaagaaaaatgtaggaccttatgtataaaaggtatcaacaagatgttaatgggataaacctcatattgagaccgctaagatggtaatgctcatttgttcacgtacttcaatttcttttgttttatcttgggctaacagttggttgacattattacttcctattattgaagaaatggattcatgttaaggagaaattggttgtcctcaagaaaaatgcagaaccttatgtacaaatggattgtcttcaaaatgttgttcttgtagctacaacaaagagaaacaacaatggtggtgatgctatacgtgtagaagtagcaatgttggtcttgtagctccaagattttgttattttgttgttgatgaatgatatctatgataatatattgctaagtgtatgtgatgatcattggttgttgtttaattataatggtttgtgcttattgtgctacattgacattggtaataattaaaaaattaaaatggccttggttgggccaaatgttttgtgac

SEQ ID NO: 51748 - DNA, 3409 bp, Zea Mays
gaaagaatatccacttcaaatattttttaggctgcttcaaaaaacatggtttagaagtgctctaaatacttcaagtcaactccgttctagatgaacgctcgtttccctcccggcgactacttgcatccattaccggctattgcttccattaccgtccgcgcttagcactaaccacagtgaaaactgcgccactaaccgcagctttaaccccaattccatcaattagcggcgactgataaagtaattaagccggtggcgaagcatcctcgtccgcgtccgcatccgcaccgatccggtacgggagttctcggctccgacgccccacgcggccccgcctcgcgctccttcctcgaacacctcgccgccggctctcctcagctccgccgactcgcttcgctgtcctcctcgcccccagcctcctcctgatcccagattcgcctcgccggcccccggcgcccgccacgagcgccgtcaagcgaagccgttcttccctggcgcgcgccgctggcgtagctgccaggctccttccgccgaagcacatcgcggccagctggcgctcgtcgtccaccgtcgtcgcggcggacttcgtcctcctcccggaagcacagatccgcacaggctcggctgcatttctccacttgctggtaaggaagctcgctccgatggattactccgagggttagttccgccctggtcttccgtttctacgctgccagcaatcaagttccaacaagtcgtcgatggactgcgatttgttcgctgcgtggtggagcagcagcaccagattagtctccaggatttttcgggggtcagctgatgccccgggcccgtcgccagcgaggccagccatgccgcttcaccagaagcaggcggggctcgctgctagcaagctgggcgtggggacctcgaagaaacacagggcttttgtcgcaagcgatgagcagtggtacaacaagatttttgatccgtcaagcgacttcatcttgacatggaaccgcattttcctcttctcctgcttcgtcgcgctatttatagaccccctctatttctatgtgcccaagatcagctacggcagccccaaattctgtatcggaacagacacccgtttcgccgtcggtgttacattcttcagatcgattgcggatttattgtatgtcctgcacatcataataaagttcagaacagcatatatcaatccaagctcgactctgagggtgtttggaagaggggatcttgtcacaaatcccaaggaaattgcgtggaaatatatcagatctgacttagctgttgatgtggcagctgctttgcctttgccacagattattgtctggtttgtgataccagctataaagtattcctctgctgagcacaacaataacattctggtgctcatagttcttgctcagtatcttccaagattgtatctcatattccccttaacttatgaaattgtcaaagctactggagttgttgcaaagactgcttgggaaggagctgcatacaacatggtgctctatctgatagctagtcatgtgctaggtgcactgtggtatttgctatctgttgatcgccagacattctgctggaagacgaactgcctgaatgaaactggttgtgatcttaagtacctagattgtgacacgacaccaaatgctacatgggcgaatacgactgctgtcttcagtaattgtaatgctagcgataccaatataagttttgattttggcatgttcgagcctgcattgtctaatcaagcccctgctcaaagttttgcgatgaagtatttctattccctctggtggggattgcagaatttaagctgctacggtcagactcttactgtgagcacctatcttggcgagacgctgtattgtatattcttggcggtacttggtcttgtcttgtttgcgcatttgattggaaatgtgcagggttgaggaatggagattaaagcaaagagatactgaggaatggatgagacatcgtcagcttccttgtgaactgcgggaaaggaccttcgacgtgacattaagcgccacctttgcctgggtcttgttcgacgggttccttttttctcccagatggatgatcagcttcttgatgccatctgtgagcgtcttgtatcatcactgtgcacaaaaggcacatacattgtccgtgagggtgatccggtgacagagatgctcttcatcatccgtggaaaactggaaagctccacaacaaatggtggccgcactggcttcttcaattcaatcaccctgaaacccggtgatttctgtggcgaggagcttcttggatgggctcttgtccccaggcctactacaaatttgccgtcatccactcggacagtgaaggcactgatagaagtagaggcctttgcgctccaggcggaggatctcaagtttgttgccagccagttcaggcggctgcacagcaagaaactgcagcacactttccggtactactcgcaccactggaggacgtgggcctcatgcttcatccaagctgcctggagacggtacaagcgaaggaagatggcaaaggacctgagtatgagggagtcattcaactccgttagattagacgaagtggataacgaagatgacgattctccgcccaagaatagccttgctctaaaattcatagctaggactagaaaagtgcctcagaacatgaaagagttgccgaagataacgaagccagacgagccagatttctcagctgaacccgaagactaaagttgtctttgcttatgctatcatgtacagtggtcatagctgactattgtgaattgctagtcctatttggttcgtgatggaggttacaagccaactaggtatggtgggtgaattgaacttgggttgacggtgccatctgtggatgtgaggaaggtaactcagaatatcaatgaaagcgtaatgaagcttctgactggtatatagactgaatggttgtaagttaactagttgctacgttcatgttgtatattcagacatctctgtgcctatagatttcttgaaaaaaaaaggaaagaaaaaacaagaatacatcattacatagactgtaatcttaaacatctgacataagggtgtggctacgttgtccgtggccgtggaggactgtaaatcatgagggtgtggcttctggtaaaatggctagcaccacgcagtgatgagagatatctcgttgagtcatcagggcgcagattcgaacaggggcggagctaggccgcggattcgaacaggcgcagagctaggcctgtttatcggtgtcagctgacaccggcggctttttgcaaaatcaatgagaaatatttgatatgcgttgtttatccatagagctgatatcagtgtctagtggaatcggctccttcagctggcttcgctccgcatttgtgagacaaaggttt

SEQ ID NO: 51749 - DNA, 2219 bp, Zea Mays
ggcagactatgctaataattctagattattgtctggtttgtgataccagctataaagtattcctctgctgagcacaacaataacattctggtgctcatagttcttgctcagtatcttccaagattgtatctcatattccccttaacttatgaaattgtcaaagctactggagttgttgcaaagactgcttgggaaggagctgcatacaacatggtgctctatctgatagctagtcatgtgctaggtgcactgtggtatttgctatctgttgatcgccagacattctgctggaagacgaactgcctgaatgaaactggttgtgatcttaagtacctagattgtgacacgacaccaaatgctacatgggcgaatacgactgctgtcttcagtaattgtaatgctagcgataccaatataagttttgattttggcatgttcgagcctgcattgtctaatcaagcccctgctcaaagttttgcgatgaagtatttctattccctctggtggggattgcagaatttaagctgctacggtcagactcttactgtgagcacctatcttggcgagacgctgtattgtatattcttggcggtacttggtcttgtcttgtttgcgcatttgattggaaatgtgcagacctacctgcaatctattactgtgagggttgaggaatggagattaaagcaaagagatactgaggaatggatgagacatcgtcagcttccttgtgaactgcgggaaagggtgagacgatttatccagtacaagtggcttgcaacaagaggagtgaacgaagagtcaatattgcatgctctgcctgcagaccttcgacgtgacattaagcgccacctttgcctgggtcttgttcgacgggttccttttttctcccagatggatgatcagcttcttgatgccatctgtgagcgtcttgtatcatcactgtgcacaaaaggcacatacattgtccgtgagggtgatccggtgacagagatgctcttcatcatccgtggaaaactggaaagctccacaacaaatggtggccgcactggcttcttcaattcaatcaccctgaaacccggtgatttctgtggcgaggagcttcttggatgggctcttgtccccaggcctactacaaatttgccgtcatccactcggacagtgaaggcactgatagaagtagaggcctttgcgctccaggcggaggatctcaagtttgttgccagccagttcaggcggctgcacagcaagaaactgcagcacactttccggtactactcgcaccactggaggacgtgggcctcatgcttcatccaagctgcctggagacggtacaagcgaaggaagatggcaaaggacctgagtatgagggagtcattcaactccgttagattagacgaagtggataacgaagatgacgattctccgcccaagaatagccttgctctaaaattcatagctaggactagaaaagtgcctcagaacatgaaagagttgccgaagataacgaagccagacgagccagatttctcagctgaacccgaagactaaagttgtctttgcttatgctatcatgtacagtggtcatagctgactattgtgaattgctagtcctatttggttcgtgatggaggttacaagccaactaggtatggtgggtgaattgaacttgggttgacggtgccatctgtggatgtgaggaaggtaactcagaatatcaatgaaagcgtaatgaagcttctgactggtatatagactgaatggttgtaagttaactagttgctacgttcatgttgtatattcagacatctctgtgcctatagatttcttgaaaaaaaaaggaaagaaaaaacaagaatacatcattacatagactgtaatcttaaacatctgacataagggtgtggctacgttgtccgtggccgtggaggactgtaaatcatgagggtgtggcttctggtaaaatggctagcaccacgcagtgatgagagatatctcgttgagtcatcagggcgcagattcgaacaggggcggagctaggccgcggattcgaacaggcgcagagctaggcctgtttatcggtgtcagctgacaccggcggctttttgcaaaatcaatgagaaatatttgatatgcgttgtttatccatagagctgatatcagtgtctagtggaatcggctccttcagctggcttcgctccgcatttgtgagacaaaggttt

SEQ ID NO: 51750 - DNA, 1411 bp, Zea Mays
atttttttcaagtacaccactcaaatgttgctgagaatccagagtaacatattttagcaatacaagttccttttttctcccagatggatgatcagcttcttgatgccatctgtgagcgtcttgtatcatcactgtgcacaaaaggcacatacattgtccgtgagggtgatccggtgacagagatgctcttcatcatccgtggaaaactggaaagctccacaacaaatggtggccgcactggcttcttcaattcaatcaccctgaaacccggtgatttctgtggcgaggagcttcttggatgggctcttgtccccaggcctactacaaatttgccgtcatccactcggacagtgaaggcactgatagaagtagaggcctttgcgctccaggcggaggatctcaagtttgttgccagccagttcaggcggctgcacagcaagaaactgcagcacactttccggtactactcgcaccactggaggacgtgggcctcatgcttcatccaagctgcctggagacggtacaagcgaaggaagatggcaaaggacctgagtatgagggagtcattcaactccgttagattagacgaagtggataacgaagatgacgattctccgcccaagaatagccttgctctaaaattcatagctaggactagaaaagtgcctcagaacatgaaagagttgccgaagataacgaagccagacgagccagatttctcagctgaacccgaagactaaagttgtctttgcttatgctatcatgtacagtggtcatagctgactattgtgaattgctagtcctatttggttcgtgatggaggttacaagccaactaggtatggtgggtgaattgaacttgggttgacggtgccatctgtggatgtgaggaaggtaactcagaatatcaatgaaagcgtaatgaagcttctgactggtatatagactgaatggttgtaagttaactagttgctacgttcatgttgtatattcagacatctctgtgcctatagatttcttgaaaaaaaaaggaaagaaaaaacaagaatacatcattacatagactgtaatcttaaacatctgacataagggtgtggctacgttgtccgtggccgtggaggactgtaaatcatgagggtgtggcttctggtaaaatggctagcaccacgcagtgatgagagatatctcgttgagtcatcagggcgcagattcgaacaggggcggagctaggccgcggattcgaacaggcgcagagctaggcctgtttatcggtgtcagctgacaccggcggctttttgcaaaatcaatgagaaatatttgatatgcgttgtttatccatagagctgatatcagtgtctagtggaatcggctccttcagctggcttcgctccgcatttgtgagacaaaggttt

SEQ ID NO: 51751 - DNA, 2337 bp, Zea Mays
gtcagggccacggcccacgccactagccgatcgacggcgctcgccgggtcgctcggtctcgctctcgccgcgcgctgcgcgtatgcgctttccctatatttcggcgccgcgcgccccctcttccctccgccgccgcaccgcgcctcgccaaaaaaaaaaaaacgttcacagccgtcttccccctcgctcgtctccaaacgaggtcgcttcactcctccaaagtccaaacccggggcattatcgcgcgtgaggtagggcgagatggcggcggcggaggaggaggaggagtgggaggatgggcgttcggtgatgccggaggaggaggacggagacatcgaggacgtcccaccgccgccgctgctaggcaggaacttcggcagcgaggacgaggacgaggacgaggcgggctcgttgaactcccagtcccagtggtggccgcggagcttccgggaagcgactgacacctataccattgccgcgcccccgggcctccgtcacctcgtcgtcggtgactgcaatggcctgggctctgacctgaagctgcctcttctgtcggacaagctagatgggaggcaagattcatccaacaacttgctgccagtagcagaccccttcggttcagtgctaagcgacgggagattctcagatagagtgcaacaagccccaaccactccaggatgcaatctgacgcaaaccgtgttcaatggggtcaacgtgcttgctggcattggcattttctctgctccatacacgattcgtgaggccggatgggccagccttgtggttctggcttttttcgctgtggtgtgctgctacactggagttcttctaaagtactgctttgagagcaaagatggtgtcaaaactttcccagacattggggagcttgcctttggaaggatcggccggtttctcatttctatagttctgtacaccgagctctattccttttgtgtggagttcgttattctggaaggtgataacctggcatcaattttcacgagcaccactttcgattggaatgggattcatgccgatggcagacatttctttgggattctatttgctcttgttgtcttacccagcgtgtggttgcgagatcttcgagtaatatcttacctttcagtgggtggtgtgtttgcaactcttctggttttcctatctgttggtgtagttggtgctactggcaacgtagggttccacttggcagggaaagcagtgaagtgggatggtataccatttgcaattggcatttatggtttttgctacgctggacactcagtgtttccaaatatctatcagtcaatgtccgatcgcaccaaattcaacaaggcactctacatatgttttgcaatatgcacgacaatttatggcgctatagctgttattggctacctcatgtttggagataagactctctcacaaataactttgaatcttccgaaagattcatttgtggcaaaagttgcactggggaccacggtgatcattcctttcacaaaatattctttggtgataaacccattggctcggagtatagaagagttgcgtccagaagggtttctaaccgatagactcttcgctgttatgctgcgtactgccattgttgcatcaactctatgtgttgcctttctcctgccattctttggtcttgtgatggctctcattgggtctcttctcagtatacttgtggcgctcataatgcctgccctgtgcttcctgaagatcgctcggaacaaagcgacgcgcttgcaggtcatcgcaagcgtcgcgaccgtggtgctgggctccgtctgcgcagttcttgggacgtacaactctatcgccaagatagccgaaagctactagctagcaagcgtccaaaggccaagaggtctgccatggcccggccgccgcgcctgcacagggcgccatcgtgccctgtgtctaggcctcccttgtatgaactgcacggctgcaccgtgcatgcagaaacgcgaactgtactctgtctgtccgtggcccgtcccggcctgtacagggtaccatcgtgccctgtcggcctgaaataagagggtacctctgtccgtgactgtgttttctgaagacctgctgtttctgctcgcatttcagtgtatttctgtgtttctgccttggcccaggaccgtgccgtgccaacgggcggcggtcgtcggtactcggttgccgatgcttgccggcgcagtgaggagtcgcggtagtttgggcgtagccggccaatggatggcaccgggttgtttgcctaaaaatactcagctcctagaaatccacagaatttcttgtacttctgacaaacaggatctctatgcctgatagaat

SEQ ID NO: 51752 - DNA, 2533 bp, Zea Mays
cggtctcgctctcgccgcgcgctgcgcgtatgcgctttccctatatttcggcgccgcgcgccccctcttccctccgccgccgcaccgcgcctcgccaaaaaaaaaaaaacgttcacagccgtcttccccctcgctcgtctccaaacgaggtcgcttcactcctccaaagtccaaacccggggcattatcgcgcgtgaggtagggcgagatggcggcggcggaggaggaggaggagtgggaggatgggcgttcggtgatgccggaggaggaggacggagacatcgaggacgtcccaccgccgccgctgctaggcaggaacttcggcagcgaggacgaggacgaggacgaggcgggctcgttgaactcccagtcccagtggtggccgcggagcttccgggaagcgactgacacctataccattgccgcgcccccgggcctccgtcacctcgtcgtcggtgactgcaatggcctgggctctgacctgaagctgcctcttctgtcggacaagctagatgggaggcaagattcatccaacaacttgctgccagtagcagaccccttcggttcagtgctaagcgacgggagattctcagatagagtgcaacaagccccaaccactccaggatgcaatctgacgcaaaccgtgttcaatggggtcaacgtgcttgctggcattggcattttctctgctccatacacgattcgtgaggccggatgggccagccttgtggttctggcttttttcgctgtggtgtgctgctacactggagttcttctaaagtactgctttgagagcaaagatggtgtcaaaactttcccagacattggggagcttgcctttggaaggatcggccggtttctcatttctatagttctgtacaccgagctctattccttttgtgtggagttcgttattctggaaggtgataacctggcatcaattttcacgagcaccactttcgattggaatgggattcatgccgatggcagacatttctttgggattctatttgctcttgttgtcttacccagcgtgtggttgcgagatcttcgagtaatatcttacctttcagtgggtggtgtgtttgcaactcttctggttttcctatctgttggtgtagttggtgctactggcaacgtagggttccacttggcagggaaagcagtgaagtgggatggtataccatttgcaattggcatttatggtttttgctacgctggacactcagtgtttccaaatatctatcagtcaatgtccgatcgcaccaaattcaacaaggcactctacatatgttttgcaatatgcacgacaatttatggcgctatagctgttattggctacctcatgtttggagataagactctctcacaaataactttgaatcttccgaaagattcatttgtggcaaaagttgcactggggaccacggtgatcattcctttcacaaaatattctttggtgataaacccattggctcggagtatagaagagttgcgtccagaagggtttctaaccgatagactcttcgctgttatgctgcgtactgccattgttgcatcaactctatgtgttgcctttctcctgccattctttggtcttgtgatggctctcattgggtctcttctcagtatacttgtggtatgtcgcttctcttcagtttcactgcttatctggtcatggtagtataatattaaaacaaaatgcatgaaaacaattctgtcaagccaattatagttcttattgaaacaaagctagctagattctaaaacctcgttctacataccatattcatggaaaaaatgaaaacaatgtgataattaactgaataaacacgtttcagcatcatataccaatcaaagcatctgcatgattatctgtcattttcaggcgctcataatgcctgccctgtgcttcctgaagatcgctcggaacaaagcgacgcgcttgcaggtcatcgcaagcgtcgcgaccgtggtgctgggctccgtctgcgcagttcttgggacgtacaactctatcgccaagatagccgaaagctactagctagcaagcgtccaaaggccaagaggtctgccatggcccggccgccgcgcctgcacagggcgccatcgtgccctgtgtctaggcctcccttgtatgaactgcacggctgcaccgtgcatgcagaaacgcgaactgtactctgtctgtccgtggcccgtcccggcctgtacagggtaccatcgtgccctgtcggcctgaaataagagggtacctctgtccgtgactgtgttttctgaagacctgctgtttctgctcgcatttcagtgtatttctgtgtttctgccttggcccaggaccgtgccgtgccaacgggcggcggtcgtcggtactcggttgccgatgcttgccggcgcagtgaggagtcgcggtagtttgggcgtagccggccaatggatggcaccgggttgtttgcctaaaaatactcagctcctagaaatccacagaatttcttgtacttctgacaaacaggatctctatgcctgatagaat

SEQ ID NO: 51753 - DNA, 2233 bp, Zea Mays
tctcgctctcgccgcgcgctgcgcgtatgcgctttccctatatttcggcgccgcgcgccccctcttccctccgccgccgcaccgcgcctcgccaaaaaaaaaaaaacgttcacagccgtcttccccctcgctcgtctccaaacgaggtcgcttcactcctccaaagtccaaacccggggcattatcgcgcgtgaggtagggcgagatggcggcggcggaggaggaggaggagtgggaggatgggcgttcggtgatgccggaggaggaggacggagacatcgaggacgtcccaccgccgccgctgctaggcaggaacttcggcagcgaggacgaggacgaggacgaggcgggctcgttgaactcccagtcccagtggtggccgcggagcttccgggaagcgactgacacctataccattgccgcgcccccgggcctccgtcacctcgtcgtcggtgactgcaatggcctgggctctgacctgaagctgcctcttctgtcggacaagctagatgggaggcaagattcatccaacaacttgctgccagtagcagaccccttcggttcagtgctaagcgacgggagattctcagatagagtgcaacaagccccaaccactccaggatgcaatctgacgcaaaccgtgttcaatggggtcaacgtgcttgctggcattggcattttctctgctccatacacgattcgtgaggccggatgggccagccttgtggttctggcttttttcgctgtggtgtgctgctacactggagttcttctaaagtactgctttgagagcaaagatggtgtcaaaactttcccagacattggggagcttgcctttggaaggatcggccggtttctcatttctatagttctgtacaccgagctctattccttttgtgtggagttcgttattctggaaggtgataacctggcatcaattttcacgagcaccactttcgattggaatgggattcatgccgatggcagacatttctttgggattctatttgctcttgttgtcttacccagcgtgtggttgcgagatcttcgagtaatatcttacctttcagttggtgctactggcaacgtagggttccacttggcagggaaagcagtgaagtgggatggtataccatttgcaattggcatttatggtttttgctacgctggacactcagtgtttccaaatatctatcagtcaatgtccgatcgcaccaaattcaacaaggcactctacatatgttttgcaatatgcacgacaatttatggcgctatagctgttattggctacctcatgtttggagataagactctctcacaaataactttgaatcttccgaaagattcatttgtggcaaaagttgcactggggaccacggtgatcattcctttcacaaaatattctttggtgataaacccattggctcggagtatagaagagttgcgtccagaagggtttctaaccgatagactcttcgctgttatgctgcgtactgccattgttgcatcaactctatgtgttgcctttctcctgccattctttggtcttgtgatggctctcattgggtctcttctcagtatacttgtggcgctcataatgcctgccctgtgcttcctgaagatcgctcggaacaaagcgacgcgcttgcaggtcatcgcaagcgtcgcgaccgtggtgctgggctccgtctgcgcagttcttgggacgtacaactctatcgccaagatagccgaaagctactagctagcaagcgtccaaaggccaagaggtctgccatggcccggccgccgcgcctgcacagggcgccatcgtgccctgtgtctaggcctcccttgtatgaactgcacggctgcaccgtgcatgcagaaacgcgaactgtactctgtctgtccgtggcccgtcccggcctgtacagggtaccatcgtgccctgtcggcctgaaataagagggtacctctgtccgtgactgtgttttctgaagacctgctgtttctgctcgcatttcagtgtatttctgtgtttctgccttggcccaggaccgtgccgtgccaacgggcggcggtcgtcggtactcggttgccgatgcttgccggcgcagtgaggagtcgcggtagtttgggcgtagccggccaatggatggcaccgggttgtttgcctaaaaatactcagctcctagaaatccacagaatttcttgtacttctgacaaacaggatctctatgcctgatagaat

SEQ ID NO: 51754 - DNA, 1487 bp, Zea Mays
aagagcattcctgttgggctgttcctaacgtggagcagggacgcgccatgggatacctccgggttggccgccgacttcgactggaagaagaccgcggagccggtgatgcagctgtacacggaggcaacagatggctcctacatcgagcacaaggagagcgccatcgtgtggcaccaccacgaggcggatccggacttcggttcctgccaggccaaggaactgctcgaccatctcgagaacgtgctggccaacgagcccgtggtggtgaagagaggccagcacatcgtcgaggttaacccccaggtgagcggcgagccggatgcgtgtcttttttttctctttctgctcattaatttattccatagctgctgctgttcgttggctgttcattcagttcacttttttttttctggatgtgtatgaatcatgcccaccgactagacgtagctgtcaaacaaaaaatgcatcggataaggatcgatccgatccaatccaatccactacatgcatggctgggacaatctgtatcttctgcacaaatagaatgtgaatcagcatggaccattcccgtgtggcctgggaaatccacggtctttttaattgtgcccctcccccctccgaaagcaacctgccacgcaactgaaccatcatccatttgtccgcaatcacaattgggaaattcctgggactggcgagagagggggagagcagcaaatggcataaataacacgcgtgaaaatatctccgtgctgtcgtgcagggcatcagcaaaggcgtggtagtggacagcctcctgtcgtcgatggtgaggacggggaagccgccggacttcgtgctgtgcatcggcgacgaccggtcggacgaggacatgttcgagagcatcgtgtgcccggcctccaacagcggcgtgaagctgccggccagcagcgaggtgttcgcgtgcacggtgggcaagaagccgagcatggccaggtactacctggacgacacggtggacgtggtcaagatgctggacggcctggccagcgcgccgtcgcagcagcggtccaggccggcggtgcagctgcgggtctcgttcgaaggctcgctctgagggggaagaggagaacacacagcgctagtagcagcagtaaacagcaaacatcgagcaaggataaccagtggtgatgaacacaacgagattcagcagacggcgtggtgtaggattgattagctgcagtttacaggatcgacaatttttttttgctttcttctacattgctacccccaaatctttcgtgcctgtatatgcccgcatggtaatatgcaaagaataacgtttcgaccaccaaccaaaccaccattgtacatgtagttgacgatgacgacgagatcagaaaaggagaagtggggaaaatgattctttcactctgcctgcttgcttgccctgttggcagtcccattcagtcacgctttttttccctccatcctgctgcattacacagtcc

SEQ ID NO: 51755 - DNA, 799 bp, Zea Mays
gttctgccccccgacatcctcccttcgctccgctccctgaaaccgtgatcgaagccgccatcaacgccctccgccccctccgctcaggtctccctccgcggcagcgacaaccggcattcccagcccccaaaatcatatttccctctcccacaccacgcgtcgcgcctgtctgattccgcccgccagccacgcccgcagatctcgcttcggcgccctgattccgtcgtatgcaagatcacagccctgccttccatcgtcgcccccatgccatgctccccttccatcctcgctcacttccagccgccaacggagccccccgcgtacgtctggcagaaactgtagagaccgtcgaagatgggggcagtcctcgccgacgctgaagcgcttgagcgcgcggatctgatcctgctgcgtttcgggggtgacggaccggaggaaggagacgtaatcgtcggcgtggaagcggcagaggtcgcggtcgcgggcaggggttgggaggaacggagtcttaagattagcgctgtcggtgtcgtccttgaggtggacgtcaacggcgaggagctctttttcgttgataagtttacctctgcgcgtccctgctaaccgttccacatagtatcacaaaaaaaatggcactaccttggcatcgtcttccccaattcgggtgtatggaattcttggagcaaaggaccagcacactgtcacctccaaagaaagacccaggctgcttctacaaggagctgtacaaagtgcttaacgactgaagattttggatgagatgatggataatggttttcca

SEQ ID NO: 51756 - DNA, 456 bp, Zea Mays
tcgggggtgacggaccggaggaaggagacgtaatcgtcggcgtggaagcggcagaggtcgcggtcgcgggcaggggttgggaggaacggagtcttaagattagcgctgtcggtgtcgtccttgaggtggacgtcaacggcgaggagctctttttcgttgataaggtgcggtgcggctccctcttagcttgtgttcacgtttgcttcctcttcctcctccatgtatgattatgatttatgccattttaagttctcttcttgctctgctctcaactctctggtgtgtttatgctcctctccatacacggcggcggcggtgatgatgtcgatgcttttggttttggtgctgtactctttcccagattggcagcttgctgcccacagcctagcggtcggctctctatttttggactcactgttgtctagccgcttgtttcttgtggacaccttaccttag

SEQ ID NO: 51757 - DNA, 480 bp, Zea Mays
cagggagttgccgccgccgcacagcacggcaaagggtgtgtcagtcagggcgcgagcaccaactttgcatccattaactgctctgctcagagcattagggttgggaggaacggagtcttaagattagcgctgtcggtgtcgtccttgaggtggacgtcaacggcgaggagctctttttcgttgataaggtgcggtgcggctccctcttagcttgtgttcacgtttgcttcctcttcctcctccatgtatgattatgatttatgccattttaagttctcttcttgctctgctctcaactctctggtgtgtttatgctcctctccatacacggcggcggcggtgatgatgtcgatgcttttggttttggtgctgtactctttcccagattggcagcttgctgcccacagcctagcggtcggctctctatttttggactcactgttgtctagccgcttgtttcttgtggacaccttaccttag

SEQ ID NO: 51758 - DNA, 1636 bp, Zea Mays
caatctatttttttataccttcaatttatgaatgctctgcactttagcaagtgctatgaaaatatagaaaaaaagagcatcataagaatgaagattcatactattaagtagtggtatagcataatagcacatgaaactaccctacttatgttttatttaatttttcttatgttactgaggctcgtttgctgtttggtatcctgttcgttgattggtgcacagagagggggttcttgtgaaatgcgaagcatacggtgaagtccaagtaaactgcagcctcccaggatgaccacatgtaagcaatagatgctgctaccagcaaaaaggtaattcatatattttcagatttctacttttttattcttctccatttttaaaaaccgtaactttactttgatgctgataattgtagtactgactctttacttttttaaaaaaaaatcctttaataaaccatttattgtccaagtgtgaaaattgtgacaatgtaggaaagcttgaggatgaccacatgtaagctaaaactttggcaggtttattttcgctattctagaaaaaacttagtcaaaattgattgcacgctgtttaaggcatgatttgtaagctttgtaagcttgccgatctctgctgggattaggccggtgatgttgttgttctgcaggagactgcagcagcagggaagggaagcaaacgatcaacctcgctccagccaaaaaaaaggaaccacaccacacgtccatgcacactgactgaaagcagaaacgcgagaaggaagtaacacactcacatagtctcaaggttcgtcaggttccctatgcttggggagagcaggccagagaggttctgacctgggacctccctgccaaacgatcaaacagccacaaacatcggtaataagaacacatggacacggggaagagttgtgcagatgggatgggagagcgatcgagggagtggaatgatgcttacagtccggtgacgaagttctctagcgagcagctgactatggtccagctgcagggatccacggagtcctggtcccagttcttgagcacgccgtgggggtccttgagcgtgttcttgatcgtcatcagagcttgcactgcacaacatcatacacatagtaggctttgtaagctaaaactttggcaggtttattttcgctattctagaaaaaacttagtcagaattgattgcatgctgtttaaggcatgatttttctctcttctcaaaaaacaatctattttcccagaatatttgtatcccgactttttatcctatataaaaaacatgaaaaagaatacattgttccattgcaatttctagaaaacaaatcgagactgtcgttggcttgaagtactgaacttgtcactcttgttcgtttgcctagggggactggataagcacaagtgaggtagaatttcaaggttctcattatactttattttttcctggtacacaatggtgaaaaagcagggccagtcctagagttccctatgggttaaatatcttgtgtagtcatttgttcaggaagccagaggccttgctgctggaccaagattagtccaaaggttatctggttttggggaccatcgatctgcagacaatgtggcaagagtggtagaggaagagcttg

SEQ ID NO: 51759 - DNA, 1036 bp, Zea Mays
gtaaactgcagcctcccaggatgaccacatgtaagcaatagatgctgctaccagcaaaaaggagactgcagcagcagggaagggaagcaaacgatcaacctcgctccagccaaaaaaaaggaaccacaccacacgtccatgcacactgactgaaagcagaaacgcgagaaggaagtaacacactcacatagtctcaaggttcgtcaggttccctatgcttggggagagcaggccagagaggttctgacctgggacctccctgccaaacgatcaaacagccacaaacatcggtaataagaacacatggacacggggaagagttgtgcagatgggatgggagagcgatcgagggagtggaatgatgcttacagtccggtgacgaagttctctagcgagcagctgactatggtccagctgcagggatccacggagtcctggtcccagttcttgagcacgccgtgggggtccttgagcgtgttcttgatcgtcatcagagcttgcactgcacaacatcatacacatagtaggctttgtaagctaaaactttggcaggtttattttcgctattctagaaaaaacttagtcagaattgattgcatgctgtttaaggcatgatttttctctcttctcaaaaaacaatctattttcccagaatatttgtatcccgactttttatcctatataaaaaacatgaaaaagaatacattgttccattgcaatttctagaaaacaaatcgagactgtcgttggcttgaagtactgaacttgtcactcttgttcgtttgcctagggggactggataagcacaagtgaggtagaatttcaaggttctcattatactttattttttcctggtacacaatggtgaaaaagcagggccagtcctagagttccctatgggttaaatatcttgtgtagtcatttgttcaggaagccagaggccttgctgctggaccaagattagtccaaaggttatctggttttggggaccatcgatctgcagacaatgtggcaagagtggtagaggaagagcttg

SEQ ID NO: 51760 - DNA, 1088 bp, Zea Mays
cacatgtaagcaatagatgctgctaccagcaaaaaggtaattcatatattttcagatttctacttttttattcttctccatttttaaaaaccgtaactttactttgatgctgataattgtagtactgactctttacttttttaaaaaaaaatcctttaataaaccatttattgtccaagtgtgaaaattgtgacaatgtaggaaagcttgaggatgaccacatgtaagctaaaactttggcaggtttattttcgctattctagaaaaaacttagtcaaaattgattgcacgctgtttaaggcatgatttgtaagctttgtaagcttgccgatctctgctgggattaggccggtgatgttgttgttctgcaggagactgcagcagcagggaagggaagcaaacgatcaacctcgctccagccaaaaaaaaggaaccacaccacacgtccatgcacactgactgaaagcagaaacgcgagaaggaagtaacacactcacatagtctcaaggttcgtcaggttccctatgcttggggagagcaggccagagaggttctgacctgggacctccctgccaaacgatcaaacagccacaaacatcggtaataagaacacatggacacggggaagagttgtgcagatgggatgggagagcgatcgagggagtggaatgatgcttacagtccggtgacgaagttctctagcgagcagctgactatggtccagctgcagggatccacggagtcctggtcccagttcttgagcacgccgtgggggtccttgagcgtgttcttgatcgtcatcagagcttgcactgcacaacatcatacacatagtaggctttggggactggataagcacaagtgaggtagaatttcaaggttctcattatactttattttttcctggtacacaatggtgaaaaagcagggccagtcctagagttccctatgggttaaatatcttgtgtagtcatttgttcaggaagccagaggccttgctgctggaccaagattagtccaaaggttatctggttttggggaccatcgatctgcagacaatgtggcaagagtggtagaggaagagcttg

SEQ ID NO: 51761 - DNA, 627 bp, Zea Mays
aagacttgataaaggagtacgaagttgtaatgaagggtccattcaactacacggctcgtgatgaagctggtataccccgagaatggataagcagttgaagtctcatcctccaaagaacgttgaatcggaaatcttgcgtgagcatatcaagaaagagagggagacaacaaaggctggaaaatgaccatactatctgaagaaacctgaacttcgcgaaaggaagctgatgaacaagtacaacgagctcaaggaggcaggaaagcttgatgcattcatggaaaagcggtggaggaagaatgcctccaaagatcatcggttcatgccgtaccgacgcagtggagatgtataatagtttcctgattctggaggcgagtgaaaggatgattttaggacggtgttctcatggtggctggacactggacagtcagtgtctctgttactttgttgccctagccgtacaatcgtcagctccgtgcacaatctctactacttcttaagaatatagtgcaggcgtccatggtggttttttatgtttctcatttcactctctgcattttcagttacaactatactgcatatgctggcagatttgttcatatattactccagctgacattttcactatcg

SEQ ID NO: 51762 - DNA, 1504 bp, Zea Mays
cttgataaaggagtacgaagttgtaatgaagggtccattcaactacacggctcgtgatgaagctggttcatgatagattagcttgtattgttgagatggaaaaagagaatgcaagtttgggtaggcgctctactaattatttaccatatttaaaccagtcttcttaaccctgaaaactataaaatatctcattagccatacttaccattcatataatcatatcattttcagttacatgtgttaactttccattttgagatagagagcatggttgtctactatattttgttgcctcaatcaaatagataagaagctttgtgcatatggtaggccaatagcgcccattacttgtttctttcttagataattcttatgaacattaggttgtttcaactagcttccgtgcactatttgtcctgcattttccccttgtcttgcttttctgaacttaactgcctgctgtctttttattatgaacattaggacaatttttttgatgttctaacttttaataacattgcatatgggaaaatagattgtctactgcggcaacatatcaagcgtgcagtattgtactgggtctaggcaagatatgacagggatgttcagttgtccacagatgccatacttgttaccgtagcattacctttttatagttttagtttcaatttagtcatagtttgcttatgctacatagtttacacgggtattatctttttatattactcccttttttatttgtcacgttttagttaaaaaataaactagcggacgacaaatattcgagaacggaggcacttttctgtttagtatgtagcttactggtattcaagtaatataaaatttagcatgacctaccactcaaatggccttttctgcatatatttgtttcgtggcttgcattttctgggagcaatatgattgattggtttagttgattcctggaatgtaactacctacaggataagcagttgaagtctcatcctccaaagaacgttgaatcggaaatcttgcgtgagcatatcaagaaagagagggagacaacaaaggctggaaaatgaccatactatctgaagaaacctgaacttcgcgaaaggaagctgatgaacaagtacaacgagctcaaggaggcaggaaagcttgatgcattcatggaaaagcggtggaggaagaatgcctccaaagatcatcggttcatgccgtaccgacgcagtggagatgtataatagtttcctgattctggaggcgagtgaaaggatgattttaggacggtgttctcatggtggctggacactggacagtcagtgtctctgttactttgttgccctagccgtacaatcgtcagctccgtgcacaatctctactacttcttaagaatatagtgcaggcgtccatggtggttttttatgtttctcatttcactctctgcattttcagttacaactatactgcatatgctggcagatttgttcatatattactccagctgacattttcactatcg

SEQ ID NO: 51763 - DNA, 626 bp, Zea Mays
gtaacttctggctagcatggcataagtctgttcatgatagattagcttgtattgttgagatggaaaaagagaatgcaagtttgggataagcagttgaagtctcatcctccaaagaacgttgaatcggaaatcttgcgtgagcatatcaagaaagagagggagacaacaaaggctggaaaatgaccatactatctgaagaaacctgaacttcgcgaaaggaagctgatgaacaagtacaacgagctcaaggaggcaggaaagcttgatgcattcatggaaaagcggtggaggaagaatgcctccaaagatcatcggttcatgccgtaccgacgcagtggagatgtataatagtttcctgattctggaggcgagtgaaaggatgattttaggacggtgttctcatggtggctggacactggacagtcagtgtctctgttactttgttgccctagccgtacaatcgtcagctccgtgcacaatctctactacttcttaagaatatagtgcaggcgtccatggtggttttttatgtttctcatttcactctctgcattttcagttacaactatactgcatatgctggcagatttgttcatatattactccagctgacattttcactatcg

SEQ ID NO: 51764 - DNA, 2112 bp, Zea Mays
agacaagtgagactctcgtgagtaaatctgatatttggccacataacgctgctagggtttcttaacgctaaaaacctcatttgagcgtgtgaggtcgttggcctcgacccctctcgcgcactcgcgcttgcctgcacgctccagggcttcaggctcccctcccacctcgccgcggcagccatggcgatcacggcgccaactcccgacatccgcggcgagcgtcagtccggccaggacgtccgcacgcagaacgtgatggcgtgcggcgcgttgtccaacatcgtaaaatcctcgctcggccccgtcggtctcgacaagatgctagtggacgatatcggtgatgttacaatcactaatgatggtgcaaccatacttaagatgttggaagttgagcacccagctgccaaggttcttgttgagttggctgaactccaagaccgtgaggtaggagatggaacaacttccgttgtcatcatagcggcagagctgctcaagagagccaacgatcttgtgaagaataagatccatccaacctctataatcagtggctacaggcttgctatgcgtgaagcctgcaaatatgttgaggaaaaattggcagtcaaggttgacaaacttggaaaagactcccttatcaactctgcaaaaactagcatgtcttcaaagttgataaatagtgacagtgatttctttgcaactctggttgttgaagctgttcaagctgtgaagattacaaatgccaagggagaggtgaaatatccaatcaagagcatcaatattttgaaagctcatggtaaaagcgccaaggatagttacctgctaaatggctatgcactaaacacaggccgtgcagctcaaggaatgcctacgagagtaactcctgctagaattgcttgtcttgattttaaccttcagaagacaaaaatgcaacttggtgtccaagttctcgtaactgatccaagagaacttgagaagattcgtcagagagaatctgacataacaaaggagcggatcgataaaattctcaagtctggagctaatgttgtgttgaccactaagggaattgatgatatgtccttgaagtactttgttgaggctggagctattgcagtaaggcgtgtgcgcaaggaagatttgcgccatgttgccaaagccactggtgcaactatggtgagtacatttgcagacatggaaggtgaagaaacatttgattcatcattccttggacatgctgatgaagttgtggaggaaagaattgctgatgatgatgttattctggtgaaaggcacaaagaacaccagcgcggtctctataatacttagaggcgcaaatgacttcatgcttgatgagattgaccgatcattgcatgatgccctgtgcattgtgaagagaaccctggaatcaaatatggttgttgctggtggtggtgcagttgaggctgcgttatcagtttaccttgagaaccttgcaacgaccttgggttctcgggaacaattggcaattgctgaatttgctgaatctttgttaatcataccaaaggtactttctgttaatgctgcaaaagatgcaactgagcttgtagcaaagcttagggcatatcatcatactgctcaaacaaaggccgataagcaacattattcaaggtatcattcgcaacaaccttgagtatggcgtgatagagccatctatgagcaaagtgaagattattcagtttgccacggaggctgccattactatactgaggattgacgacatgatcaagcttaccaaggaagagggtaacgaagaagagtaatcagcccaccagtatctcttttgcgctggttgtcatagcgtgtaactttttttccttcccatttttccgtttagttttttgctggctgtgtgtgagcattcgtgtagggtgttgtaggaaaactgagaatgaaggtggtattaacgtatccccgtggcgtgacgttatttagacaacgacccacggatggatcaaattttgcgtgtattggggccaaaacagttctgcttcaaggattgaagttggaaatttgaattgttccgtgtactgatggactttttgctggttggcgacttcgcgtcaggctagagcatgcc

SEQ ID NO: 51765 - DNA, 2048 bp, Zea Mays
agacaagtgagactctcgtgagtaaatctgatatttggccacataacgctgctagggtttcttaacgctaaaaacctcatttgagcgtgtgaggtcgttggcctcgacccctctcgcgcactcgcgcttgcctgcacgctccagggcttcaggctcccctcccacctcgccgcggcagccatggcgatcacggcgccaactcccgacatccgcggcgagcgtcagtccggccaggacgtccgcacgcagaacgtgatggcgtgcggcgcgttgtccaacatcgtaaaatcctcgctcggccccgtcggtctcgacaagatgctagtggacgatatcggtgatgttacaatcactaatgatggtgcaaccatacttaagatgttggaagttgagcacccagctgccaaggttcttgttgagttggctgaactccaagaccgtgaggtaggagatggaacaacttccgttgtcatcatagcggcagagctgctcaagagagccaacgatcttgtgaagaataagatccatccaacctctataatcagtggctacaggcttgctatgcgtgaagcctgcaaatatgttgaggaaaaattggcagtcaaggttgacaaacttggaaaagactcccttatcaactctgcaaaaactagcatgtcttcaaagttgataaatagtgacagtgatttctttgcaactctggttgttgaagctgttcaagctgtgaagattacaaatgccaagggagaggtgaaatatccaatcaagagcatcaatattttgaaagctcatggtaaaagcgccaaggatagttacctgctaaatggctatgcactaaacacaggccgtgcagctcaaggaatgcctacgagagtaactcctgctagaattgcttgtcttgattttaaccttcagaagacaaaaatgcaacttggtgtccaagttctcgtaactgatccaagagaacttgagaagattcgtcagagagaatctgacataacaaaggagcggatcgataaaattctcaagtctggagctaatgttgtgttgaccactaagggaattgatgatatgtccttgaaggtgagtacatttgcagacatggaaggtgaagaaacatttgattcatcattccttggacatgctgatgaagttgtggaggaaagaattgctgatgatgatgttattctggtgaaaggcacaaagaacaccagcgcggtctctataatacttagaggcgcaaatgacttcatgcttgatgagattgaccgatcattgcatgatgccctgtgcattgtgaagagaaccctggaatcaaatatggttgttgctggtggtggtgcagttgaggctgcgttatcagtttaccttgagaaccttgcaacgaccttgggttctcgggaacaattggcaattgctgaatttgctgaatctttgttaatcataccaaaggtactttctgttaatgctgcaaaagatgcaactgagcttgtagcaaagcttagggcatatcatcatactgctcaaacaaaggccgataagcaacattattcaagtatgggtcttgacctctctaaaggtatcattcgcaacaaccttgagtatggcgtgatagagccatctatgagcaaagtgaagattattcagtttgccacggaggctgccattactatactgaggattgacgacatgatcaagcttaccaaggaagagggtaacgaagaagagtaatcagcccaccagtatctcttttgcgctggttgtcatagcgtgtaactttttttccttcccatttttccgtttagttttttgctggctgtgtgtgagcattcgtgtagggtgttgtaggaaaactgagaatgaaggtggtattaacgtatccccgtggcgtgacgttatttagacaacgacccacggatggatcaaattttgcgtgtattggggccaaaacagttctgcttcaaggattgaagttggaaatttgaattgttccgtgtactgatggactttttgctggttggcgacttcgcgtcaggctagagcatgcc

SEQ ID NO: 51766 - DNA, 2192 bp, Zea Mays
caaaataggcgccgcccgcccaggccatgggaccccaccgcccccgtctctcaattcaatcaatcccgggccgcccgtccgccgcggctaccactcgcccctcctcgtcaccagcggcggcaccatctgctccgccaccgcgttcacgcgctcccgtcgctgtcggccccgctcctctatttatataccgccccatcccagctccacgctttccctaggcaggcgcgcatccagctcctgccttgcttcctctcctcccggttcccgaataaaatttcctggacccggagcgcgcagcgcgctcccccgcctcccaaggaaacttatctaagcattccggcggtcgatccatcttcccgtccagggagagcaaggaataatcaatcaaccggccagtgaaacgttaggaggaggaggagagccggagtccgtccagcgcggcgcgggttgatcccttgcgtctccgcccctgccccgcgccggcgacacctttttgcggtgctagcgttgcgtcgaggagggacaggcgctctgcgtccttcgcacggcaacggcaagacggcggcgttgaagatgcgggtgttggaggaggacctcttcccctccaccccaggcaaggtgaagatcgagcgggcgggcgccatgaaccggcagctccaccgctgcttcgcgtccaccagcaccatgttcctgtgggcgctgttcctcgtcgccatgacggcgtcctacctcagcttccagtccttcgtcggcacccactgctccctcgcgctccgcaagcgcggcgacggcgtcgtcggcgtcgacaacttcaacgcctactacgacccgtcgctcaagaaggcgcgcagggcgctgctggcctcccacggggtgttcatcgtcgagggcgacatcaacgacggccgcctcctggccaagctcttcgacgtcgtgccattcacccacgtgctccacctcgctgcgcaggccggcgtgcgctacgccatgcagaacccggcgtcgtacgtgcactccaacatcgcggggctcgtcacgctcctcgaggcctgcaaggacgccgacccgcaaccggccatcgtctgggcctcctcctcctccgtctacggcctcaacgacaaggtccccttctccgagcgcgaccgcaccgaccagccggcctcgctctacgcggccaccaagaaggccggcgaggagatcacgcacacgtacaaccatatctacggcctatccatcaccggcctccgcttcttcaccgtgtacgggccctggggccgccccgacatggcctacttctccttcacccgcaacatcctgcaggggaaacccatcacggtgtaccgcggcaaggaccgcgtcgacctggcccgcgacttcacctacatcgacgacattgtcaagggctgcctcggctccctggacacggccggcaagagcaccggcaccggcggcaagaagcgcgggccggcgccctacaggatcttcaacctcggcaacaccgcgcccgtcacggtgcctaacctggtgtccatcctggagaagcacctccgcgtcaaggccaagaagaacgtggtcgagatgcccggcaatggcgacgtgcccttcacccacgccaacatcaccctcgccaggcagcagctcgggtacaagcccaccaccaacctcgatgtcggcctcaagaagttcgtcaagtggtaccagtcctactacggctacaccaggggatccaagaactcgcgacaatgatccatgctaattcttccttcttcctttctcgctttggcccggccgcggccacccactctcggatcaaacattgacattcttatcaggatttttttggtggaaatatgttatgttagggtgttcctttattaagtagagaaataccggggacaaattctttgcttggtgaggagatgggaggagagtgctggaggaagaaaagcaatcgagggctggaggaagaaaagcaatggggagcaacctttactttttctcttttctcctcctgtatctttcttctctctgtgtaaattggtcggcgctctacaggatcttaatccttttccgctccgttaatccttttccggattccgatgtgctgaccctaatcaaactgtggtagtcaagtcagattatccccagttcaaattgaattccagagtaacagccggactgccggagacgag

SEQ ID NO: 51767 - DNA, 895 bp, Zea Mays
ctttgcttcggtgtgccacgtgagagctgagctcgctgcctcgctgcatgtttcgggctcccaacgtctaagcctggctacagttacatgcacacgtaccgcagaggtttcgatctacaataatacgggcaggtttattttattttctgaaaacatatatagcggtggcgtgtttgctgtagcattgctcctgtgctactgctgctgcagcagctacaactgagagaggaaatcataccatagctcttgcagggtgcagaaaaggggtagagagaagaacggcccggggtgcctcaaccggaaggaaacgcggaccacgagagagagacccgtcaagggagtgagtcactactgcagaggtccaggttggtgggtggatgtcaggcaaggcacaatgcaagtgaacatcaggagccgtggccatgtacagtgctcgcatatatagggccggtcgtccaagcgacgctaaactgcgctagtagtaggggaggagaagagagcacggagcatgcagaagcagtgcaggtgcgcgctgctgagccagtagtagccactgtgtgccaccgctgctaggactactactagcgctcgcacagcgcatgcagtagcagctgcaggcaggctgcagcaaaggccagggccaggccagggccagcccatgcagccgtggaccggtcggtcggtcgtcctccgtccgccaccgcccaccgcaaccggaccgatcgccgtcgcccgcgcgtgcccggccaaagcccagagtgaacctgtcaggcgaccggccggccggagcacgtaagctaagcagcgccataactgaggaaagtgacccgtcggcctcggcccccaactatggtcctgtttggcacagctgctgcttgttgcaaaagcagcttat

SEQ ID NO: 51768 - DNA, 1510 bp, Zea Mays
agaagggtgggtgggtgggagaagcgaacaaaaactcaagtagctagagagagaaagcaaaggcagcaggctcagctagctccgtgtgagtgagtgagtgaggtatagagagagagagagagtgaggaagggaagccattgttgcagttgcacaggaaagaaagaaggaaggaaggaacgagcgggagtggaaaagttggtgagtgaaacttacccactgctgcagctagctgctcccacttcctcgctgcgtcgtcctccctcacgcacctcgcctcgtctcccgcctcctggctccggcacgcgtaccatctcctctcggtctaaagcggtggaggaggaggaggaggatgatggaggagagagcgggcgagccgtcggaggtggaggagcagggctgcgcagcgaggccagccaaaagtagattcggcgccgtgggcccgccgtcctccagctgaggaggaaaggcagctatcggcgaggaagggtggtggactggtggtgctagcggtggtggtggtggtggtggtggaggatcccctctcacgtcaagcgctgtgtggaaagcataaaggcgggaggaggaggagagggcgaaggcgcagagcttccccgccgcacaaagcgaaaaggcttcagaaagaagaaagcttccgccttgggagggagagcgaggcatcctgcgtgtgagcgtgcgataaatagcggctccaggtccaggctgagggagagcgcgtctctggtgctctcgcaaccaccgtgcgcttgctttcctcctgctctactccgttgcacacttgtactaggcctggaggtcctgtagctcgcctggtgctgtgtcggagacggtggcaatggcattgcaggagcaggaggcggacggcgacgagggcggggaggaagacgacgaaggcgaggatgagcggatgacgggatacggtgtgggggagctgatatctgcttgtcccgaggcgtgctgtccgcttgcggcggtgtaggagtaagatattggcgcaataggctcaatcatttttttttttgcttctctctttctctttttcccttttcttccttgtttgatgtggcgtgcttgtttttttttttgttgcctttttttgtttctgattgatgagaccaatgttgattatatgatgaagagttgattggtaagaacgctaaggggcctctaagatggacaatataaggtataaaggctcgttaacatagatttatatacgcgctaggtttgagaggcttaacctcgtggcgttttatcgaacacgccttgttgattcggcaaggaacacgggtgggacgctgctgtttgctgatgtggtgttggtcggccaagaaatgtgatgaacacgggtaagacgccgctgtagcattgactgaaacacagacgaacatgtcgaggacatgctactattttgttacgatcttagtatactgtatacccgtttttctgtatccaattcgacgttacaatacaagactactctcactcccg

SEQ ID NO: 51769 - DNA, 1373 bp, Zea Mays
ggtgggtgggtgggagaagcgaacaaaaactcaagtagctagagagagaaagcaaaggcagcaggctcagctagctccgtgtgagtgagtgagtgaggtatagagagagagagagagtgaggaagggaagccattgttgcagttgcacaggaaagaaagaaggaaggaaggaacgagcgggagtggaaaagttggtggaggaggaggaggaggatgatggaggagagagcgggcgagccgtcggaggtggaggagcagggctgcgcagcgaggccagccaaaagtagattcggcgccgtgggcccgccgtcctccagctgaggaggaaaggcagctatcggcgaggaagggtggtggactggtggtgctagcggtggtggtggtggtggtggtggaggatcccctctcacgtcaagcgctgtgtggaaagcataaaggcgggaggaggaggagagggcgaaggcgcagagcttccccgccgcacaaagcgaaaaggcttcagaaagaagaaagcttccgccttgggagggagagcgaggcatcctgcgtgtgagcgtgcgataaatagcggctccaggtccaggctgagggagagcgcgtctctggtgctctcgcaaccaccgtgcgcttgctttcctcctgctctactccgttgcacacttgtactaggcctggaggtcctgtagctcgcctggtgctgtgtcggagacggtggcaatggcattgcaggagcaggaggcggacggcgacgagggcggggaggaagacgacgaaggcgaggatgagcggatgacgggatacggtgtgggggagctgatatctgcttgtcccgaggcgtgctgtccgcttgcggcggtgtaggagtaagatattggcgcaataggctcaatcatttttttttttgcttctctctttctctttttcccttttcttccttgtttgatgtggcgtgcttgtttttttttttgttgcctttttttgtttctgattgatgagaccaatgttgattatatgatgaagagttgattggtaagaacgctaaggggcctctaagatggacaatataaggtataaaggctcgttaacatagatttatatacgcgctaggtttgagaggcttaacctcgtggcgttttatcgaacacgccttgttgattcggcaaggaacacgggtgggacgctgctgtttgctgatgtggtgttggtcggccaagaaatgtgatgaacacgggtaagacgccgctgtagcattgactgaaacacagacgaacatgtcgaggacatgctactattttgttacgatcttagtatactgtatacccgtttttctgtatccaattcgacgttacaatacaagactactctcactcccg

SEQ ID NO: 51770 - DNA, 925 bp, Zea Mays
gggtgggagaagcgaacaaaaactcaagtagctagagagagaaagcaaaggcagcaggctcagctagctccgtgtgagtgagtgagtgaggcatcctgcgtgtgagcgtgcgataaatagcggctccaggtccaggctgagggagagcgcgtctctggtgctctcgcaaccaccgtgcgcttgctttcctcctgctctactccgttgcacacttgtactaggcctggaggtcctgtagctcgcctggtgctgtgtcggagacggtggcaatggcattgcaggagcaggaggcggacggcgacgagggcggggaggaagacgacgaaggcgaggatgagcggatgacgggatacggtgtgggggagctgatatctgcttgtcccgaggcgtgctgtccgcttgcggcggtgtaggagtaagatattggcgcaataggctcaatcatttttttttttgcttctctctttctctttttcccttttcttccttgtttgatgtggcgtgcttgtttttttttttgttgcctttttttgtttctgattgatgagaccaatgttgattatatgatgaagagttgattggtaagaacgctaaggggcctctaagatggacaatataaggtataaaggctcgttaacatagatttatatacgcgctaggtttgagaggcttaacctcgtggcgttttatcgaacacgccttgttgattcggcaaggaacacgggtgggacgctgctgtttgctgatgtggtgttggtcggccaagaaatgtgatgaacacgggtaagacgccgctgtagcattgactgaaacacagacgaacatgtcgaggacatgctactattttgttacgatcttagtatactgtatacccgtttttctgtatccaattcgacgttacaatacaagactactctcactcccg

SEQ ID NO: 51771 - DNA, 691 bp, Zea Mays
tccagagcatccaatctagatccaacggtttcatatgaaaggggttaaaagtaaaataggtactatgtttcaggtggaaggggttaaatgtaaaataacagtcatcattagatctagattagatgcaccaaatcgtttgattgcaaacttgcaccaatataagtgattgcataagatatttccccgccttcttcgtccacgcgaacgtggttgttttcaacagacgctcaattgcccaccataacaccgtttcgctttctcgctccaactcccacagaaacggccgccagcgccgcaggcccgcagcgttgatggccgccgcacctggcgcaccagaggagcgactcggcgtcctcactcctcaatgcctccgggagaagaccggaatctccgagcccaggtcggaggtgcacagggacggaaactaccaccgagcggtgaacgtgtggatctacagcgagagcaccggggagctgctgctgcagcgccgagctgattgcgaggaattgtggcctgggcagtgagacatcattagcgccggccacatctccgccggcgattcctcgcactctcggcagagggaccttctggaagatccaggcatcaaccatttcagtcgatgctttcgagctcatgtgtgtgtttcttcaggaacgatttggcctcctcgtgcctgcaccagttctgcggc

SEQ ID NO: 51772 - DNA, 770 bp, Zea Mays
tccagagcatccaatctagatccaacggtttcatatgaaaggggttaaaagtaaaataggtactatgtttcaggtggaaggggttaaatgtaaaataacagtcatcattagatctagattagatgcaccaaatcgtttgattgcaaacttgcaccaatataagtgattgcataagatatttccccgccttcttcgtccacgcgaacgtggttgttttcaacagacgctcaattgcccaccataacaccgtttcgctttctcgctccaactcccacagaaacggccgccagcgccgcaggcccgcagcgttgatggccgccgcacctggcgcaccagaggagcgactcggcgtcctcactcctcaatgcctccgggagaagaccggaatctccgagcccaggtcggaggtgcacagggacggaaactaccaccgagcggtgaacgtgtggatctacagcgagagcaccggggagctgctgctgcagcgccgagctgattgcgaggaattgtggcctgggcagtgagacatcattagcgccggccacatctccgccggcgattcctcgcactctcggcagagggaccttctggaagatccaggcatcaaccatttcagtcgatgctttcgagctcatgtgtgtgtttcttcaggaacggtaaaattgacaaatattgtggaatagtgaatgctactagtgagagctagtgatgaagtcctaagaagaatatacctggttgaagtcaccagtatgataaagcactactgcaag

SEQ ID NO: 51773 - DNA, 687 bp, Zea Mays
tccagagcatccaatctagatccaacggtttcatatgaaaggggttaaaagtaaaataggtactatgtttcaggtggaaggggttaaatgtaaaataacagtcatcattagatctagattagatgcaccaaatcgtttgattgcaaacttgcaccaatataagtgattgcataagatatttccccgccttcttcgtccacgcgaacgtggttgttttcaacagacgctcaattgcccaccataacaccgtttcgctttctcgctccaactcccacagaaacggccgccagcgccgcaggcccgcagcgttgatggccgccgcacctggcgcaccagaggagcgactcggcgtcctcactcctcaatgcctccgggagaagaccggaatctccgagcccaggtcggaggtgcacagggacggaaactaccaccgagcggtgaacgtgtggatctacagcgagagcaccggggagctgctgctgcagcgccgagctgattgcgaggaattgtggcctgggcagtgagacatcattagcgccggccacatctccgccggcgattcctcgcactctcggcagagggaccttctggaagatccaggcatcaaccatttcagtcgatgctttcgagctcatgtgtgtgtttcttcaggaacggctggtcttcaatgtggatctcctgctgtgc

SEQ ID NO: 51774 - DNA, 749 bp, Zea Mays
caccaccaccaccttccgtgcgcggaggcggatatgtactttggcagttgcgagtggctccaacaatccaccggcaccaacccagcgcggcgccaccggcgacccgtaccccctcccccggagagcgatggcgacggagctgacggcggcgcagctgcgcgcgtacgacggcaccgacccgtccaagcccatctacgtctccgtccggggcaaggtctacgacgtcacctccggccgcggcttctacggccccggcggcgcctacgccgtcttcgcgggccgcgaggccagccgcgccctcggcaagatgtccaaggacgaggccgacgtctccggggacctctccgggctcaccgacaaggagctcggcgtcctcgccgactgggagatcaagttccaggccaagtaccccgtcgtcgcccgactcgccgccgacgcctgaactcgtcagtctcggtctaaatttactctgtcctgcctcttgcggtgttcagtgctgtgcttgcttgcttgttgctagttgctttgctacccaataatctgaatggaaggacgtatgtgatgtgcctgctgaatagttcctagtccttgcatacactgctgtgctaccacatgacatgatgtactcgtgtgtgtgctttggttgttgtgtaattccatgaccatgatcagtaatctgaataaaaaatattggagatgtgcttgcttcctacataatgggaataaactctaccatattcttaatgata

SEQ ID NO: 51775 - DNA, 6110 bp, Zea Mays
ggcgggcctccatctccacgcgcggcaaatcggcgagctgatgcggaggcggccgaggaggcgctcgacggctcggcgctgtccagtaatcagtaggcgccgctgcgtcggcgacttcttctccccaccagcgtggccgcgtgcagggttcaggctgtcacggaactcaagggtattagtgatatacaaaagtttgctttatggcaagtcagtgatgagtgaagggtgactaagaggcttctctaagtgtcaatatacaagacttcattgacgaggagatggtcccagttacattacatggttctgttggacacaatgaagccatccagatatgctattaaaatcctgctagttattatggatttaagttgtaccatgtctgttccatctacagctaggcagagcatgaactatcaaaggatcatgatacagacatctcacatcttagaaaattctgttcagtggttcttcaaggtaggtacatcaggcgcataccaaaaccagtctcagccttctttcctgatccatgatgcctctcagcctataacattgatgacagtgactagtgatactagtgatcatgctggcgaatgctagacgtcattaccatacagcaggccagcagccagtaaggagctccactttggcagcctgccactctgcttcttccactcctgaaaccgagcctgcaggtgcaggcaatgcggttgcttgctggagtccttatccaatcagtgaaggcactaaactcgcaaagccgttggaatctgcgagcaaggtcatgcacatcttgttggatgaagttaatacagcctgcactgcaactcccgcactctcgcgatcgtgtggaagacgtgggcgccgttgagggtcaaaatcttcttgtggcttgcctggcggagacggctctggaccgcagacaggcgacgacgtcacggactcgatgcgagaaccacttgctacctctgcaatacagcggaagaaacttgcgaccatctactggccacttgcagcttctcccttcgagtttgggatggcattttgtcgcaattggggcttcacagaccgtcgctaactgactgcagttcagtccttggttggtggcaaagagtgcgggagctgtggccaccgggcgccaggaagggcggtgattctctctttgcgttggtgacttgggaagtttggaaagagagaaatgcaaggtgcttccggagtgaggcatcctcagttgacgccgtagtttcttccgctcttggtgttgctagcgagtgggtgagagcgggcgcgaaagcccttggttgtattctgagcgagtagtcggctctgtgttgagctggttggccagctcttgtttttgtatttgtgttcgtactcttcttctattaacaaagatgcgcagctctcctgcgtattcgacaaaaaaaaaaactctgcaagatatggaatctgtgagtggatctctaagatgatgactgtgcacctgacaacgtgccacttgggacttgcttgtttgggcccggtttatcacacctagagcttctgctctgctcctgcgtgcccttctcggttgccatcgtggcgtgttgattgctaggcagctgctcttttgagctggcctgaactgtccgccgtccccgtcccctccaatcacaattcacaactgcctcgcactctgcccgctgacaaggtcgggacgtgcggtagattggtggtggcttcgtggcgctatcaatgctggtggatttgagcaggggcggtgggtgcgcggatagacgcctgagaaatccgggtgcccggggcagtgctgctccggaaatctgacctgccggcggagaagaattacactaacggccatgctgatggcccggtgaagcgcaaggtagccgcgatgccagcagcggcacctactactccaaggaggcacccgtcaccgaatgccggcggtcgggcgtcgtccccgacgccagctgggtcacaggcgaagaggtcccagtccaccgaacggcggccggtgactccgtcaaggccgtcttccggcggctcgcggccgagtactccgtccaggatctctgccccggcatcgccatcgtctgcgacttccagcccgtcctcattctctagctcgtcgacgccagtgggtgatgccgttccagaaacgcaaatcgctctgaggaggttgcctggtggccgggctcctgatgggctgtggccttcaatgcggagtctgtcttcttctttccagctcgaatcaaaggggaaaaagatttctagtagctcctctgcagatcaggccaagacgagggatgcagcacccgctgataggaagaggagcccattgagaggtagagctacccctgagcaatcggagaatccacatgccaaggtgattgatcatcatcgctggcctgctatgatggggggcagggtgtctgcaagcacaatgtccaagagcatggatctcactgataagatcagtaggtctgctcttccatcagttccgtcacgtggtgtttcaccgaagcgaacaacagtgtcctctgctgcaaataccttgtcaagaagtattgatcttgctgataaaattgatcggctggtctcttcgtcaatgtcatcacaaggggaatcaccaagaaagtcaccttgtaatggtgcagatgatgtgtccaaaaaggttggtgttcgtaaagatctcaaactctcatccttggcaatatcaagaagggtgtcaccagtaacaacagatgataaaattgatcggctggtctcttcgtcaatgtcatcacaagggggatcaccaagaaagtcaccttgtaacggtgcagatgatgtgtccaaaaaggtcggtgttcgtaaagatctcaaactctcatccttggcaatatcaagaagggtgtcaccaataacaacagctgcatcagatggcactagaaccttatcaggaagcatggatcttactgaaaaagataacagtacactctcgccagtttcatcacccagcatttcaccaagtgcatcattatcaagtgtgtctaatgccgcatcacagactactacaaagtcatccgagagattaattggacctgtttccaacctgtcctcatcgagaggactttcacctagaagaacaacttctggtggcattgttgatttaatgaaaagcattgatttccctgaaaaagataggagaccagcttcatcaagagggttttcgccaaggaggagactcgtgtctgatggtgttaatgatattgggaaaaatatggattttgctgaaaaggatagcagagtagtcagctcatcaattccatctcgaggggtttctccaaggagaagacttgcctctgatggtgttgatactatgtgcaggagctcggagttttctggaaaggataacaggccatccacctcatcttccacatcacgtggaatgtctccccgaagaaggcttgcttctgatggcataagtgctgtaaccaaaggcatggactttggtgataatgctaacagaccatcaacctctaaaggagtgtcacgagggatttcaccaagacttcaattagcctctgatggtgttggcaatgtatcaaaaggcacagatcttgctgatggactggacaggccatcaacctcatatgcaacaccgcgagctgcagctcgaggggtttcaccaagaagacggctcgcctcagatggtgtcaaagtgacatcaaagagcattgatcttgttgaaaacagtaacaaacccttaacagtgtcagctgcaacacgaggggcttcaccaagaagacggctcacctctgatggtctagcatttatatcaaagagcacaaatattactgaaaaaagtatcagaccttcaacaccgtcaatgtcatcacgagggatgtcaccaagaagacggctggcctctgatggtatcaatgctgtattggacacagaatttgctgacaaaaattgtagaccatcttcctcatcagctgctttacgaggggtttctcccagaagcaggtctgcctctaatgccatatcaacaggcatgactaatgctgaaaatgacagcagaccatccacaacatcaagtccgtcatgtcagactctgcagagcagcaggcttgaatctaatggtgttaacatcctatcaaaagatatggaaatctcatcaactgtatctggttgcacttcagacagtagacttgatggcgctggtgctctagtaaaaagcatagatgtcactgagaaacttactgtgtcaactgaagatggtggtggtgaagacgatcctggaagaatagattctagtgacgtagttactagtgcagtttcatcatcccttgcatctcaagaggtatcatcaagacatgttactgatgacgttaagaatgcgtcagagagtgttggtgcaacgcaaaaaggtaacagaccattatcagtgaaggttccatctcgagtagcttctccaagaagacgacttgcatccgatggcattgatactatatctaaaagcatggattttgctgagaaagataagaaacccatgacagtgtcagttccatcacgtggaatgtcaccaagaagaacagcaagatctgacagtgctgatataatgtcaaaaagtatggattttcctttacaagtgttttctacaagaagagtactaggacctgatggtgctaatgccatgtcaagaagcatggatctaactgataaaattagacagaaaatatcttcaactatgcaatcatccagagtctcaccaaggaaaatgcctcttgcttataacagaataaaaggccctgaaattttatcaggtgatgctgagagccctggttctgctgatggaaatgaaagtcaagaggagaatgccagttcaagtccagatgcaccttcaaatagttcagaaaaatctacacctccaaagcagctagctaggagatcaccttcgccatcacatattttaatatgcccttcatcatcatccaatgcttcatcgacaccatcatttgtctccaggagattaccaagcccatcaaggactagaccttcaacacctgtctcaccatgtagttctgccagatctgattcagcctcttcaattcttagctacattggtgatgctacaagagggaagaagagcccaactcacacggaagatgcccatcagttgcgcctcctgcataataggaacttacaatggtgttttaccacttcttatgttgatgaactgctgtcaattcagaagataagtgctgagactatgttgtatagtgtatgggatgctaactcaaggatgtgtgactctatggttataaaaaggaactatgtacaacagctaaggcaagaggtcaaattgggaattgtcttgaaggagcaaatggattaccttgatcactgggcagcgctgcaaacagagcattcttcttctttatccagcgcaactgaagctcttaaagcaagcacattgcgtcttccagtttcaggaggagctaaggccgatgtacttactgttaagaatgctgtcagttcagcagttgacattatgcaagcaatggggtcatccgtttgccatttgctatcaaagttacaggcttcacactctctggttacagaactttcagctgttgctgctaaagaaagtaccttactcaacgagtacagagaactcttggcaacagcagcagcactacaggtccaagagtcgagcctaaggacacagctcatacaagaaacagagtgaacaggttaaggtcctgtatttctaactaggaagatagaagtaaacaccattcgttagtttcagtgactgctgcatatgtgtacctttgatgtcgttttgtttttcctttgctcttccttttcccccccacttattagctagctcatatttctttacatttctactcccccccccccccctgttcttttctgttcgaacaacttacatggaagataagggaagcaacatggaaatggaatcatggatttactccatgacaaagctgccaatgtggtcttttattgcatcctagaccaatgagccaaaaactgaaagctttgttgtaagctgtaaatctgagcagttatgtgtccttcagtgtaatgcctttggatgt

SEQ ID NO: 51776 - DNA, 6503 bp, Zea Mays
ggcgggcctccatctccacgcgcggcaaatcggcgagctgatgcggaggcggccgaggaggcgctcgacggctcggcgctgtccagtaatcagtaggcgccgctgcgtcggcgacttcttctccccaccagcgtggccgcgtgcagggttcaggctgtcacggaactcaagggtattagtgatatacaaaagtttgctttatggcaagtcagtgatgagtgaagggtgactaagaggcttctctaagtgtcaatatacaagacttcattgacgaggagatggtcccagttacattacatggttctgttggacacaatgaagccatccagatatgctattaaaatcctgctagttattatggatttaagttgtaccatgtctgttccatctacagctaggcagagcatgaactatcaaaggatcatgatacagacatctcacatcttagaaaattctgttcagtggttcttcaagggtacatcaggcgcataccaaaaccagtctcagccttctttcctgatccatgatgcctctcagcctataacattgatgacagtgactagtgatactagtgatcatgctggcgaatgctagacgtcattaccatacagcaggccagcagccagtaaggagctccactttggcagcctgccactctgcttcttccactcctgaaaccgagcctgcaggtgcaggcaatgcggttgcttgctggagtccttatccaatcagtgaaggcactaaactcgcaaagccgttggaatctgcgagcaaggtcatgcacatcttgttggatgaagttaatacagcctgcactgcaactcccgcactctcgcgatcgtgtggaagacgtgggcgccgttgagggtcaaaatcttcttgtggcttgcctggcggagacggctctggaccgcagacaggcgacgacgtcacggactcgatgcgagaaccacttgctacctctgcaatacagcggaagaaacttgcgaccatctactggccacttgcagcttctcccttcgagtttgggatggcattttgtcgcaattggggcttcacagaccgtcgctaactgactgcagttcagtccttggttggtggcaaagagtgcgggagctgtggccaccgggcgccaggaagggcggtgattctctctttgcgttggtgacttgggaagtttggaaagagagaaatgcaaggtgcttccggagtgaggcatcctcagttgacgccgtagtttcttccgctcttggtgttgctagcgagtgggtgagagcgggcgcgaaagcccttggttgtattctgagcgagtagtcggctctgtgttgagctggttggccagctcttgtttttgtatttgtgttcgtactcttcttctattaacaaagatgcgcagctctcctgcgtattcgacaaaaaaaaaaactctgcaagatatggaatctgtgagtggatctctaagatgatgactgtgcacctgacaacgtgccacttgggacttgcttgtttgggcccggtttatcacacctagagcttctgctctgctcctgcgtgcccttctcggttgccatcgtggcgtgttgattgctaggctgctcttttgagctggcctgaactgtccgccgtccccgtcccctccaatcacaattcacaactgcctcgcactctgcccgctgacaagggagcaatagtcatcaataaaaaatatagaagggaaacgagaagaggacgtacaaaatgaaaaccgtacctctgtttggtcgggacgtgcggtagattggtggtggcttcgtggcgctatcaatgctggtggatttgagcaggggcggtgggtgcgcggatagacgcctgagaaatccgggtgcccggggcagtgctgctccggaaatctgacctgccggcggagaagaattacactaacggccatgctgatggcccggtgaagcgcaaggtagccgcgatgccagcagcggcacctactactccaaggaggcacccgtcaccgaatgccggcggtcgggcgtcgtccccgacgccagctgggtcacaggcgaagaggtcccagtccaccgaacggcggccggtgactccgtcaaggccgtcttccggcggctcgcggccgagtactccgtccaggatctctgccccggcatcgccatcgtctgcgacttccagcccgtcctcattctctagctcgtcgacgccagtgggtgatgccgttccagaaacgcaaatcgctctgaggaggttgcctggtggccgggctcctgatgggctgtggccttcaatgcggagtctgtcttcttctttccagctcgaatcaaaggggaaaaagatttctagtagctcctctgcagatcaggccaagacgagggatgcagcacccgctgataggaagaggagcccattgagaggtagagctacccctgagcaatcggagaatccacatgccaaggtgattgatcatcatcgctggcctgctatgatggggggcagggtgtctgcaagcacaatgtccaagagcatggatctcactgataagatcagtaggtctgctcttccatcagttccgtcacgtggtgtttcaccgaagcgaacaacagtgtcctctgctgcaaataccttgtcaagaagtattgatcttgctgataaaattgatcggctggtctcttcgtcaatgtcatcacaaggggaatcaccaagaaagtcaccttgtaatggtgcagatgatgtgtccaaaaaggttggtgttcgtaaagatctcaaactctcatccttggcaatatcaagaagggtgtcaccagtaacaacagatgataaaattgatcggctggtctcttcgtcaatgtcatcacaagggggatcaccaagaaagtcaccttgtaacggtgcagatgatgtgtccaaaaaggtcggtgttcgtaaagatctcaaactctcatccttggcaatatcaagaagggtgtcaccaataacaacagctgcatcagatggcactagaaccttatcaggaagcatggatcttactgaaaaagataacagtacactctcgccagtttcatcacccagcatttcaccaagtgcatcattatcaagtgtgtctaatgccgcatcacagactactacaaagtcatccgagagattaattggacctgtttccaacctgtcctcatcgagaggactttcacctagaagaacaacttctggtggcattgttgatttaatgaaaagcattgatttccctgaaaaagataggagaccagcttcatcaagagggttttcgccaaggaggagactcgtgtctgatggtgttaatgatattgggaaaaatatggattttgctgaaaaggatagcagagtagtcagctcatcaattccatctcgaggggtttctccaaggagaagacttgcctctgatggtgttgatactatgtgcaggagctcggagttttctggaaaggataacaggccatccacctcatcttccacatcacgtggaatgtctccccgaagaaggcttgcttctgatggcataagtgctgtaaccaaaggcatggactttggtgataatgctaacagaccatcaacctctaaaggagtgtcacgagggatttcaccaagacttcaattagcctctgatggtgttggcaatgtatcaaaaggcacagatcttgctgatggactggacaggccatcaacctcatatgcaacaccgcgaggtatgtcaccacgacgcagggttgcatctgatgccagcaatgccacttcagaaaggatcaagttcaccaaagaggattctggaactgtgtcctcttcagttgcacctagaggggtctcaacattaagacaacttgcttctgatggtgttgaatctgtctcaaaaagtatggatcttgttgagaaagatactagacctactacctcatcagcttcatcacgagggctttcaccaagaaggcgactttcctcagatggtgtcaatgtgatttcaaagagcatggatcttgttgaaaacaataacaaacttgtcaccatgtcagctgcagctcgaggggtttcaccaagaagacggctcgcctcagatggtgtcaaagtgacatcaaagagcattgatcttgttgaaaacagtaacaaacccttaacagtgtcagctgcaacacgaggggcttcaccaagaagacggctcacctctgatggtctagcatttatatcaaagagcacaaatattactgaaaaaagtatcagaccttcaacaccgtcaatgtcatcacgagggatgtcaccaagaagacggctggcctctgatggtatcaatgctgtattggacacagaatttgctgacaaaaattgtagaccatcttcctcatcagctgctttacgaggggtttctcccagaagcaggtctgcctctaatgccatatcaacaggcatgactaatgctgaaaatgacagcagaccatccacaacatcaagtccgtcatgtcagactctgcagagcagcaggcttgaatctaatggtgttaacatcctatcaaaagatatggaaatctcatcaactgtatctggttgcacttcagacagtagacttgatggcgctggtgctctagtaaaaagcatagatgtcactgagaaacttactgtgtcaactgaagatggtggtggtgaagacgatcctggaagaatagattctagtgacgtagttactagtgcagtttcatcatcccttgcatctcaagaggtatcatcaagacatgttactgatgacgttaagaatgcgtcagagagtgttggtgcaacgcaaaaaggtaacagaccattatcagtgaaggttccatctcgagtagcttctccaagaagacgacttgcatccgatggcattgatactatatctaaaagcatggattttgctgagaaagataagaaacccatgacagtgtcagttccatcacgtggaatgtcaccaagaagaacagcaagatctgacagtgctgatataatgtcaaaaagtatggattttcctttacaagtgttttctacaagaagagtactaggacctgatggtgctaatgccatgtcaagaagcatggatctaactgataaaattagacagaaaatatcttcaactatgcaatcatccagagtctcaccaaggaaaatgcctcttgcttataacagaataaaaggccctgaaattttatcaggtgatgctgagagccctggttctgctgatggaaatgaaagtcaagaggagaatgccagttcaagtccagatgcaccttcaaatagttcagaaaaatctacacctccaaagcagctagctaggagatcaccttcgccatcacatattttaatatgcccttcatcatcatccaatgcttcatcgacaccatcatttgtctccaggagattaccaagcccatcaaggactagaccttcaacacctgtctcaccatgtagttctgccagatctgattcagcctcttcaattcttagctacattggtgatgctacaagagggaagaagagcccaactcacacggaagatgcccatcagttgcgcctcctgcataataggaacttacaatggtgttttaccacttcttatgttgatgaactgctgtcaattcagaagataagtgctgagactatgttgtatagtgtatgggatgctaactcaaggatgtgtgactctatggttataaaaaggaactatgtacaacagctaaggcaagaggtcaaattgggaattgtcttgaaggagcaaatggattaccttgatcactgggcagcgctgcaaacagagcattcttcttctttatccagcgcaactgaagctcttaaagcaagcacattgcgtcttccagtttcaggaggagctaaggccgatgtacttactgttaagaatgctgtcagttcagcagttgacattatgcaagcaatggggtcatccgtttgccatttgctatcaaagttacaggcttcacactctctggttacagaactttcagctgttgctgctaaagaaagtaccttactcaacgagtacagagaactcttggcaacagcagcagcactacaggtccaagagtcgagcctaaggacacagctcatacaagaaacagagtgaacaggttaaggtcctgtatttctaactaggaagatagaagtaaacaccattcgttagtttcagtgactgctgcatatgtgtacctttgatgtcgttttgtttttcctttgctcttccttttcccccccacttattagctagctcatatttctttacatttctactcccccccccccccctgttcttttctgttcgaacaacttacatggaagataagggaagcaacatggaaatggaatcatggatttactccatgacaaagctgccaatgtggtcttttattgcatcctagaccaatgagccaaaaactgaaagctttgttgtaagctgtaaatctgagcagttatgtgtccttcagtgtaatgcctttggatgt

SEQ ID NO: 51777 - DNA, 1784 bp, Zea Mays
ggcggccgaggaggcgctcgacggctcggcgctgtccagtaatcagtaggcgccgctgcgtcggcgacttcttctccccaccagcgtggccgcgtgcagggttcaggtgaggcgccgttgctgtggttggtggcttgggagcatcggagggcggttcgtgcggtgcccttgttcaggggatcgaagattcgagagtgacgttgattcgaatccctgctcgtggcatgtcagtttattcggattcaacagtgtatgtgattgatccatcgggcatttaaaattaggttgtatatttggtactgctttggagttcgcagtagggttgttcaggtcagtcattgaataggccgatgaagcggctttgcacaagtgttaagttccattttatgaccgaaagggaaccgatggtggagccaggccgatccctttatcgaaaccagtagtcgtatagcggcagcttcattcaagtgcttactaggctgtcacggaactcaagggtattagtgatatacaaaagtttgctttatggcaagtcagtgatgagtgaagggtgactaagaggcttctctaagtgtcaatatacaagacttcattgacgaggagatggtcccagttacattacatggttctgttggacacaatgaagccatccagatatgctattaaaatcctgctagttattatggatttaagttgtaccatgtctgttccatctacagctaggcagagcatgaactatcaaaggatcatgatacagacatctcacatcttagaaaattctgttcagtggttcttcaaggtaggtacatcaggcgcataccaaaaccagtctcagccttctttcctgatccatgatgcctctcagcctataacattgatgacagtgactagtgatactagtgatcatgctggcgaatgctagacgtcattaccatacagcaggccagcagccagtaaggagctccactttggcagcctgccactctgcttcttccactcctgaaaccgagcctgcaggtgcaggcaatgcggttgcttgctggagtccttatccaatcagtgaaggcactaaactcgcaaagccgttggaatctgcgagcaaggtcatgcacatcttgttggatgaagttaatacagcctgcactgcaactcccgcactctcgcgatcgtgtggaagacgtgggcgccgttgagggtcaaaatcttcttgtggcttgcctggcggagacggctctggaccgcagacaggcgacgacgtcacggactcgatgcgagaaccacttgctacctctgcaatacagcggaagaaacttgcgaccatctactggccacttgcagcttctcccttcgagtttgggatggcattttgtcgcaattggggcttcacagaccgtcgctaactgactgcagttcagtccttggttggtggcaaagagtgcgggagctgtggccaccgggcgccaggaagggcggtgattctctctttgcgttggtgacttgggaagtttggaaagagagaaatgcaaggtgcttccggagtgaggcatcctcagttgacgccgtagtttcttccgctcttggtgttgctagcgagtgggtgagagcgggcgcgaaagcccttggttgtattctgagcgagtagtcggctctgtgttgagctggttggccagctcttgtttttgtatttgtgttcgtactcttcttctattaacaaagatgcgcagctctcctgcgtattcgacaaaaaaaaaaactctgcaagatatggaatctgtgtaagcaag

SEQ ID NO: 51778 - DNA, 1471 bp, Zea Mays
ggcggccgaggaggcgctcgacggctcggcgctgtccagtaatcagtaggcgccgctgcgtcggcgacttcttctccccaccagcgtggccgcgtgcagggttcaggtgaggcgccgttgctgtggttggtggcttgggagcatcggagggcggttcgtgcggtgcccttgttcaggggatcgaagattcgagagtgacgttgattcgaatccctgctcgtggcatgtcagtttattcggattcaacagtgctgtcacggaactcaagggtattagtgatatacaaaagtttgctttatggcaagtcagtgatgagtgaagggtgactaagaggcttctctaagtgtcaatatacaagacttcattgacgaggagatggtcccagttacattacatggttctgttggacacaatgaagccatccagatatgctattaaaatcctgctagttattatggatttaagttgtaccatgtctgttccatctacagctaggcagagcatgaactatcaaaggatcatgatacagacatctcacatcttagaaaattctgttcagtggttcttcaagtgactagtgatactagtgatcatgctggcgaatgctagacgtcattaccatacagcaggccagcagccagtaaggagctccactttggcagcctgccactctgcttcttccactcctgaaaccgagcctgcaggtgcaggcaatgcggttgcttgctggagtccttatccaatcagtgaaggcactaaactcgcaaagccgttggaatctgcgagcaaggtcatgcacatcttgttggatgaagttaatacagcctgcactgcaactcccgcactctcgcgatcgtgtggaagacgtgggcgccgttgagggtcaaaatcttcttgtggcttgcctggcggagacggctctggaccgcagacaggcgacgacgtcacggactcgatgcgagaaccacttgctacctctgcaatacagcggaagaaacttgcgaccatctactggccacttgcagcttctcccttcgagtttgggatggcattttgtcgcaattggggcttcacagaccgtcgctaactgactgcagttcagtccttggttggtggcaaagagtgcgggagctgtggccaccgggcgccaggaagggcggtgattctctctttgcgttggtgacttgggaagtttggaaagagagaaatgcaaggtgcttccggagtgaggcatcctcagttgacgccgtagtttcttccgctcttggtgttgctagcgagtgggtgagagcgggcgcgaaagcccttggttgtattctgagcgagtagtcggctctgtgttgagctggttggccagctcttgtttttgtatttgtgttcgtactcttcttctattaacaaagatgcgcagctctcctgcgtattcgacaaaaaaaaaaactctgcaagatatggaatctgtgtaagcaag

SEQ ID NO: 51779 - DNA, 1781 bp, Zea Mays
ggcggccgaggaggcgctcgacggctcggcgctgtccagtaatcagtaggcgccgctgcgtcggcgacttcttctccccaccagcgtggccgcgtgcagggttcaggtgaggcgccgttgctgtggttggtggcttgggagcatcggagggcggttcgtgcggtgcccttgttcaggggatcgaagattcgagagtgacgttgattcgaatccctgctcgtggcatgtcagtttattcggattcaacagtgtatgtgattgatccatcgggcatttaaaattaggttgtatatttggtactgctttggagttcgcagtagggttgttcaggtcagtcattgaataggccgatgaagcggctttgcacaagtgttaagttccattttatgaccgaaagggaaccgatggtggagccaggccgatccctttatcgaaaccagtagtcgtatagcggcagcttcattcaagtgcttactaggctgtcacggaactcaagggtattagtgatatacaaaagtttgctttatggcaagtcagtgatgagtgaagggtgactaagaggcttctctaagtgtcaatatacaagacttcattgacgaggagatggtcccagttacattacatggttctgttggacacaatgaagccatccagatatgctattaaaatcctgctagttattatggatttaagttgtaccatgtctgttccatctacagctaggcagagcatgaactatcaaaggatcatgatacagacatctcacatcttagaaaattctgttcagtggttcttcaagggtacatcaggcgcataccaaaaccagtctcagccttctttcctgatccatgatgcctctcagcctataacattgatgacagtgactagtgatactagtgatcatgctggcgaatgctagacgtcattaccatacagcaggccagcagccagtaaggagctccactttggcagcctgccactctgcttcttccactcctgaaaccgagcctgcaggtgcaggcaatgcggttgcttgctggagtccttatccaatcagtgaaggcactaaactcgcaaagccgttggaatctgcgagcaaggtcatgcacatcttgttggatgaagttaatacagcctgcactgcaactcccgcactctcgcgatcgtgtggaagacgtgggcgccgttgagggtcaaaatcttcttgtggcttgcctggcggagacggctctggaccgcagacaggcgacgacgtcacggactcgatgcgagaaccacttgctacctctgcaatacagcggaagaaacttgcgaccatctactggccacttgcagcttctcccttcgagtttgggatggcattttgtcgcaattggggcttcacagaccgtcgctaactgactgcagttcagtccttggttggtggcaaagagtgcgggagctgtggccaccgggcgccaggaagggcggtgattctctctttgcgttggtgacttgggaagtttggaaagagagaaatgcaaggtgcttccggagtgaggcatcctcagttgacgccgtagtttcttccgctcttggtgttgctagcgagtgggtgagagcgggcgcgaaagcccttggttgtattctgagcgagtagtcggctctgtgttgagctggttggccagctcttgtttttgtatttgtgttcgtactcttcttctattaacaaagatgcgcagctctcctgcgtattcgacaaaaaaaaaaactctgcaagatatggaatctgtgtaagcaag

SEQ ID NO: 51780 - DNA, 4956 bp, Zea Mays
acaaaagttcctccccgtcgctttctcaggtaaccgcgagctccgccgtgacaaatcctctcctcgttttccccacctcctcgtgctcccctccctcctgtctttgcggccggatccctgcccccaaaaccggattggggagggctcgctgcgttcaggcgagggcagcggcggcggcgtgccgtggttcctcagcgccgaggtggtcagaggtcgggacgtgcggtagattggtggtggcttcgtggcgctatcaatgctggtggatttgagcaggggcggtgggtgcgcggatagacgcctgagaaatccgggtgcccggggcagtgctgctccggaaatctgacctgccggcggagaagaattacactaacggccatgctgatggcccggtgaagcgcaaggtagccgcgatgccagcagcggcacctactactccaaggaggcacccgtcaccgaatgccggcggtcgggcgtcgtccccgacgccagctgggtcacaggcgaagaggtcccagtccaccgaacggcggccggtgactccgtcaaggccgtcttccggcggctcgcggccgagtactccgtccaggatctctgccccggcatcgccatcgtctgcgacttccagcccgtcctcattctctagctcgtcgacgccagtgggtgatgccgttccagaaacgcaaatcgctctgaggaggttgcctggtggccgggctcctgatgggctgtggccttcaatgcggagtctgtcttcttctttccagctcgaatcaaaggggaaaaagatttctagtagctcctctgcagatcaggccaagacgagggatgcagcacccgctgataggaagaggagcccattgagaggtagagctacccctgagcaatcggagaatccacatgccaaggtgattgatcatcatcgctggcctgctatgatggggggcagggtgtctgcaagcacaatgtccaagagcatggatctcactgataagatcagtaggtctgctcttccatcagttccgtcacgtggtgtttcaccgaagcgaacaacagtgtcctctgctgcaaataccttgtcaagaagtattgatcttgctgataaaattgatcggctggtctcttcgtcaatgtcatcacaaggggaatcaccaagaaagtcaccttgtaatggtgcagatgatgtgtccaaaaaggttggtgttcgtaaagatctcaaactctcatccttggcaatatcaagaagggtgtcaccagtaacaacagatgataaaattgatcggctggtctcttcgtcaatgtcatcacaagggggatcaccaagaaagtcaccttgtaacggtgcagatgatgtgtccaaaaaggtcggtgttcgtaaagatctcaaactctcatccttggcaatatcaagaagggtgtcaccaataacaacagctgcatcagatggcactagaaccttatcaggaagcatggatcttactgaaaaagataacagtacactctcgccagtttcatcacccagcatttcaccaagtgcatcattatcaagtgtgtctaatgccgcatcacagactactacaaagtcatccgagagattaattggacctgtttccaacctgtcctcatcgagaggactttcacctagaagaacaacttctggtggcattgttgatttaatgaaaagcattgatttccctgaaaaagataggagaccagcttcatcaagagggttttcgccaaggaggagactcgtgtctgatggtgttaatgatattgggaaaaatatggattttgctgaaaaggatagcagagtagtcagctcatcaattccatctcgaggggtttctccaaggagaagacttgcctctgatggtgttgatactatgtgcaggagctcggagttttctggaaaggataacaggccatccacctcatcttccacatcacgtggaatgtctccccgaagaaggcttgcttctgatggcataagtgctgtaaccaaaggcatggactttggtgataatgctaacagaccatcaacctctaaaggagtgtcacgagggatttcaccaagacttcaattagcctctgatggtgttggcaatgtatcaaaaggcacagatcttgctgatggactggacaggccatcaacctcatatgcaacaccgcgaggtatgtcaccacgacgcagggttgcatctgatgccagcaatgccacttcagaaaggatcaagttcaccaaagaggattctggaactgtgtcctcttcagttgcacctagaggggtctcaacattaagacaacttgcttctgatggtgttgaatctgtctcaaaaagtatggatcttgttgagaaagatactagacctactacctcatcagcttcatcacgagggctttcaccaagaaggcgactttcctcagatggtgtcaatgtgatttcaaagagcatggatcttgttgaaaacaataacaaacttgtcaccatgtcagctgcagctcgaggggtttcaccaagaagacggctcgcctcagatggtgtcaaagtgacatcaaagagcattgatcttgttgaaaacagtaacaaacccttaacagtgtcagctgcaacacgaggggcttcaccaagaagacggctcacctctgatggtctagcatttatatcaaagagcacaaatattactgaaaaaagtatcagaccttcaacaccgtcaatgtcatcacgagggatgtcaccaagaagacggctggcctctgatggtatcaatgctgtattggacacagaatttgctgacaaaaattgtagaccatcttcctcatcagctgctttacgaggggtttctcccagaagcaggtctgcctctaatgccatatcaacaggcatgactaatgctgaaaatgacagcagaccatccacaacatcaagtccgtcatgtcagactctgcagagcagcaggcttgaatctaatggtgttaacatcctatcaaaagatatggaaatctcatcaactgtatctggttgcacttcagacagtagacttgatggcgctggtgctctagtaaaaagcatagatgtcactgagaaacttactgtgtcaactgaagatggtggtggtgaagacgatcctggaagaatagattctagtgacgtagttactagtgcagtttcatcatcccttgcatctcaagaggtatcatcaagacatgttactgatgacgttaagaatgcgtcagagagtgttggtgcaacgcaaaaaggtaacagaccattatcagtgaaggttccatctcgagtagcttctccaagaagacgacttgcatccgatggcattgatactatatctaaaagcatggattttgctgagaaagataagaaacccatgacagtgtcagttccatcacgtggaatgtcaccaagaagaacagcaagatctgacagtgctgatataatgtcaaaaagtatggattttcctttacaagtgttttctacaagaagagtactaggacctgatggtgctaatgccatgtcaagaagcatggatctaactgataaaattagacagaaaatatcttcaactatgcaatcatccagagtctcaccaaggaaaatgcctcttgcttataacagaataaaaggccctgaaattttatcaggtgatgctgagagccctggttctgctgatggaaatgaaagtcaagaggagaatgccagttcaagtccagatgcaccttcaaatagttcagaaaaatctacacctccaaagcagctagctaggagatcaccttcgccatcacatattttaatatgcccttcatcatcatccaatgcttcatcgacaccatcatttgtctccaggagattaccaagcccatcaaggactagaccttcaacacctgtctcaccatgtagttctgccagatctgattcagcctcttcaattcttagctacattggtgatgctacaagagggaagaagagcccaactcacacggaagatgcccatcagttgcgcctcctgcataataggaacttacaatggtgttttaccacttcttatgttgatgaactgctgtcaattcagaagataagtgctgagactatgttgtatagtgtatgggatgctaactcaaggatgtgtgactctatggttataaaaaggaactatgtacaacagctaaggcaagaggtcaaattgggaattgtcttgaaggagcaaatggattaccttgatcactgggcagcgctgcaaacagagcattcttcttctttatccagcgcaactgaagctcttaaagcaagcacattgcgtcttccagtttcaggaggagctaaggccgatgtacttactgttaagaatgctgtcagttcagcagttgacattatgcaagcaatggggtcatccgtttgccatttgctatcaaagttacaggcttcacactctctggttacagaactttcagctgttgctgctaaagaaagtaccttactcaacgagtacagagaactcttggcaacagcagcagcactacaggtccaagagtcgagcctaaggacacagctcatacaagaaacagagtgaacaggttaaggtcctgtatttctaactaggaagatagaagtaaacaccattcgttagtttcagtgactgctgcatatgtgtacctttgatgtcgttttgtttttcctttgctcttccttttcccccccacttattagctagctcatatttctttacatttctactcccccccccccccctgttcttttctgttcgaacaacttacatggaagataagggaagcaacatggaaatggaatcatggatttactccatgacaaagctgccaatgtggtcttttattgcatcctagaccaatgagccaaaaactgaaagctttgttgtaagctgtaaatctgagcagttatgtgtccttcagtgtaatgcctttggatgt

SEQ ID NO: 51781 - DNA, 4573 bp, Zea Mays
ctcgttttccccacctcctcgtgctcccctccctcctgtctttgcggccggatccctgcccccaaaaccggattggggagggctcgctgcgttcaggcgagggcagcggcggcggcgtgccgtggttcctcagcgccgaggtggtcagaggtcgggacgtgcggtagattggtggtggcttcgtggcgctatcaatgctggtggatttgagcaggggcggtgggtgcgcggatagacgcctgagaaatccgggtgcccggggcagtgctgctccggaaatctgacctgccggcggagaagaattacactaacggccatgctgatggcccggtgaagcgcaaggtagccgcgatgccagcagcggcacctactactccaaggaggcacccgtcaccgaatgccggcggtcgggcgtcgtccccgacgccagctgggtcacaggcgaagaggtcccagtccaccgaacggcggccggtgactccgtcaaggccgtcttccggcggctcgcggccgagtactccgtccaggatctctgccccggcatcgccatcgtctgcgacttccagcccgtcctcattctctagctcgtcgacgccagtgggtgatgccgttccagaaacgcaaatcgctctgaggaggttgcctggtggccgggctcctgatgggctgtggccttcaatgcggagtctgtcttcttctttccagctcgaatcaaaggggaaaaagatttctagtagctcctctgcagatcaggccaagacgagggatgcagcacccgctgataggaagaggagcccattgagaggtagagctacccctgagcaatcggagaatccacatgccaaggtgattgatcatcatcgctggcctgctatgatggggggcagggtgtctgcaagcacaatgtccaagagcatggatctcactgataagatcagtaggtctgctcttccatcagttccgtcacgtggtgtttcaccgaagcgaacaacagtgtcctctgctgcaaataccttgtcaagaagtattgatcttgctgataaaattgatcggctggtctcttcgtcaatgtcatcacaaggggaatcaccaagaaagtcaccttgtaatggtgcagatgatgtgtccaaaaaggttggtgttcgtaaagatctcaaactctcatccttggcaatatcaagaagggtgtcaccagtaacaacagatgataaaattgatcggctggtctcttcgtcaatgtcatcacaagggggatcaccaagaaagtcaccttgtaacggtgcagatgatgtgtccaaaaaggtcggtgttcgtaaagatctcaaactctcatccttggcaatatcaagaagggtgtcaccaataacaacagctgcatcagatggcactagaaccttatcaggaagcatggatcttactgaaaaagataacagtacactctcgccagtttcatcacccagcatttcaccaagtgcatcattatcaagtgtgtctaatgccgcatcacagactactacaaagtcatccgagagattaattggacctgtttccaacctgtcctcatcgagaggactttcacctagaagaacaacttctggtggcattgttgatttaatgaaaagcattgatttccctgaaaaagataggagaccagcttcatcaagagggttttcgccaaggaggagactcgtgtctgatggtgttaatgatattgggaaaaatatggattttgctgaaaaggatagcagagtagtcagctcatcaattccatctcgaggggtttctccaaggagaagacttgcctctgatggtgttgatactatgtgcaggagctcggagttttctggaaaggataacaggccatccacctcatcttccacatcacgtggaatgtctccccgaagaaggcttgcttctgatggcataagtgctgtaaccaaaggcatggactttggtgataatgctaacagaccatcaacctctaaaggagtgtcacgagggatttcaccaagacttcaattagcctctgatggtgttggcaatgtatcaaaaggcacagatcttgctgatggactggacaggccatcaacctcatatgcaacaccgcgagctgcagctcgaggggtttcaccaagaagacggctcgcctcagatggtgtcaaagtgacatcaaagagcattgatcttgttgaaaacagtaacaaacccttaacagtgtcagctgcaacacgaggggcttcaccaagaagacggctcacctctgatggtctagcatttatatcaaagagcacaaatattactgaaaaaagtatcagaccttcaacaccgtcaatgtcatcacgagggatgtcaccaagaagacggctggcctctgatggtatcaatgctgtattggacacagaatttgctgacaaaaattgtagaccatcttcctcatcagctgctttacgaggggtttctcccagaagcaggtctgcctctaatgccatatcaacaggcatgactaatgctgaaaatgacagcagaccatccacaacatcaagtccgtcatgtcagactctgcagagcagcaggcttgaatctaatggtgttaacatcctatcaaaagatatggaaatctcatcaactgtatctggttgcacttcagacagtagacttgatggcgctggtgctctagtaaaaagcatagatgtcactgagaaacttactgtgtcaactgaagatggtggtggtgaagacgatcctggaagaatagattctagtgacgtagttactagtgcagtttcatcatcccttgcatctcaagaggtatcatcaagacatgttactgatgacgttaagaatgcgtcagagagtgttggtgcaacgcaaaaaggtaacagaccattatcagtgaaggttccatctcgagtagcttctccaagaagacgacttgcatccgatggcattgatactatatctaaaagcatggattttgctgagaaagataagaaacccatgacagtgtcagttccatcacgtggaatgtcaccaagaagaacagcaagatctgacagtgctgatataatgtcaaaaagtatggattttcctttacaagtgttttctacaagaagagtactaggacctgatggtgctaatgccatgtcaagaagcatggatctaactgataaaattagacagaaaatatcttcaactatgcaatcatccagagtctcaccaaggaaaatgcctcttgcttataacagaataaaaggccctgaaattttatcaggtgatgctgagagccctggttctgctgatggaaatgaaagtcaagaggagaatgccagttcaagtccagatgcaccttcaaatagttcagaaaaatctacacctccaaagcagctagctaggagatcaccttcgccatcacatattttaatatgcccttcatcatcatccaatgcttcatcgacaccatcatttgtctccaggagattaccaagcccatcaaggactagaccttcaacacctgtctcaccatgtagttctgccagatctgattcagcctcttcaattcttagctacattggtgatgctacaagagggaagaagagcccaactcacacggaagatgcccatcagttgcgcctcctgcataataggaacttacaatggtgttttaccacttcttatgttgatgaactgctgtcaattcagaagataagtgctgagactatgttgtatagtgtatgggatgctaactcaaggatgtgtgactctatggttataaaaaggaactatgtacaacagctaaggcaagaggtcaaattgggaattgtcttgaaggagcaaatggattaccttgatcactgggcagcgctgcaaacagagcattcttcttctttatccagcgcaactgaagctcttaaagcaagcacattgcgtcttccagtttcaggaggagctaaggccgatgtacttactgttaagaatgctgtcagttcagcagttgacattatgcaagcaatggggtcatccgtttgccatttgctatcaaagttacaggcttcacactctctggttacagaactttcagctgttgctgctaaagaaagtaccttactcaacgagtacagagaactcttggcaacagcagcagcactacaggtccaagagtcgagcctaaggacacagctcatacaagaaacagagtgaacaggttaaggtcctgtatttctaactaggaagatagaagtaaacaccattcgttagtttcagtgactgctgcatatgtgtacctttgatgtcgttttgtttttcctttgctcttccttttcccccccacttattagctagctcatatttctttacatttctactcccccccccccccctgttcttttctgttcgaacaacttacatggaagataagggaagcaacatggaaatggaatcatggatttactccatgacaaagctgccaatgtggtcttttattgcatcctagaccaatgagccaaaaactgaaagctttgttgtaagctgtaaatctgagcagttatgtgtccttcagtgtaatgcctttggatgt

SEQ ID NO: 51782 - DNA, 942 bp, Zea Mays
ccggattggggagggctcgctgcgttcaggcgagggcagcggcggcggcgtgccgtggttcctcagcgccgaggtggtcagagactatgttgtatagtgtatgggatgctaactcaaggatgtgtgactctatggttataaaaaggaactatgtacaacagctaaggcaagaggtcaaattgggaattgtcttgaaggagcaaatggattaccttgatcactgggcagcgctgcaaacagagcattcttcttctttatccagcgcaactgaagctcttaaagcaagcacattgcgtcttccagtttcaggaggagctaaggccgatgtacttactgttaagaatgctgtcagttcagcagttgacattatgcaagcaatggggtcatccgtttgccatttgctatcaaagttacaggcttcacactctctggttacagaactttcagctgttgctgctaaagaaagtaccttactcaacgagtacagagaactcttggcaacagcagcagcactacaggtccaagagtcgagcctaaggacacagctcatacaagaaacagagtgaacaggttaaggtcctgtatttctaactaggaagatagaagtaaacaccattcgttagtttcagtgactgctgcatatgtgtacctttgatgtcgttttgtttttcctttgctcttccttttcccccccacttattagctagctcatatttctttacatttctactcccccccccccccctgttcttttctgttcgaacaacttacatggaagataagggaagcaacatggaaatggaatcatggatttactccatgacaaagctgccaatgtggtcttttattgcatcctagaccaatgagccaaaaactgaaagctttgttgtaagctgtaaatctgagcagttatgtgtccttcagtgtaatgcctttggatgt

SEQ ID NO: 51783 - DNA, 4772 bp, Zea Mays
caggaggccgggagtgccttcagcggaggtcgggacgtgcggtagattggtggtggcttcgtggcgctatcaatgctggtggatttgagcaggggcggtgggtgcgcggatagacgcctgagaaatccgggtgcccggggcagtgctgctccggaaatctgacctgccggcggagaagaattacactaacggccatgctgatggcccggtgaagcgcaaggtagccgcgatgccagcagcggcacctactactccaaggaggcacccgtcaccgaatgccggcggtcgggcgtcgtccccgacgccagctgggtcacaggcgaagaggtcccagtccaccgaacggcggccggtgactccgtcaaggccgtcttccggcggctcgcggccgagtactccgtccaggatctctgccccggcatcgccatcgtctgcgacttccagcccgtcctcattctctagctcgtcgacgccagtgggtgatgccgttccagaaacgcaaatcgctctgaggaggttgcctggtggccgggctcctgatgggctgtggccttcaatgcggagtctgtcttcttctttccagctcgaatcaaaggggaaaaagatttctagtagctcctctgcagatcaggccaagacgagggatgcagcacccgctgataggaagaggagcccattgagaggtagagctacccctgagcaatcggagaatccacatgccaaggtgattgatcatcatcgctggcctgctatgatggggggcagggtgtctgcaagcacaatgtccaagagcatggatctcactgataagatcagtaggtctgctcttccatcagttccgtcacgtggtgtttcaccgaagcgaacaacagtgtcctctgctgcaaataccttgtcaagaagtattgatcttgctgataaaattgatcggctggtctcttcgtcaatgtcatcacaaggggaatcaccaagaaagtcaccttgtaatggtgcagatgatgtgtccaaaaaggttggtgttcgtaaagatctcaaactctcatccttggcaatatcaagaagggtgtcaccagtaacaacagatgataaaattgatcggctggtctcttcgtcaatgtcatcacaagggggatcaccaagaaagtcaccttgtaacggtgcagatgatgtgtccaaaaaggtcggtgttcgtaaagatctcaaactctcatccttggcaatatcaagaagggtgtcaccaataacaacagctgcatcagatggcactagaaccttatcaggaagcatggatcttactgaaaaagataacagtacactctcgccagtttcatcacccagcatttcaccaagtgcatcattatcaagtgtgtctaatgccgcatcacagactactacaaagtcatccgagagattaattggacctgtttccaacctgtcctcatcgagaggactttcacctagaagaacaacttctggtggcattgttgatttaatgaaaagcattgatttccctgaaaaagataggagaccagcttcatcaagagggttttcgccaaggaggagactcgtgtctgatggtgttaatgatattgggaaaaatatggattttgctgaaaaggatagcagagtagtcagctcatcaattccatctcgaggggtttctccaaggagaagacttgcctctgatggtgttgatactatgtgcaggagctcggagttttctggaaaggataacaggccatccacctcatcttccacatcacgtggaatgtctccccgaagaaggcttgcttctgatggcataagtgctgtaaccaaaggcatggactttggtgataatgctaacagaccatcaacctctaaaggagtgtcacgagggatttcaccaagacttcaattagcctctgatggtgttggcaatgtatcaaaaggcacagatcttgctgatggactggacaggccatcaacctcatatgcaacaccgcgaggtatgtcaccacgacgcagggttgcatctgatgccagcaatgccacttcagaaaggatcaagttcaccaaagaggattctggaactgtgtcctcttcagttgcacctagaggggtctcaacattaagacaacttgcttctgatggtgttgaatctgtctcaaaaagtatggatcttgttgagaaagatactagacctactacctcatcagcttcatcacgagggctttcaccaagaaggcgactttcctcagatggtgtcaatgtgatttcaaagagcatggatcttgttgaaaacaataacaaacttgtcaccatgtcagctgcagctcgaggggtttcaccaagaagacggctcgcctcagatggtgtcaaagtgacatcaaagagcattgatcttgttgaaaacagtaacaaacccttaacagtgtcagctgcaacacgaggggcttcaccaagaagacggctcacctctgatggtctagcatttatatcaaagagcacaaatattactgaaaaaagtatcagaccttcaacaccgtcaatgtcatcacgagggatgtcaccaagaagacggctggcctctgatggtatcaatgctgtattggacacagaatttgctgacaaaaattgtagaccatcttcctcatcagctgctttacgaggggtttctcccagaagcaggtctgcctctaatgccatatcaacaggcatgactaatgctgaaaatgacagcagaccatccacaacatcaagtccgtcatgtcagactctgcagagcagcaggcttgaatctaatggtgttaacatcctatcaaaagatatggaaatctcatcaactgtatctggttgcacttcagacagtagacttgatggcgctggtgctctagtaaaaagcatagatgtcactgagaaacttactgtgtcaactgaagatggtggtggtgaagacgatcctggaagaatagattctagtgacgtagttactagtgcagtttcatcatcccttgcatctcaagaggtatcatcaagacatgttactgatgacgttaagaatgcgtcagagagtgttggtgcaacgcaaaaaggtaacagaccattatcagtgaaggttccatctcgagtagcttctccaagaagacgacttgcatccgatggcattgatactatatctaaaagcatggattttgctgagaaagataagaaacccatgacagtgtcagttccatcacgtggaatgtcaccaagaagaacagcaagatctgacagtgctgatataatgtcaaaaagtatggattttcctttacaagtgttttctacaagaagagtactaggacctgatggtgctaatgccatgtcaagaagcatggatctaactgataaaattagacagaaaatatcttcaactatgcaatcatccagagtctcaccaaggaaaatgcctcttgcttataacagaataaaaggccctgaaattttatcaggtgatgctgagagccctggttctgctgatggaaatgaaagtcaagaggagaatgccagttcaagtccagatgcaccttcaaatagttcagaaaaatctacacctccaaagcagctagctaggagatcaccttcgccatcacatattttaatatgcccttcatcatcatccaatgcttcatcgacaccatcatttgtctccaggagattaccaagcccatcaaggactagaccttcaacacctgtctcaccatgtagttctgccagatctgattcagcctcttcaattcttagctacattggtgatgctacaagagggaagaagagcccaactcacacggaagatgcccatcagttgcgcctcctgcataataggaacttacaatggtgttttaccacttcttatgttgatgaactgctgtcaattcagaagataagtgctgagactatgttgtatagtgtatgggatgctaactcaaggatgtgtgactctatggttataaaaaggaactatgtacaacagctaaggcaagaggtcaaattgggaattgtcttgaaggagcaaatggattaccttgatcactgggcagcgctgcaaacagagcattcttcttctttatccagcgcaactgaagctcttaaagcaagcacattgcgtcttccagtttcaggaggagctaaggccgatgtacttactgttaagaatgctgtcagttcagcagttgacattatgcaagcaatggggtcatccgtttgccatttgctatcaaagttacaggcttcacactctctggttacagaactttcagctgttgctgctaaagaaagtaccttactcaacgagtacagagaactcttggcaacagcagcagcactacaggtccaagagtcgagcctaaggacacagctcatacaagaaacagagtgaacaggttaaggtcctgtatttctaactaggaagatagaagtaaacaccattcgttagtttcagtgactgctgcatatgtgtacctttgatgtcgttttgtttttcctttgctcttccttttcccccccacttattagctagctcatatttctttacatttctactcccccccccccccctgttcttttctgttcgaacaacttacatggaagataagggaagcaacatggaaatggaatcatggatttactccatgacaaagctgccaatgtggtcttttattgcatcctagaccaatgagccaaaaactgaaagctttgttgtaagctgtaaatctgagcagttatgtgtccttcagtgtaatgcctttggatgt

SEQ ID NO: 51784 - DNA, 5176 bp, Zea Mays
acaagagcgacggtacttttaacggggacttgcctgtactaatcatcataactaagccactagttagtcgtcctcgtcccggtggcctggacgaccgggcagcgggcacccctccaccaccatttaatccgcttctagcttgtttctctatctctctctctacccccatctctggcagcttggcttcgccattacttggcttgcaggagctggccgtggagttcccgtgaggtggagaccaagccatgactgactcgctcgaccctacccgcacccgaaagagacgcttcgattcctatgcataaataggaaaaaaggagaggaggaattcgagaaaatcaccgcctctcttcctttcttcatcgccctgcccttttctcttctcctctcctctccacctaccgaatcccgtcgctgggggtcctcgatctggtcgggacgtgcggtagattggtggtggcttcgtggcgctatcaatgctggtggatttgagcaggggcggtgggtgcgcggatagacgcctgagaaatccgggtgcccggggcagtgctgctccggaaatctgacctgccggcggagaagaattacactaacggccatgctgatggcccggtgaagcgcaaggtagccgcgatgccagcagcggcacctactactccaaggaggcacccgtcaccgaatgccggcggtcgggcgtcgtccccgacgccagctgggtcacaggcgaagaggtcccagtccaccgaacggcggccggtgactccgtcaaggccgtcttccggcggctcgcggccgagtactccgtccaggatctctgccccggcatcgccatcgtctgcgacttccagcccgtcctcattctctagctcgtcgacgccagtgggtgatgccgttccagaaacgcaaatcgctctgaggaggttgcctggtggccgggctcctgatgggctgtggccttcaatgcggagtctgtcttcttctttccagctcgaatcaaaggggaaaaagatttctagtagctcctctgcagatcaggccaagacgagggatgcagcacccgctgataggaagaggagcccattgagaggtagagctacccctgagcaatcggagaatccacatgccaaggtgattgatcatcatcgctggcctgctatgatggggggcagggtgtctgcaagcacaatgtccaagagcatggatctcactgataagatcagtaggtctgctcttccatcagttccgtcacgtggtgtttcaccgaagcgaacaacagtgtcctctgctgcaaataccttgtcaagaagtattgatcttgctgataaaattgatcggctggtctcttcgtcaatgtcatcacaaggggaatcaccaagaaagtcaccttgtaatggtgcagatgatgtgtccaaaaaggttggtgttcgtaaagatctcaaactctcatccttggcaatatcaagaagggtgtcaccagtaacaacagatgataaaattgatcggctggtctcttcgtcaatgtcatcacaagggggatcaccaagaaagtcaccttgtaacggtgcagatgatgtgtccaaaaaggtcggtgttcgtaaagatctcaaactctcatccttggcaatatcaagaagggtgtcaccaataacaacagctgcatcagatggcactagaaccttatcaggaagcatggatcttactgaaaaagataacagtacactctcgccagtttcatcacccagcatttcaccaagtgcatcattatcaagtgtgtctaatgccgcatcacagactactacaaagtcatccgagagattaattggacctgtttccaacctgtcctcatcgagaggactttcacctagaagaacaacttctggtggcattgttgatttaatgaaaagcattgatttccctgaaaaagataggagaccagcttcatcaagagggttttcgccaaggaggagactcgtgtctgatggtgttaatgatattgggaaaaatatggattttgctgaaaaggatagcagagtagtcagctcatcaattccatctcgaggggtttctccaaggagaagacttgcctctgatggtgttgatactatgtgcaggagctcggagttttctggaaaggataacaggccatccacctcatcttccacatcacgtggaatgtctccccgaagaaggcttgcttctgatggcataagtgctgtaaccaaaggcatggactttggtgataatgctaacagaccatcaacctctaaaggagtgtcacgagggatttcaccaagacttcaattagcctctgatggtgttggcaatgtatcaaaaggcacagatcttgctgatggactggacaggccatcaacctcatatgcaacaccgcgaggtatgtcaccacgacgcagggttgcatctgatgccagcaatgccacttcagaaaggatcaagttcaccaaagaggattctggaactgtgtcctcttcagttgcacctagaggggtctcaacattaagacaacttgcttctgatggtgttgaatctgtctcaaaaagtatggatcttgttgagaaagatactagacctactacctcatcagcttcatcacgagggctttcaccaagaaggcgactttcctcagatggtgtcaatgtgatttcaaagagcatggatcttgttgaaaacaataacaaacttgtcaccatgtcagctgcagctcgaggggtttcaccaagaagacggctcgcctcagatggtgtcaaagtgacatcaaagagcattgatcttgttgaaaacagtaacaaacccttaacagtgtcagctgcaacacgaggggcttcaccaagaagacggctcacctctgatggtctagcatttatatcaaagagcacaaatattactgaaaaaagtatcagaccttcaacaccgtcaatgtcatcacgagggatgtcaccaagaagacggctggcctctgatggtatcaatgctgtattggacacagaatttgctgacaaaaattgtagaccatcttcctcatcagctgctttacgaggggtttctcccagaagcaggtctgcctctaatgccatatcaacaggcatgactaatgctgaaaatgacagcagaccatccacaacatcaagtccgtcatgtcagactctgcagagcagcaggcttgaatctaatggtgttaacatcctatcaaaagatatggaaatctcatcaactgtatctggttgcacttcagacagtagacttgatggcgctggtgctctagtaaaaagcatagatgtcactgagaaacttactgtgtcaactgaagatggtggtggtgaagacgatcctggaagaatagattctagtgacgtagttactagtgcagtttcatcatcccttgcatctcaagaggtatcatcaagacatgttactgatgacgttaagaatgcgtcagagagtgttggtgcaacgcaaaaaggtaacagaccattatcagtgaaggttccatctcgagtagcttctccaagaagacgacttgcatccgatggcattgatactatatctaaaagcatggattttgctgagaaagataagaaacccatgacagtgtcagttccatcacgtggaatgtcaccaagaagaacagcaagatctgacagtgctgatataatgtcaaaaagtatggattttcctttacaagtgttttctacaagaagagtactaggacctgatggtgctaatgccatgtcaagaagcatggatctaactgataaaattagacagaaaatatcttcaactatgcaatcatccagagtctcaccaaggaaaatgcctcttgcttataacagaataaaaggccctgaaattttatcaggtgatgctgagagccctggttctgctgatggaaatgaaagtcaagaggagaatgccagttcaagtccagatgcaccttcaaatagttcagaaaaatctacacctccaaagcagctagctaggagatcaccttcgccatcacatattttaatatgcccttcatcatcatccaatgcttcatcgacaccatcatttgtctccaggagattaccaagcccatcaaggactagaccttcaacacctgtctcaccatgtagttctgccagatctgattcagcctcttcaattcttagctacattggtgatgctacaagagggaagaagagcccaactcacacggaagatgcccatcagttgcgcctcctgcataataggaacttacaatggtgttttaccacttcttatgttgatgaactgctgtcaattcagaagataagtgctgagactatgttgtatagtgtatgggatgctaactcaaggatgtgtgactctatggttataaaaaggaactatgtacaacagctaaggcaagaggtcaaattgggaattgtcttgaaggagcaaatggattaccttgatcactgggcagcgctgcaaacagagcattcttcttctttatccagcgcaactgaagctcttaaagcaagcacattgcgtcttccagtttcaggaggagctaaggccgatgtacttactgttaagaatgctgtcagttcagcagttgacattatgcaagcaatggggtcatccgtttgccatttgctatcaaagttacaggcttcacactctctggttacagaactttcagctgttgctgctaaagaaagtaccttactcaacgagtacagagaactcttggcaacagcagcagcactacaggtccaagagtcgagcctaaggacacagctcatacaagaaacagagtgaacaggttaaggtcctgtatttctaactaggaagatagaagtaaacaccattcgttagtttcagtgactgctgcatatgtgtacctttgatgtcgttttgtttttcctttgctcttccttttcccccccacttattagctagctcatatttctttacatttctactcccccccccccccctgttcttttctgttcgaacaacttacatggaagataagggaagcaacatggaaatggaatcatggatttactccatgacaaagctgccaatgtggtcttttattgcatcctagaccaatgagccaaaaactgaaagctttgttgtaagctgtaaatctgagcagttatgtgtccttcagtgtaatgcctttggatgt

SEQ ID NO: 51785 - DNA, 4855 bp, Zea Mays
acaagagcgacggtacttttaacggggacttgcctgtactaatcatcataactaagccactagttagtcgtcctcgtcccggtggcctggacgaccgggcagcgggcacccctccaccaccatttaatccgcttctagcttgtttctctatctctctctctacccccatctctggcagcttggcttcgccattacttggcttgcaggagctggccgtggagttcccgtgaggtggagaccaagccatgactgactcgctcgaccctacccgcacccgaaagagacgcttcgattcctatgcataaataggaaaaaaggagaggaggaattcgagaaaatcaccgcctctcttcctttcttcatcgccctgcccttttctcttctcctctcctctccacctaccgaatcccgtcgctgggggtcctcgatctggtcgggacgtgcggtagattggtggtggcttcgtggcgctatcaatgctggtggatttgagcaggggcggtgggtgcgcggatagacgcctgagaaatccgggtgcccggggcagtgctgctccggaaatctgacctgccggcggagaagaattacactaacggccatgctgatggcccggtgaagcgcaaggtagccgcgatgccagcagcggcacctactactccaaggaggcacccgtcaccgaatgccggcggtcgggcgtcgtccccgacgccagctgggtcacaggcgaagaggtcccagtccaccgaacggcggccggtgactccgtcaaggccgtcttccggcggctcgcggccgagtactccgtccaggatctctgccccggcatcgccatcgtctgcgacttccagcccgtcctcattctctagctcgtcgacgccagtgggtgatgccgttccagaaacgcaaatcgctctgaggaggttgcctggtggccgggctcctgatgggctgtggccttcaatgcggagtctgtcttcttctttccagctcgaatcaaaggggaaaaagatttctagtagctcctctgcagatcaggccaagacgagggatgcagcacccgctgataggaagaggagcccattgagaggtagagctacccctgagcaatcggagaatccacatgccaaggtgattgatcatcatcgctggcctgctatgatggggggcagggtgtctgcaagcacaatgtccaagagcatggatctcactgataagatcagtaggtctgctcttccatcagttccgtcacgtggtgtttcaccgaagcgaacaacagtgtcctctgctgcaaataccttgtcaagaagtattgatcttgctgataaaattgatcggctggtctcttcgtcaatgtcatcacaaggggaatcaccaagaaagtcaccttgtaatggtgcagatgatgtgtccaaaaaggttggtgttcgtaaagatctcaaactctcatccttggcaatatcaagaagggtgtcaccagtaacaacagatgataaaattgatcggctggtctcttcgtcaatgtcatcacaagggggatcaccaagaaagtcaccttgtaacggtgcagatgatgtgtccaaaaaggtcggtgttcgtaaagatctcaaactctcatccttggcaatatcaagaagggtgtcaccaataacaacagctgcatcagatggcactagaaccttatcaggaagcatggatcttactgaaaaagataacagtacactctcgccagtttcatcacccagcatttcaccaagtgcatcattatcaagtgtgtctaatgccgcatcacagactactacaaagtcatccgagagattaattggacctgtttccaacctgtcctcatcgagaggactttcacctagaagaacaacttctggtggcattgttgatttaatgaaaagcattgatttccctgaaaaagataggagaccagcttcatcaagagggttttcgccaaggaggagactcgtgtctgatggtgttaatgatattgggaaaaatatggattttgctgaaaaggatagcagagtagtcagctcatcaattccatctcgaggggtttctccaaggagaagacttgcctctgatggtgttgatactatgtgcaggagctcggagttttctggaaaggataacaggccatccacctcatcttccacatcacgtggaatgtctccccgaagaaggcttgcttctgatggcataagtgctgtaaccaaaggcatggactttggtgataatgctaacagaccatcaacctctaaaggagtgtcacgagggatttcaccaagacttcaattagcctctgatggtgttggcaatgtatcaaaaggcacagatcttgctgatggactggacaggccatcaacctcatatgcaacaccgcgagctgcagctcgaggggtttcaccaagaagacggctcgcctcagatggtgtcaaagtgacatcaaagagcattgatcttgttgaaaacagtaacaaacccttaacagtgtcagctgcaacacgaggggcttcaccaagaagacggctcacctctgatggtctagcatttatatcaaagagcacaaatattactgaaaaaagtatcagaccttcaacaccgtcaatgtcatcacgagggatgtcaccaagaagacggctggcctctgatggtatcaatgctgtattggacacagaatttgctgacaaaaattgtagaccatcttcctcatcagctgctttacgaggggtttctcccagaagcaggtctgcctctaatgccatatcaacaggcatgactaatgctgaaaatgacagcagaccatccacaacatcaagtccgtcatgtcagactctgcagagcagcaggcttgaatctaatggtgttaacatcctatcaaaagatatggaaatctcatcaactgtatctggttgcacttcagacagtagacttgatggcgctggtgctctagtaaaaagcatagatgtcactgagaaacttactgtgtcaactgaagatggtggtggtgaagacgatcctggaagaatagattctagtgacgtagttactagtgcagtttcatcatcccttgcatctcaagaggtatcatcaagacatgttactgatgacgttaagaatgcgtcagagagtgttggtgcaacgcaaaaaggtaacagaccattatcagtgaaggttccatctcgagtagcttctccaagaagacgacttgcatccgatggcattgatactatatctaaaagcatggattttgctgagaaagataagaaacccatgacagtgtcagttccatcacgtggaatgtcaccaagaagaacagcaagatctgacagtgctgatataatgtcaaaaagtatggattttcctttacaagtgttttctacaagaagagtactaggacctgatggtgctaatgccatgtcaagaagcatggatctaactgataaaattagacagaaaatatcttcaactatgcaatcatccagagtctcaccaaggaaaatgcctcttgcttataacagaataaaaggccctgaaattttatcaggtgatgctgagagccctggttctgctgatggaaatgaaagtcaagaggagaatgccagttcaagtccagatgcaccttcaaatagttcagaaaaatctacacctccaaagcagctagctaggagatcaccttcgccatcacatattttaatatgcccttcatcatcatccaatgcttcatcgacaccatcatttgtctccaggagattaccaagcccatcaaggactagaccttcaacacctgtctcaccatgtagttctgccagatctgattcagcctcttcaattcttagctacattggtgatgctacaagagggaagaagagcccaactcacacggaagatgcccatcagttgcgcctcctgcataataggaacttacaatggtgttttaccacttcttatgttgatgaactgctgtcaattcagaagataagtgctgagactatgttgtatagtgtatgggatgctaactcaaggatgtgtgactctatggttataaaaaggaactatgtacaacagctaaggcaagaggtcaaattgggaattgtcttgaaggagcaaatggattaccttgatcactgggcagcgctgcaaacagagcattcttcttctttatccagcgcaactgaagctcttaaagcaagcacattgcgtcttccagtttcaggaggagctaaggccgatgtacttactgttaagaatgctgtcagttcagcagttgacattatgcaagcaatggggtcatccgtttgccatttgctatcaaagttacaggcttcacactctctggttacagaactttcagctgttgctgctaaagaaagtaccttactcaacgagtacagagaactcttggcaacagcagcagcactacaggtccaagagtcgagcctaaggacacagctcatacaagaaacagagtgaacaggttaaggtcctgtatttctaactaggaagatagaagtaaacaccattcgttagtttcagtgactgctgcatatgtgtacctttgatgtcgttttgtttttcctttgctcttccttttcccccccacttattagctagctcatatttctttacatttctactcccccccccccccctgttcttttctgttcgaacaacttacatggaagataagggaagcaacatggaaatggaatcatggatttactccatgacaaagctgccaatgtggtcttttattgcatcctagaccaatgagccaaaaactgaaagctttgttgtaagctgtaaatctgagcagttatgtgtccttcagtgtaatgcctttggatgt

SEQ ID NO: 51786 - DNA, 554 bp, Zea Mays
cacggctctgagtcctagacgacctcgttcccctccaccgtctcgcctctctcttggttcctcgcggtgacgattgggagagcgcctcctctcctccctcactccctccgtgagctcctcgccggtggcgcgcgctgacacccgttgccacgtcttctccgctgacatgggctcaccaggagcggtcttctaggcgacctcgcgggtttggctatgtaacattcgcctcaactgacgatgcaaagaatgttctgggagccgtacattagaagtgaagatagctattccaaaggtaaaaacatataaaagtcgtacattttctttttgaatctgtcgtgttcttacttgttttgtaggtacacaatgtttgctaacatcattatccttggtcttcacctccatctacacctaccgaacatcagctaccttgccgacgcatgaacgagaagacgagtcagactttgtcgaaaccctcttcgctagtggaggtatcgaccatcactcttcactgtaacccgatggtgatcggcgtccgtgagcttccatgttattgt

SEQ ID NO: 51787 - DNA, 485 bp, Zea Mays
gtccttgcacaggggactcatatggaatagagatttttgccctggtggcataatttttggaaactaaattgtgttcggtgtgagagctatgtgcttagctttctcctgagaggtaaattggactttggcgtgagcccaaaatggaggcacttcagaacatgacactgtatcgcggagcggtcttctaggcgacctcgcgggtttggctatgtaacattcgcctcaactgacgatgcaaagaatgttctgggagccgtacattagaagtgaagatagctattccaaaggtacacaatgtttgctaacatcattatccttggtcttcacctccatctacacctaccgaacatcagctaccttgccgacgcatgaacgagaagacgagtcagactttgtcgaaaccctcttcgctagtggaggtatcgaccatcactcttcactgtaacccgatggtgatcggcgtccgtgagcttccatgttattgt

SEQ ID NO: 51788 - DNA, 2066 bp, Zea Mays
ccgcagccgcagccagaaagggggagcgccgcgccgcgcgactgcgagccatttatggccttggtcatctcatccctacggccacgtaccaccagtgcagcagcaggcacaggcaggcgggggtgacggctcggcgcgcgcgcccttctccttctcaatctcggctcctcctccgcctcgcgcactctctctccttctgcggctctgctgccgactgcacgagacgcacgagctgacctgccaaggccggagcgcacactattaatggcggcgtagcgtagctcaactgccccctccttccctctccctcccatccctccccgcgccgcagagccaccagccacagcgagcgtaaatgatgccaccaccccaccccgcacagggcacaccaccaccacctcctcgcccgatccaatgccccattattaccgcgacgaccaccccacagctagctagccagtagccaccactaccactagcaatacctgagcgcgcggccctccgctcgctctccaccctccaggccggcagccatccggccggccacgataaatacgcagcagcagctcgcgtactgcgtacacaccgtcgcgagctagctagctgctagccacaccacacctttctctggctcaacggaggtcctggatgctcgtcggtggcgtatggagcgtcggaggagatcggcccgttccggatcaaaccaaacgggacaggcctgttcctcaacaagtactcatggaacagagaggcaaaccttctgttcctcgagtcgcccgcgggagtcggcttctcctacgccaacaccacctcggacctcaagacgtcgggcgacgagaggaccgctcaagacgcgctgcagttcctggtcagctggatgtcacggttcccgcagtaccggcaccgagatttctacatcgccggagaaagctacgcgggccactacgtcccccagttggcaaggaagatcgtcgagtacaacgaggcctcgcctcaccccttcatcaacctcaagggaatccttgtgggcaacgcggtgaccgacaactactacgacaacatcggcacggtcacctactggtggacgcacgccatgatctccgaccgcacctacaaggccatcctcaggtggtgcaacttcagcagcagcagcatctcgcgcccctgcaaccgcgccatgagctacgccatgaaccacgagttcggggacatcgaccagtacagcatctacacgccgtcgtgcgccgccgcggccagggccaacgccaccgtgctcaggttcaagaacaccctcgtccgccgccgccgctcctccggctacgacccctgcacggagacctacgccgagaggtactacaacaggatggacgtgcagagggcgatgcacgccaacaccacggggatcccctacagatggactgcctgcagtgatgtgctgatcaagacatggcaagattcagagttctccatgctgccgacgtacaagaagctgatgaaagcaggattgaggatatgggtgttcagcggcgacacagattcagtcgtcccggtgaccgcgacgaggttcgccatcagtcatcttggtctgaagatcaagacccgctggtatccatggtactcagctggacagggcatgaggtgccgttgttccagcccaggagggcgttcaggatgttccggtcgttcttggccggggagccattgcccaagtcctgaaggttcctgacatgtgactgaggccatgcatgcctacctgatcatgtctagctacggtcctgacgggtgagaaggtgacgttccccaggtagagaatgacttgttgataggcgcgcagttcatagctgaggagtgattgattggtctcgggagaaggatgtagagaataataaggatggctatgttatgccatggaaacccatgagcattgcaatgattagcgaataattttcagtgatctcactctcaagtgcttatgttatgttatgttatgccatggaaacccatgagcaatgcgacgaataaatttgaaggatctcactcttgaaccaaatatgtttcatcgcaac

SEQ ID NO: 51789 - DNA, 2448 bp, Zea Mays
ccgcagccgcagccagaaagggggagcgccgcgccgcgcgactgcgagccatttatggccttggtcatctcatccctacggccacgtaccaccagtgcagcagcaggcacaggcaggcgggggtgacggctcggcgcgcgcgcccttctccttctcaatctcggctcctcctccgcctcgcgcactctctctccttctgcggctctgctgccgactgcacgagacgcacgagctgacctgccaaggccggagcgcacactattaatggcggcgtagcgtagctcaactgccccctccttccctctccctcccatccctccccgcgccgcagagccaccagccacagcgagcgtaaatgatgccaccaccccaccccgcacagggcacaccaccaccacctcctcgcccgatccaatgccccattattaccgcgacgaccaccccacagctagctagccagtagccaccactaccactagcaatacctgagcgcgcggccctccgctcgctctccaccctccaggccggcagccatccggccggccacgataaatacgcagcagcagctcgcgtactgcgtacacaccgtcgcgagctagctagctgctagccacaccacacctttctctgcccacgcacaaaagccatggcgacgacgcggcctcgcggtgagggtggggcggcgagcggcgcgctggtcatggcgatcgtcgtcgtcgtcgccatcgtcctgctgctgctgccatatggagccggcgcggaggagtgcgaggacggcatgagcacccgggcgcgcgcgggcgaccgcgtggaggcgctgccggggcagccggcggtggcgttcgcgcagtactccgggtacgtggcggtggaccgggaccgcggccgcgcgctcttctactggctgaccgaggccgtcggcgacgacgcggccgccaagcccctcgtgctctggctcaacggaggtcctggatgctcgtcggtggcgtatggagcgtcggaggagatcggcccgttccggatcaaaccaaacgggacaggcctgttcctcaacaagtactcatggaacagagaggcaaaccttctgttcctcgagtcgcccgcgggagtcggcttctcctacgccaacaccacctcggacctcaagacgtcgggcgacgagaggaccgctcaagacgcgctgcagttcctggtcagctggatgtcacggttcccgcagtaccggcaccgagatttctacatcgccggagaaagctacgcgggccactacgtcccccagttggcaaggaagatcgtcgagtacaacgaggcctcgcctcaccccttcatcaacctcaagggaatccttgtgggcaacgcggtgaccgacaactactacgacaacatcggcacggtcacctactggtggacgcacgccatgatctccgaccgcacctacaaggccatcctcaggtggtgcaacttcagcagcagcagcatctcgcgcccctgcaaccgcgccatgagctacgccatgaaccacgagttcggggacatcgaccagtacagcatctacacgccgtcgtgcgccgccgcggccagggccaacgccaccgtgctcaggttcaagaacaccctcgtccgccgccgccgctcctccggctacgacccctgcacggagacctacgccgagaggtactacaacaggatggacgtgcagagggcgatgcacgccaacaccacggggatcccctacagatggactgcctgcagtgatgtgctgatcaagacatggcaagattcagagttctccatgctgccgacgtacaagaagctgatgaaagcaggattgaggatatgggtgttcagcggcgacacagattcagtcgtcccggtgaccgcgacgaggttcgccatcagtcatcttggtctgaagatcaagacccgctggtatccatggtactcagctggacaggtaggaggatggtctgaggtgtacgaagggctcacgtttgcgtcggtgagaggcgcagggcatgaggtgccgttgttccagcccaggagggcgttcaggatgttccggtcgttcttggccggggagccattgcccaagtcctgaaggttcctgacatgtgactgaggccatgcatgcctacctgatcatgtctagctacggtcctgacgggtgagaaggtgacgttccccaggtagagaatgacttgttgataggcgcgcagttcatagctgaggagtgattgattggtctcgggagaaggatgtagagaataataaggatggctatgttatgccatggaaacccatgagcattgcaatgattagcgaataattttcagtgatctcactctcaagtgcttatgttatgttatgttatgccatggaaacccatgagcaatgcgacgaataaatttgaaggatctcactcttgaaccaaatatgtttcatcgcaac

SEQ ID NO: 51790 - DNA, 1508 bp, Zea Mays
ctcggtgcctgcctcgggaaacgtggtcctggatgctcgtcggtggcgtatggagcgtcggaggagatcggcccgttccggatcaaaccaaacgggacaggcctgttcctcaacaagtactcatggaacagagaggcaaaccttctgttcctcgagtcgcccgcgggagtcggcttctcctacgccaacaccacctcggacctcaagacgtcgggcgacgagaggaccgctcaagacgcgctgcagttcctggtcagctggatgtcacggttcccgcagtaccggcaccgagatttctacatcgccggagaaagctacgcgggccactacgtcccccagttggcaaggaagatcgtcgagtacaacgaggcctcgcctcaccccttcatcaacctcaagggaatccttgtgggcaacgcggtgaccgacaactactacgacaacatcggcacggtcacctactggtggacgcacgccatgatctccgaccgcacctacaaggccatcctcaggtggtgcaacttcagcagcagcagcatctcgcgcccctgcaaccgcgccatgagctacgccatgaaccacgagttcggggacatcgaccagtacagcatctacacgccgtcgtgcgccgccgcggccagggccaacgccaccgtgctcaggttcaagaacaccctcgtccgccgccgccgctcctccggctacgacccctgcacggagacctacgccgagaggtactacaacaggatggacgtgcagagggcgatgcacgccaacaccacggggatcccctacagatggactgcctgcagtgatgtgctgatcaagacatggcaagattcagagttctccatgctgccgacgtacaagaagctgatgaaagcaggattgaggatatgggtgttcagcggcgacacagattcagtcgtcccggtgaccgcgacgaggttcgccatcagtcatcttggtctgaagatcaagacccgctggtatccatggtactcagctggacaggtaggaggatggtctgaggtgtacgaagggctcacgtttgcgtcggtgagaggcgcagggcatgaggtgccgttgttccagcccaggagggcgttcaggatgttccggtcgttcttggccggggagccattgcccaagtcctgaaggttcctgacatgtgactgaggccatgcatgcctacctgatcatgtctagctacggtcctgacgggtgagaaggtgacgttccccaggtagagaatgacttgttgataggcgcgcagttcatagctgaggagtgattgattggtctcgggagaaggatgtagagaataataaggatggctatgttatgccatggaaacccatgagcattgcaatgattagcgaataattttcagtgatctcactctcaagtgcttatgttatgttatgttatgccatggaaacccatgagcaatgcgacgaataaatttgaaggatctcactcttgaaccaaatatgtttcatcgcaac

SEQ ID NO: 51791 - DNA, 1511 bp, Zea Mays
ccctttccctcttctcttccaacgccactcagttctcttccctctctgcgcaccaagaagaggtgtcttgccagaagggagccgcctcgccgcagccgaaggccacccatgcagccgagcggccgcgaaatgcagggcggaggcggggcccaggacgacttcttcgaccagatgctgtccacgctgccggccgcgtggtccgaccttggctccggcaagtcgccctgggagctccccgcggcggcgggggccgtgaccgaggacaccgccgcgctcgacgagcctgcgctcctcgcgtcgcgcctccgccaccaccagatcggcggcggggagaagcccctcatgctccacctcagcgacctgcacggcctcggcgccggcgccggcgacgacgcggggttcatgccgctaccgctgttcacccagcacctcgccagggacgacgtggatgccgccttcaagtcccccaatgccgccggaggcgaccgggagctgtacaacgggttcggagccgctgggaatatgcacaccgccgccgtgcatcagccgccgccgttcgggcagggcgggtcaatgccggcggcgccgcagagcttcgggggtggcgggccggcgccggccgccggagcggcgtcgggcggaggagcgccgccgcggcagcagcggcagcgagccaagagggggcaagccactgaccctcacagcatcgccgaacgtctacggagggagaggatagcggagaggatgaaggcgttgcaggagctggtccctaacgccaacaagaccgacaaggcatcgatgcttgacgagatcattgactacgtgaagttcctccagctccaagtcaaggttctcagcatgagccggctaggcggagcgacagccgtcggcactctagttgccggcatcgcatcagagggcaacgggagcggagatggcacgagcgacagcggaaaagggaacgccgccaacggcgagaacggcggtggtggcagcctgcaggtgacggagcagcaggtggccaggttgatggaggaggacatgggcaccgccatgcagtacctgcagggcaaggggctctgcctgatgcccatctctctcgcctccgccatctcctccgccacgtggccgtccctcctatcccgcccctccatgggcgcaatgggagacgctagaggtcccctgcacgacggcggcagccctgcgtcgccgccactggtgaattgtggtgatgattccagcaccgtcaaggatgccggtgccggcggtaagcggtgaaggcaatgatcttgtcttgagaggttgcgtgtgaaagatcaacatgtccaagtgaaaaatgaaatgaattgggctaaaagttctggcaacaattaaatcttatcaaattgtatatttcactctttattattcaataggctacttcacttcttatgtctaataatattttctatcttatgtacaaaagttttctatcttacgtttcaacctaattctaagaatataaagttaag

SEQ ID NO: 51792 - DNA, 1717 bp, Zea Mays
ctcagttctcttccctctctgcgcaccaagaagaggtgtcttgccagaagggagccgcctcgccgcagccgaaggccacccatgcagccgagcggccgcgaaatgcagggcggaggcggggcccaggacgacttcttcgaccagatgctgtccacgctgccggccgcgtggtccgaccttggctccggcaagtcgccctgggagctccccgcggcggcgggggccgtgaccgaggacaccgccgcgctcgacgagcctgcgctcctcgcgtcgcgcctccgccaccaccagatcggcggcggggagaagcccctcatgctccacctcagcgacctgcacggcctcggcgccggcgccggcgacgacgcggggttcatgccgctaccgctgttcacccagcacctcgccagggacgacgtggatgccgccttcaagtcccccaatgccgccggaggcgaccgggagctgtacaacgggttcggagccgctgggaatatgcacaccgccgccgtgcatcagccgccgccgttcgggcagggcgggtcaatgccggcggcgccgcagagcttcgggggtggcgggccggcgccggccgccggagcggcgtcgggcggaggagcgccgccgcggcagcagcggcagcgagccaagagggggcaagccactgaccctcacagcatcgccgaacgtgtacgctactctcccattctttaatgcctctgcatcactgtgtacaatacatacatgtatgctctcctttgtcctgcgctggtgctcgctcttgtacctggagctccacaactcttgggattgccagccacagacctcaatcaattccacagctccaatttgttgaattgcaaacttcggccgtgcacaaaatcgaattgtggttcagcgttcagatgcagcagagatgagctctacggagggagaggatagcggagaggatgaaggcgttgcaggagctggtccctaacgccaacaagaccgacaaggcatcgatgcttgacgagatcattgactacgtgaagttcctccagctccaagtcaaggttctcagcatgagccggctaggcggagcgacagccgtcggcactctagttgccggcatcgcatcagagggcaacgggagcggagatggcacgagcgacagcggaaaagggaacgccgccaacggcgagaacggcggtggtggcagcctgcaggtgacggagcagcaggtggccaggttgatggaggaggacatgggcaccgccatgcagtacctgcagggcaaggggctctgcctgatgcccatctctctcgcctccgccatctcctccgccacgtggccgtccctcctatcccgcccctccatgggcgcaatgggagacgctagaggtcccctgcacgacggcggcagccctgcgtcgccgccactggtgaattgtggtgatgattccagcaccgtcaaggatgccggtgccggcggtaagcggtgaaggcaatgatcttgtcttgagaggttgcgtgtgaaagatcaacatgtccaagtgaaaaatgaaatgaattgggctaaaagttctggcaacaattaaatcttatcaaattgtatatttcactctttattattcaataggctacttcacttcttatgtctaataatattttctatcttatgtacaaaagttttctatcttacgtttcaacctaattctaagaatataaagttaag

SEQ ID NO: 51793 - DNA, 1347 bp, Zea Mays
cagttctcttccctctctgcgcaccaagaagaggtgtcttgccagaagggagccgcctcgccgcagccgaaggccacccatgcagccgagcggccgcgaaatgcagggcggaggcggggcccaggacgacttcttcgaccagatgctgtccacgctgccggccgcgtggtccgaccttggctccggcaagtcgccctgggagctccccgcggcggcgggggccgtgaccgaggacaccgccgcgctcgacgagcctgcgctcctcgcgtcgcgcctccgccaccaccagatcggcggcggggagaagcccctcatgctccacctcagcgacctgcacggcctcggcgccggcgccggcgacgacgcggggttcatgccgctaccgctgttcacccagcacctcgccagggacgacgtggatgccgccttcaagtcccccaatgccgccggaggcgaccgggagctgtacaacgggttcggagccgctgggaatatgcacaccgccgccgtgcatcagccgccgccgttcgggcagggcgggtcaatgccggcggcgccgcagagcttcgggggtggcgggccggcgccggccgccggagcggcgtcgggcggaggagcgccgccgcggcagcagcggcagcgagccaagagggggcaagccactgaccctcacagcatcgccgaacgtctacggagggagaggatagcggagaggatgaaggcgttgcaggagctggtccctaacgccaacaagggcaacgggagcggagatggcacgagcgacagcggaaaagggaacgccgccaacggcgagaacggcggtggtggcagcctgcaggtgacggagcagcaggtggccaggttgatggaggaggacatgggcaccgccatgcagtacctgcagggcaaggggctctgcctgatgcccatctctctcgcctccgccatctcctccgccacgtggccgtccctcctatcccgcccctccatgggcgcaatgggagacgctagaggtcccctgcacgacggcggcagccctgcgtcgccgccactggtgaattgtggtgatgattccagcaccgtcaaggatgccggtgccggcggtaagcggtgaaggcaatgatcttgtcttgagaggttgcgtgtgaaagatcaacatgtccaagtgaaaaatgaaatgaattgggctaaaagttctggcaacaattaaatcttatcaaattgtatatttcactctttattattcaataggctacttcacttcttatgtctaataatattttctatcttatgtacaaaagttttctatcttacgtttcaacctaattctaagaatataaagttaag

SEQ ID NO: 51794 - DNA, 803 bp, Zea Mays
cccacgaacaccacgtgccacggctgtcccggaagcgcgcatccgatgtcctctttggcacaacttgcgctcactaccgacaaggcatcgatgcttgacgagatcattgactacgtgaagttcctccagctccaagtcaaggttctcagcatgagccggctaggcggagcgacagccgtcggcactctagttgccggcatcgcatcagagggcaacgggagcggagatggcacgagcgacagcggaaaagggaacgccgccaacggcgagaacggcggtggtggcagcctgcaggtgacggagcagcaggtggccaggttgatggaggaggacatgggcaccgccatgcagtacctgcagggcaaggggctctgcctgatgcccatctctctcgcctccgccatctcctccgccacgtggccgtccctcctatcccgcccctccatgggcgcaatgggagacgctagaggtcccctgcacgacggcggcagccctgcgtcgccgccactggtgaattgtggtgatgattccagcaccgtcaaggatgccggtgccggcggtaagcggtgaaggcaatgatcttgtcttgagaggttgcgtgtgaaagatcaacatgtccaagtgaaaaatgaaatgaattgggctaaaagttctggcaacaattaaatcttatcaaattgtatatttcactctttattattcaataggctacttcacttcttatgtctaataatattttctatcttatgtacaaaagttttctatcttacgtttcaacctaattctaagaatataaagttaag

SEQ ID NO: 51795 - DNA, 1885 bp, Zea Mays
aatttagccattcaagaattgttcggttacattttgcctgtttgctgtttttttcgtcggttcgcctcgtcttctccgcctggcccgagactcacactcaattcggtcgttttctgcattaacggagtcaggcccaggcctaacctcagtacatcagagcagccgaacacgcccgcggcaaccgccgccattctaccccaggtcggacggacccttgccggagacgagcacacgccacagcagagcagcgcgaagcgagagatccaatggcggcggcggaggggcagtgggtgctcatggcaacggggcggacgccgaccaacattgcggtgatcaagtactgggggaagcgggacgaggcgctcatcctccccatcaacgacagcatcagcgtaacgctcgaccccgaccatctctccgccaccaccactgtcgccgtcagcccctcattcccttccgaccgcatgtggctcaatggcaaggagatctcgctattaggaggaaggtttcagagctgcctcagagaaatcagaaagcgtgctcgtgactttgaggacaaggagaagggcgtcaagatcaagaaagaggactgggacaagttgcatgttcacatagcctcgtacaacaacttccccactgctgctggtttggcctcttcagctgctggccttgcctgtttcgttttcacccttggaaagctgatgaatgcgaaagaagattatggagaactttcttcaatagcaaggcagggatctgggagtgcatgccgcagtatatatggtggttttgtgaaatggtgcatgggagaaaaagatgatggaagtgacagtattgccgtgcagcttgctgacgaaacacactggaatgatcttgtaattattattgcagtggtcagttcaaagcagaaggaaaccagtagcaccagtgggatgcgagatagtgttgaaacaagtcctctcttgcagtacagggcccagacagtggtgccaggtcgggtgttgaaaatggaagaagctatcaagaaccgtgactttgaatcctttgccaaattaacttgtgcggatagcaaccagtttcatgctgtatgcttagacacgagccctcctatcttctatatgaatgacacgtcacaccgaataattagccttgtggaaaaatggaaccactcagaaggaaccccacaggtcgcttacaccttcgatgctgggccaaacgctgttctaatcgcacaaaaccgtaaaactgcagcacatctcctccagaagctcctatactatttccctccacaggataatgatttgagcagctatctggttggcgataaatcgattctaggtgtcgccggattgcattccatgaaagacgtcgaggctcttccagcacctccagagacgaagataccggatcagaaattcaagggcgatgttagctacttcatctgcagcaggcttggcgctggtccaaaggttgtttctgacgaaggtcaagcattgatcgattcagtcaccggacttccaaaaggcgtgtagttctagatttaggttggaataatggtttaagctggggattaaagacaatggtatcatacaagcaacctgggccgggaagatacattaggctcgtgtcacgttggtttcgtgctgattgacttgacggtgtattggtcatgtattatgcatttgcgctggtgttcgttgctgtccaataaagatagaacacgttctcgccttttgtttttctccctcgcctagtatgtggctcaaatatttgtttcactattttattgagcacttcagctgagacaaaagcggagaataactttgtatggctgcttgtcacagtggatgaaaaaatctcgaccccccaaattccattttcacgagta

SEQ ID NO: 51796 - DNA, 1802 bp, Zea Mays
attcaagaattgttcggttacattttgcctgtttgctgtttttttcgtcggttcgcctcgtcttctccgcctggcccgagactcacactcaattcggtcgttttctgcattaacggagtcaggcccaggcctaacctcagtacatcagagcagccgaacacgcccgcggcaaccgccgccattctaccccaggtcggacggacccttgccggagacgagcacacgccacagcaggaattatcgggcgtagagcagcgcgaagcgagagatccaatggcggcggcggaggggcagtgggtgctcatggcaacggggcggacgccgaccaacattgcggtgatcaagtactgggggaagcgggacgaggcgctcatcctccccatcaacgacagcatcagcgagatctcgctattaggaggaaggtttcagagctgcctcagagaaatcagaaagcgtgctcgtgactttgaggacaaggagaagggcgtcaagatcaagaaagaggactgggacaagttgcatgttcacatagcctcgtacaacaacttccccactgctgctggtttggcctcttcagctgctggccttgcctgtttcgttttcacccttggaaagctgatgaatgcgaaagaagattatggagaactttcttcaatagcaaggcagggatctgggagtgcatgccgcagtatatatggtggttttgtgaaatggtgcatgggagaaaaagatgatggaagtgacagtattgccgtgcagcttgctgacgaaacacactggaatgatcttgtaattattattgcagtggtcagttcaaagcagaaggaaaccagtagcaccagtgggatgcgagatagtgttgaaacaagtcctctcttgcagtacagggcccagacagtggtgccaggtcgggtgttgaaaatggaagaagctatcaagaaccgtgactttgaatcctttgccaaattaacttgtgcggatagcaaccagtttcatgctgtatgcttagacacgagccctcctatcttctatatgaatgacacgtcacaccgaataattagccttgtggaaaaatggaaccactcagaaggaaccccacaggtcgcttacaccttcgatgctgggccaaacgctgttctaatcgcacaaaaccgtaaaactgcagcacatctcctccagaagctcctatactatttccctccacaggataatgatttgagcagctatctggttggcgataaatcgattctaggtgtcgccggattgcattccatgaaagacgtcgaggctcttccagcacctccagagacgaagataccggatcagaaattcaagggcgatgttagctacttcatctgcagcaggcttggcgctggtccaaaggttgtttctgacgaaggtcaagcattgatcgattcagtcaccggacttccaaaaggcgtgtagttctagatttaggttggaataatggtttaagctggggattaaagacaatggtatcatacaagcaacctgggccgggaagatacattaggctcgtgtcacgttggtttcgtgctgattgacttgacggtgtattggtcatgtattatgcatttgcgctggtgttcgttgctgtccaataaagatagaacacgttctcgccttttgtttttctccctcgcctagtatgtggctcaaatatttgtttcactattttattgagcacttcagctgagacaaaagcggagaataactttgtatggctgcttgtcacagtggatgaaaaaatctcgaccccccaaattccattttcacgagta

SEQ ID NO: 51797 - DNA, 1871 bp, Zea Mays
attcaagaattgttcggttacattttgcctgtttgctgtttttttcgtcggttcgcctcgtcttctccgcctggcccgagactcacactcaattcggtcgttttctgcattaacggagtcaggcccaggcctaacctcagtacatcagagcagccgaacacgcccgcggcaaccgccgccattctaccccaggtcggacggacccttgccggagacgagcacacgccacagcagcgcgaagcgagagatccaatggcggcggcggaggggcagtgggtgctcatggcaacggggcggacgccgaccaacattgcggtgatcaagtactgggggaagcgggacgaggcgctcatcctccccatcaacgacagcatcagcgtaacgctcgaccccgaccatctctccgccaccaccactgtcgccgtcagcccctcattcccttccgaccgcatgtggctcaatggcaaggagatctcgctattaggaggaaggtttcagagctgcctcagagaaatcagaaagcgtgctcgtgactttgaggacaaggagaagggcgtcaagatcaagaaagaggactgggacaagttgcatgttcacatagcctcgtacaacaacttccccactgctgctggtttggcctcttcagctgctggccttgcctgtttcgttttcacccttggaaagctgatgaatgcgaaagaagattatggagaactttcttcaatagcaaggcagggatctgggagtgcatgccgcagtatatatggtggttttgtgaaatggtgcatgggagaaaaagatgatggaagtgacagtattgccgtgcagcttgctgacgaaacacactggaatgatcttgtaattattattgcagtggtcagttcaaagcagaaggaaaccagtagcaccagtgggatgcgagatagtgttgaaacaagtcctctcttgcagtacagggcccagacagtggtgccaggtcgggtgttgaaaatggaagaagctatcaagaaccgtgactttgaatcctttgccaaattaacttgtgcggatagcaaccagtttcatgctgtatgcttagacacgagccctcctatcttctatatgaatgacacgtcacaccgaataattagccttgtggaaaaatggaaccactcagaaggaaccccacaggtcgcttacaccttcgatgctgggccaaacgctgttctaatcgcacaaaaccgtaaaactgcagcacatctcctccagaagctcctatactatttccctccacaggataatgatttgagcagctatctggttggcgataaatcgattctaggtgtcgccggattgcattccatgaaagacgtcgaggctcttccagcacctccagagacgaagataccggatcagaaattcaagggcgatgttagctacttcatctgcagcaggcttggcgctggtccaaaggttgtttctgacgaaggtcaagcattgatcgattcagtcaccggacttccaaaaggcgtgtagttctagatttaggttggaataatggtttaagctggggattaaagacaatggtatcatacaagcaacctgggccgggaagatacattaggctcgtgtcacgttggtttcgtgctgattgacttgacggtgtattggtcatgtattatgcatttgcgctggtgttcgttgctgtccaataaagatagaacacgttctcgccttttgtttttctccctcgcctagtatgtggctcaaatatttgtttcactattttattgagcacttcagctgagacaaaagcggagaataactttgtatggctgcttgtcacagtggatgaaaaaatctcgaccccccaaattccattttcacgagta

SEQ ID NO: 51798 - DNA, 1872 bp, Zea Mays
attcaagaattgttcggttacattttgcctgtttgctgtttttttcgtcggttcgcctcgtcttctccgcctggcccgagactcacactcaattcggtcgttttctgcattaacggagtcaggcccaggcctaacctcagtacatcagagcagccgaacacgcccgcggcaaccgccgccattctaccccaggtcggacggacccttgccggagacgagcacacgccacagcagagcagcgcgaagcgagagatccaatggcggcggcggaggggcagtgggtgctcatggcaacggggcggacgccgaccaacattgcggtgatcaagtactgggggaagcgggacgaggcgctcatcctccccatcaacgacagcatcagcgtaacgctcgaccccgaccatctctccgccaccaccactgtcgccgtcagcccctcattcccttccgaccgcatgtggctcaatggcaaggagatctcgctattaggaggaaggtttcagagctgcctcagagaaatcagaaagcgtgctcgtgactttgaggacaaggagaagggcgtcaagatcaagaaagaggactgggacaagttgcatgttcacatagcctcgtacaacaacttccccactgctgctggtttggcctcttcagctgctggccttgcctgtttcgttttcacccttggaaagctgatgaatgcgaaagaagattatggagaactttcttcaatagcaagggatctgggagtgcatgccgcagtatatatggtggttttgtgaaatggtgcatgggagaaaaagatgatggaagtgacagtattgccgtgcagcttgctgacgaaacacactggaatgatcttgtaattattattgcagtggtcagttcaaagcagaaggaaaccagtagcaccagtgggatgcgagatagtgttgaaacaagtcctctcttgcagtacagggcccagacagtggtgccaggtcgggtgttgaaaatggaagaagctatcaagaaccgtgactttgaatcctttgccaaattaacttgtgcggatagcaaccagtttcatgctgtatgcttagacacgagccctcctatcttctatatgaatgacacgtcacaccgaataattagccttgtggaaaaatggaaccactcagaaggaaccccacaggtcgcttacaccttcgatgctgggccaaacgctgttctaatcgcacaaaaccgtaaaactgcagcacatctcctccagaagctcctatactatttccctccacaggataatgatttgagcagctatctggttggcgataaatcgattctaggtgtcgccggattgcattccatgaaagacgtcgaggctcttccagcacctccagagacgaagataccggatcagaaattcaagggcgatgttagctacttcatctgcagcaggcttggcgctggtccaaaggttgtttctgacgaaggtcaagcattgatcgattcagtcaccggacttccaaaaggcgtgtagttctagatttaggttggaataatggtttaagctggggattaaagacaatggtatcatacaagcaacctgggccgggaagatacattaggctcgtgtcacgttggtttcgtgctgattgacttgacggtgtattggtcatgtattatgcatttgcgctggtgttcgttgctgtccaataaagatagaacacgttctcgccttttgtttttctccctcgcctagtatgtggctcaaatatttgtttcactattttattgagcacttcagctgagacaaaagcggagaataactttgtatggctgcttgtcacagtggatgaaaaaatctcgaccccccaaattccattttcacgagta

SEQ ID NO: 51799 - DNA, 1434 bp, Zea Mays
aaaaaacactacacactggtttggtggacaggagatctcgctattaggaggaaggtttcagagctgcctcagagaaatcagaaagcgtgctcgtgactttgaggacaaggagaagggcgtcaagatcaagaaagaggactgggacaagttgcatgttcacatagcctcgtacaacaacttccccactgctgctggtttggcctcttcagctgctggccttgcctgtttcgttttcacccttggaaagctgatgaatgcgaaagaagattatggagaactttcttcaatagcaaggcagggatctgggagtgcatgccgcagtatatatggtggttttgtgaaatggtgcatgggagaaaaagatgatggaagtgacagtattgccgtgcagcttgctgacgaaacacactggaatgatcttgtaattattattgcagtggtcagttcaaagcagaaggaaaccagtagcaccagtgggatgcgagatagtgttgaaacaagtcctctcttgcagtacagggcccagacagtggtgccaggtcgggtgttgaaaatggaagaagctatcaagaaccgtgactttgaatcctttgccaaattaacttgtgcggatagcaaccagtttcatgctgtatgcttagacacgagccctcctatcttctatatgaatgacacgtcacaccgaataattagccttgtggaaaaatggaaccactcagaaggaaccccacaggtcgcttacaccttcgatgctgggccaaacgctgttctaatcgcacaaaaccgtaaaactgcagcacatctcctccagaagctcctatactatttccctccacaggataatgatttgagcagctatctggttggcgataaatcgattctaggtgtcgccggattgcattccatgaaagacgtcgaggctcttccagcacctccagagacgaagataccggatcagaaattcaagggcgatgttagctacttcatctgcagcaggcttggcgctggtccaaaggttgtttctgacgaaggtcaagcattgatcgattcagtcaccggacttccaaaaggcgtgtagttctagatttaggttggaataatggtttaagctggggattaaagacaatggtatcatacaagcaacctgggccgggaagatacattaggctcgtgtcacgttggtttcgtgctgattgacttgacggtgtattggtcatgtattatgcatttgcgctggtgttcgttgctgtccaataaagatagaacacgttctcgccttttgtttttctccctcgcctagtatgtggctcaaatatttgtttcactattttattgagcacttcagctgagacaaaagcggagaataactttgtatggctgcttgtcacagtggatgaaaaaatctcgaccccccaaattccattttcacgagta

SEQ ID NO: 51800 - DNA, 1799 bp, Zea Mays
gcagagctccgcgccgtcccctgccgtcattcagtgtttggaggagttaaccaggcgagaactagaactggctgccgcgtcggcatcacgcggaagaactttggccgtgtcatgatggcccttgcagtggatgtttctcgttttgaaggagtgccaatggctcctccagacccaattcttggggtttctgaggcctttaaagcagataaaagcgagctgaagctcaatcttggtgttggtgcctataggacagaagagctgcagccctacgtgctcaatgtagtcaagaaggctgaaaatcttatgttggagaaaggagaaaacaaagaggttgctacacttcagtctctctcgggcactggatcactgcgtctcgctgcagcattcatacaaagatactttcctgaagctaaagtgctgatatcgtcgcctacctggggtaaccacaagaatatcttcaatgatgctagggtaccttggtcagagtaccggtattatgaccccaagactgttgggttggattttgagggaatgatagctgacattgaggctgctcctgaaggttcttttgttctgctacatggttgtgctcacaacccaactggaatagacccaactcctgaacagtgggagaaaattgcagatgtcattcaagagaaaaagcatatgccattctttgatgttgcatatcagggttttgccagtggaagccttgatgaagatgcattttctgtcaggctttttgttaagcgtggcatggaagtgtttgttgcacaatcttacagcaagaaccttggtttatattctgaaagggttggtgcaataaatgtcgtgtgctcagcaccagaagttgcagatagggtaaagagccagctgaaacgattggcacgtcccatgtactcgaacccccctattcacggtgccaagatagttgccaacgttgttggtgatccaaccatgtttggtgaatggaaacaagagatggagctaatggctggacggatcaagaatgtaagacagaagctctacgacagtttgtctgccaaggacaagagcggcaaggactggtctttcattctgaggcagattggcatgttctcctacaccggcttgaacaaagcgcagagtgacaacatgacggataaatggcatatttacatgaccaaggatgggcggatctcgttagctgggctgtccctggctaagtgtgattatcttgccgacgccatcatcgattccttccataatgtgaactaggctgaggtacgatagttgagggtcaagctattgatgtttagttccgtggacgctaggctgggatttttgggtccttccagctatacagctcttccgttgtgctccatctggtgtaacttggataaataaaaattttgtcgctgaactaaaactcgtgtgcttttttacctgtaactgtaaggtcagcgcgtggctacagacttgtaaacacttgaatggaaaaaaaacaatgacattaccggatattaatggccaactggccggtatgcgcttaagaagtctgatcttggagatctcgattacttcgactatgtttgcttttttctttcttttcttttggtgtaaactgacaggaaccgcaaatatgattcaaggcacaggcgcagtgcttgcacgtggctggaggctgtagcaggaggatatccttcaagccttcaggtggtagtggtactggcagtcgtagtcgtgacagcctcacatggaactactgattggaaactgatcgagacctctctagattcctcttttagggctagtttaag

SEQ ID NO: 51801 - DNA, 1886 bp, Zea Mays
gagctccgcgccgtcccctgccgtcattcagtgtttggaggagttaaccaggcgagaactagaactggctgccgcgtcggcatcacgcggaagaactttggccgtgtcatgatggcccttgcagtggatgtttctcgttttgaaggagtgccaatggctcctccagacccaattcttggggtttctgaggcctttaaagcagataaaagcgagctgaagctcaatcttggtgttggtgcctataggacagaagagctgcagccctacgtgctcaatgtagtcaagaaggctgaaaatcttatgttggagaaaggagaaaacaaagagtatcttcccattgaaggtttagccgcgtttaacaaagcaacagcagagctattgcttggagctgataaccctgttattaatcaaggactggttgctacacttcagtctctctcgggcactggatcactgcgtctcgctgcagcattcatacaaagatactttcctgaagctaaagtgctgatatcgtcgcctacctggggtaaccacaagaatatcttcaatgatgctagggtaccttggtcagagtaccggtattatgaccccaagactgttgggttggattttgagggaatgatagctgacattgaggctgctcctgaaggttcttttgttctgctacatggttgtgctcacaacccaactggaatagacccaactcctgaacagtgggagaaaattgcagatgtcattcaagagaaaaagcatatgccattctttgatgttgcatatcagggttttgccagtggaagccttgatgaagatgcattttctgtcaggctttttgttaagcgtggcatggaagtgtttgttgcacaatcttacagcaagaaccttggtttatattctgaaagggttggtgcaataaatgtcgtgtgctcagcaccagaagttgcagatagggtaaagagccagctgaaacgattggcacgtcccatgtactcgaacccccctattcacggtgccaagatagttgccaacgttgttggtgatccaaccatgtttggtgaatggaaacaagagatggagctaatggctggacggatcaagaatgtaagacagaagctctacgacagtttgtctgccaaggacaagagcggcaaggactggtctttcattctgaggcagattggcatgttctcctacaccggcttgaacaaagcgcagagtgacaacatgacggataaatggcatatttacatgaccaaggatgggcggatctcgttagctgggctgtccctggctaagtgtgattatcttgccgacgccatcatcgattccttccataatgtgaactaggctgaggtacgatagttgagggtcaagctattgatgtttagttccgtggacgctaggctgggatttttgggtccttccagctatacagctcttccgttgtgctccatctggtgtaacttggataaataaaaattttgtcgctgaactaaaactcgtgtgcttttttacctgtaactgtaaggtcagcgcgtggctacagacttgtaaacacttgaatggaaaaaaaacaatgacattaccggatattaatggccaactggccggtatgcgcttaagaagtctgatcttggagatctcgattacttcgactatgtttgcttttttctttcttttcttttggtgtaaactgacaggaaccgcaaatatgattcaaggcacaggcgcagtgcttgcacgtggctggaggctgtagcaggaggatatccttcaagccttcaggtggtagtggtactggcagtcgtagtcgtgacagcctcacatggaactactgattggaaactgatcgagacctctctagattcctcttttagggctagtttaag

SEQ ID NO: 51802 - DNA, 1363 bp, Zea Mays
taagtaaccacaagaatatcttcaatgatgctagggtaccttggtcagagtaccggtattatgaccccaagactgttgggttggattttgagggaatgatagctgacattgaggctgctcctgaaggttcttttgttctgctacatggttgtgctcacaacccaactggaatagacccaactcctgaacagtgggagaaaattgcagatgtcattcaagagaaaaagcatatgccattctttgatgttgcatatcagggttttgccagtggaagccttgatgaagatgcattttctgtcaggctttttgttaagcgtggcatggaagtgtttgttgcacaatcttacagcaagaaccttggtttatattctgaaagggttggtgcaataaatgtcgtgtgctcagcaccagaagttgcagatagggtaaagagccagctgaaacgattggcacgtcccatgtactcgaacccccctattcacggtgccaagatagttgccaacgttgttggtgatccaaccatgtttggtgaatggaaacaagagatggagctaatggctggacggatcaagaatgtaagacagaagctctacgacagtttgtctgccaaggacaagagcggcaaggactggtctttcattctgaggcagattggcatgttctcctacaccggcttgaacaaagcgcagagtgacaacatgacggataaatggcatatttacatgaccaaggatgggcggatctcgttagctgggctgtccctggctaagtgtgattatcttgccgacgccatcatcgattccttccataatgtgaactaggctgaggtacgatagttgagggtcaagctattgatgtttagttccgtggacgctaggctgggatttttgggtccttccagctatacagctcttccgttgtgctccatctggtgtaacttggataaataaaaattttgtcgctgaactaaaactcgtgtgcttttttacctgtaactgtaaggtcagcgcgtggctacagacttgtaaacacttgaatggaaaaaaaacaatgacattaccggatattaatggccaactggccggtatgcgcttaagaagtctgatcttggagatctcgattacttcgactatgtttgcttttttctttcttttcttttggtgtaaactgacaggaaccgcaaatatgattcaaggcacaggcgcagtgcttgcacgtggctggaggctgtagcaggaggatatccttcaagccttcaggtggtagtggtactggcagtcgtagtcgtgacagcctcacatggaactactgattggaaactgatcgagacctctctagattcctcttttagggctagtttaag

SEQ ID NO: 51803 - DNA, 2369 bp, Zea Mays
acatgtaaaccatactgaatataaccgaatttatgcaaaatttaatagattcaggaagtgagatatatacccttcggagaaatccatgctaaagatcacactagtgactttattcatacgagtataaatacgtcccggccggtcaccggctgaggcagagccagttggttggacattgacatttggcacgccatcagcatgagccctcctcctcctcctcctcccacctcctcctctagataggacgaagctagctgccgccgccgctcccccgtccgaaacgggccgggacgatacatggcgctgatgactggtcgtcgtcgggggagctcgagacggctgtgttcttcaccttcttcctgttcccgacgaaagaggccttccacgtacaccaattatcgcttgtactagctaccacagcagagaggggaggggcccgggcgcccggccaaccgagttgcgcacgcaggctgtacgcaaccgcagcagccaggctaaggtgctaggtagctagtttgtagagtgcgcgcgcgcggggcaggtggcgtgttggcgccgtcatcgtactcgtacgtacgtctgttctctctctgcggatggtcatcatggccgggatgctccccggcgtggagttcgcgcggcgccggcggcgggcgtcgtccttgtgcctgtacgcaccttcttccaaggagtggagcagcgcgtgcatggagacgacggcgacggcgactgcgcgcgcgtggacgacgctggggctgggcagcggcgcccgggaggcgaaggagaggctggatcagaagctccgtgcccagagacaacctgtggtgctcaagagcggtggcctccaccgccaccactcgtcagcgtgcagcagcgacacgggcgtgctgctgcggcgggaagtggtgtcgtcgccgaaaccgaacaagaagggaggaggaggaggagggggccggttcggctggtgccggctactggcaggcgggcggcgcgggccgccggcggcagcggaggcggggtgcgcggtgtgcctggaggagctccgcgcgggggacgtggtggcgcgcctgccctgcgcgcaccgcttccactggtcctgcgccgtgccctgggtccaggccgcgtcgcggtgccccgtctgccgcgcccacgcccgcgtctagctgcctcatcggctgctgctggcctgcacccgcggcgcgccgcatgggatgcgtcgtgcctcgtgtcaaagagaaggccgcgccatgcacggacggggagaagagaaccacgagctaaagcaaccaggacaaatagggaggggagccgagggtactgcgtgtctaaacatttttttttacccgcctacagaagtaatgcgcccccactgtgtcatgatgtcaaataacaaacatcaggcagtatacctgaaatagaaataagatatgtaatggtgtaaatatagggggtgtttggtttctagggactaatgtttagtcccatcattttattccattttagtctataaattatcaaatatagaaactaaaatagagttttagtttctatatttggcaattttggaactaaaatggaataaaatgtagggactaaaaattagtccctagaaaccaaacacccccatatacacgcagttaatccgaacgttgtaaatacagcagaaggtaccgtggtacggcatgacgtattggtattgactcgcggagaattgcacaggtagccacatactgcattctctttccaggatatattatccaagaagctatcccgtctgtcctcttgttgtacgactaaaggtactctagctaccagactaggctgtctccaacaaggacctgtataaggtccggtacgctatatttacaggtttgtgagctcctgcatccatccagcaatagactctaaatgctcctctaaaatatagagggtgagcttcgtccgccatttgtagagactgtacgagcgtccgctatctcctgtgtcggctccttcgcgcgtccgctcggagatttccctcgttctcgcagggaggccgtggacgtacgaccaccggggacctcgagctagcgcgcagccggggcgagcccggtcccgccggtgagccctatccccgtccgactgtgaagtttgtcgtgtctgtgtcacagacatgaacgggaggtcgttgccggggtgtagagcacgaggggcagcggcgaggacactggagagctgctacgaggagacggcgggaacatggcggcgagctgctgcgaggagacgatgggaacatggcggcgaggagactgcagatttgctgctgctcgctgtagcatgtgatgagggtcaaaaaagatttatttaaatgaatgaaagagctcgacggg

SEQ ID NO: 51804 - DNA, 2265 bp, Zea Mays
gttggacattgacatttggcacgccatcagcatgagccctcctcctcctcctcctcccacctcctcctctagataggacgaagctagctgccgccgccgctcccccgtccgaaacgggccgggacgatacatggcgctgatgactggtcgtcgtcgggggagctcgagacggctgtgttcttcaccttcttcctgttcccgacgaaagaggccttccacgtacaccaattatcgcttgtactagctaccacagcagagaggggaggggcccgggcgcccggccaaccgagttgcgcacgcaggctgtacgcaaccgcagcagccaggctaaggtgctaggtagctagtttgtagagtgcgcgcgcgcggggcaggtggcgtgttggcgccgtcatcgtactcgtacgtacgtctgttctctctctgcggatggtcatcatggccgggatgctccccggcgtggagttcgcgcggcgccggcggcgggcgtcgtccttgtgcctgtacgcaccttcttccaaggagtggagcagcgcgtgcatggagacgacggcgacggcgactgcgcgcgcgtggacgacgctggggctgggcagcggcgcccgggaggcgaaggagaggctggatcagaagctccgtgcccagagacaacctgtggtgctcaagaggcatgagatgagcacgagccccacgatcaccaaagcgcacgacgacgcaacgtgcaggtgcagcggtggcctccaccgccaccactcgtcagcgtgcagcagcgacacgggcgtgctgctgcggcgggaagtggtgtcgtcgccgaaaccgaacaagaagggaggaggaggaggagggggccggttcggctggtgccggctactggcaggcgggcggcgcgggccgccggcggcagcggaggcggggtgcgcggtgtgcctggaggagctccgcgcgggggacgtggtggcgcgcctgccctgcgcgcaccgcttccactggtcctgcgccgtgccctgggtccaggccgcgtcgcggtgccccgtctgccgcgcccacgcccgcgtctagctgcctcatcggctgctgctggcctgcacccgcggcgcgccgcatgggatgcgtcgtgcctcgtgtcaaagagaaggccgcgccatgcacggacggggagaagagaaccacgagctaaagcaaccaggacaaatagggaggggagccgagggtactgcgtgtctaaacatttttttttacccgcctacagaagtaatgcgcccccactgtgtcatgatgtcaaataacaaacatcaggcagtatacctgaaatagaaataagatatgtaatggtgtaaatatagggggtgtttggtttctagggactaatgtttagtcccatcattttattccattttagtctataaattatcaaatatagaaactaaaatagagttttagtttctatatttggcaattttggaactaaaatggaataaaatgtagggactaaaaattagtccctagaaaccaaacacccccatatacacgcagttaatccgaacgttgtaaatacagcagaaggtaccgtggtacggcatgacgtattggtattgactcgcggagaattgcacaggtagccacatactgcattctctttccaggatatattatccaagaagctatcccgtctgtcctcttgttgtacgactaaaggtactctagctaccagactaggctgtctccaacaaggacctgtataaggtccggtacgctatatttacaggtttgtgagctcctgcatccatccagcaatagactctaaatgctcctctaaaatatagagggtgagcttcgtccgccatttgtagagactgtacgagcgtccgctatctcctgtgtcggctccttcgcgcgtccgctcggagatttccctcgttctcgcagggaggccgtggacgtacgaccaccggggacctcgagctagcgcgcagccggggcgagcccggtcccgccggtgagccctatccccgtccgactgtgaagtttgtcgtgtctgtgtcacagacatgaacgggaggtcgttgccggggtgtagagcacgaggggcagcggcgaggacactggagagctgctacgaggagacggcgggaacatggcggcgagctgctgcgaggagacgatgggaacatggcggcgaggagactgcagatttgctgctgctcgctgtagcatgtgatgagggtcaaaaaagatttatttaaatgaatgaaagagctcgacggg

SEQ ID NO: 51805 - DNA, 708 bp, Zea Mays
gttggacattgacatttggcacgccatcagcatgagccctcctcctcctcctcctcccacctcctcctctagataggacgaagctagctgccgccgccgctcccccgtccgaaacgggccgggacgatacatggcgctgatgactggtcgtcgtcgggggagctcgagacggctgtgttcttcaccttcttcctgttcccgacgaaagaggccttccacgtacaccaattatcgcttgtactagctaccacagcagagaggggaggggcccgggcgcccggccaaccgagttgcgcacgcaggctgtacgcaaccgcagcagccaggctaaggtgctaggtagctagtttgtagagtgcgcgcgcgcggggcaggtggcgtgttggcgccgtcatcgtactcgtacgtacgtctgttctctctctgcggatggtcatcatggccgggatgctccccggcgtggagttcgcgcggcgccggcggcgggcgtcgtccttgtgcctgtacgcaccttcttccaaggagtggagcagcgcgtgcatggagacgacggcgacggcgactgcgcgcgcgtggacgacgctggggctgggcagcggcgcccgggaggcgaaggagaggctggatcagaagctccgtgcccagagacaacctgtggtgctcaagagccacgcctggaaaatgcatcccacaggatccttctgtgac

SEQ ID NO: 51806 - DNA, 2582 bp, Zea Mays
gttcgaaatctcccggcgcttctagtctagcgctcagttcatcggcagtccggcacggcgcagaagctctcctcgctcgcgccgccacacagcccacaaccttctatggattcgtcctcggccaccgccgctaccgttgcgccggtggtgacctcggccccgccgctcgaagactgcctccgcctcctccgcggcgagcgcgacgagcagaagctggcgggcctgctagtcgccgccaacgtctgccgcgcgggcgacgccgacgccgtcgccaacgtctaccgcgccgtcgggccccgcttcctccgacgcctcctcaacactgggttggggaaagtggagggcgggaaggaggaggagcgagaggcatacatgcggctcgccgtcaccgtgctcgcagggctcgcgcgcgtcccggaggttgcggccgacgagggtgtcgtttccaccgtgcccctagtcgccgaggttgtcgccaaatcgactgatccagcaatcactgaagaatgctttgaacttctgtcacttattgcaatagcgtctgaagatggggcatatgagttttgtgagcccggtgtaatagacatgatcttccttcaaatcttaagcttaacagatggttctaagtgcgtagaacttgccattaacctactgcagttactagttcataaactcaaagttgacactatgagttcggagaaactgcaaggaatgactagaatggtaacttgtcttgccaggatatttgctgttctccacactgcagttaaatttgatgccttgcacatgcttaccttcctcctgtcccaaaaagaatctccacttcatgattttttgagatcaatacctgcatcaatttgggaatctcacattcgagttggaatcactgccattctccaaaatcgtgttgtatcctctgaaaagttgcacgctcttcttttggcggagtgcatgatgtccatactgggcgaggattggttgtcagaagattttgaagtccaggataaccaaaatgtgttgtctgttgacaaatttgtattgcttgtgctggaatccgcaagggttgaagtggcagtcttgctaaatgagcttgcttatctgaagtacgagtcatcaaaaatttctcagacagatgaagccatcagtcagaaacagaggaacctggctatactattttcgttaatagaaagaataattaaaatgatatcaaatgccagtagtggtgaaggtgcaccaattcataccatccgtgaaagtaccataatgcaggccattacgggattaaatgagacaatcaatttagtcttagactttctgcaggacgcgaaggatcatggtcaatggaaaggtgacgatcttttagcagctgcaagaatagtaggaagttatctggcagaagcaccatatgcctgcaaggagaagactgggaatctattggaatttatcttttctatagaaggtcaagatgaatcaagttccttctattctatttgcttcatgcttccaatgctatcccaaataacaatggaggttgatggatgtagaactttggcatcatttggtggccataaggcagttatagattgccttgttaaaatgactgagcagggtggaatgacgattgataacggtagcatgtttttggcatgtgataccatcataaatttcatgtctaatatgaagagtgtccatattccagtggattattgtttcattcgcctcctaaaagcacttgttacatgggctgatgcctcatcagttaccatgacagcatcctgcttatgtgtaatgctgttggacatgacgtcagaaaagtttctattgagctgctctcattttgacgccaatatccttgggagtttgtctgagatcatcatcagaagtttgcagcaggatatccctgatgatgatagtgagcaattcaagcagaagcagatcattgtatcagtatgtggtgcaggttataagcgatgggctgatcgatttccacgtgttaaagatgttgtggagcagcatgtatccgtgtgaatgtgatcaacccccaggagctgttctctatgaatgcaaacctgcaaacgtgacagtgcagctttgacaatgcctcggttctggtggttcattccttttacctggttagcgaaattctccagcggcaggccggcagctaacgaggtgcaccaacgtggatcagaaagatgtcgttgtttatccgggaaattctcagctgcgaagcaaatctgacattgtaatgtttatgctgcacgagaaagaacaaggcggtttggggactagattctcatctcgctttcaccatttctgaacgcatgtgtaacagaaccaagcccaagtttcaggcaaggggttttcatttatattgtttagcatgtatacatgcgagacgaacatatgaaaggataaactcctacttaaatgtaagtagagatattgtagtggagtaaaaagcacacgtctagatttgagatggctcctaaatcttaaaaagtgagtctgaactaatggaatgttgtttgggatagctcctaaaccttaacaaatgaatctgaatctagaatttactcaga

SEQ ID NO: 51807 - DNA, 2507 bp, Zea Mays
gtctagcgctcagttcatcggcagtccggcacggcgcagaagctctcctcgctcgcgccgccacacagcccacaaccttctatggattcgtcctcggccaccgccgctaccgttgcgccggtggtgacctcggccccgccgctcgaagactgcctccgcctcctccgcggcgagcgcgacgagcagaagctggcgggcctgctagtcgccgccaacgtctgccgcgcgggcgacgccgacgccgtcgccaacgtctaccgcgccgtcgggccccgcttcctccgacgcctcctcaacactgggttggggaaagtggagggcgggaaggaggaggagcgagaggcatacatgcggctcgccgtcaccgtgctcgcagggctcgcgcgcgtcccggaggttgcggccgacgagggtgtcgtttccaccgtgcccctagtcgccgaggttgtcgccaaatcgactgatccagcaatcactgaagaatgctttgaacttctgtcacttattgcaatagcgtctgaagatggggcatatgagttttgtgagcccggtgtaatagacatgatcttccttcaaatcttaagcttaacagatggttctaagtgcgtagaacttgccattaacctactgcagttactagttcataaactcaaagttgacactatgagttcggagaaactgcaaggaatgactagaatggtaacttgtcttgccaggatatttgctgttctccacactgcagttaaatttgatgccttgcacatgcttaccttcctcctgtcccaaaaagaatctccacttcatgattttttgagatcaatacctgcatcaatttgggaatctcacattcgagttggaatcactgccattctccaaaatcgtgttgtatcctctgaaaagttgcacgctcttcttttggcggagtgcatgatgtccatactgggcgaggattggttgtcagaagattttgaagtccaggataaccaaaatgtgttgtctgttgacaaatttgtattgcttgtgctggaatccgcaagggttgaagtggcagtcttgctaaatgagcttgcttatctgaagtacgagtcatcaaaaatttctcagacagatgaagccatcagtcagaaacagaggaacctggctatactattttcgttaatagaaagaataattaaaatgatatcaaatgccagtagtggtgaaggtgcaccaattcataccatccgtgaaagtaccataatgcaggccattacgggattaaatgagacaatcaatttagtcttagactttctgcaggacgcgaaggatcatggtcaatggaaaggtgacgatcttttagcagctgcaagaatagtaggaagttatctggcagaagcaccatatgcctgcaaggagaagactgggaatctattggaatttatcttttctatagaaggtcaagatgaatcaagttccttctattctatttgcttcatgcttccaatgctatcccaaataacaatggaggttgatggatgtagaactttggcatcatttggtggccataaggcagttatagattgccttgttaaaatgactgagcagggtggaatgacgattgataacggtagcatgtttttggcatgtgataccatcataaatttcatgtctaatatgaagagtgtccatattccagtggattattgtttcattcgcctcctaaaagcacttgttacatgggctgatgcctcatcagttaccatgacagcatcctgcttatgtgtaatgctgttggacatgacgtcagaaaagtttctattgagctgctctcattttgacgccaatatccttgggagtttgtctgagatcatcatcagaagtttgcagcaggatatccctgatgatgatagtgagcaattcaagcagaagcagatcattgtatcagatgttgtggagcagcatgtatccgtgtgaatgtgatcaacccccaggagctgttctctatgaatgcaaacctgcaaacgtgacagtgcagctttgacaatgcctcggttctggtggttcattccttttacctggttagcgaaattctccagcggcaggccggcagctaacgaggtgcaccaacgtggatcagaaagatgtcgttgtttatccgggaaattctcagctgcgaagcaaatctgacattgtaatgtttatgctgcacgagaaagaacaaggcggtttggggactagattctcatctcgctttcaccatttctgaacgcatgtgtaacagaaccaagcccaagtttcaggcaaggggttttcatttatattgtttagcatgtatacatgcgagacgaacatatgaaaggataaactcctacttaaatgtaagtagagatattgtagtggagtaaaaagcacacgtctagatttgagatggctcctaaatcttaaaaagtgagtctgaactaatggaatgttgtttgggatagctcctaaaccttaacaaatgaatctgaatctagaatttactcaga

SEQ ID NO: 51808 - DNA, 2563 bp, Zea Mays
agcgctcagttcatcggcagtccggcacggcgcagaagctctcctcgctcgcgccgccacacagcccacaaccttctatggattcgtcctcggccaccgccgctaccgttgcgccggtggtgacctcggccccgccgctcgaagactgcctccgcctcctccgcggcgagcgcgacgagcagaagctggcgggcctgctagtcgccgccaacgtctgccgcgcgggcgacgccgacgccgtcgccaacgtctaccgcgccgtcgggccccgcttcctccgacgcctcctcaacactgggttggggaaagtggagggcgggaaggaggaggagcgagaggcatacatgcggctcgccgtcaccgtgctcgcagggctcgcgcgcgtcccggaggttgcggccgacgagggtgtcgtttccaccgtgcccctagtcgccgaggttgtcgccaaatcgactgatccagcaatcactgaagaatgctttgaacttctgtcacttattgcaatagcgtctgaagatggggcatatgagttttgtgagcccggtgtaatagacatgatcttccttcaaatcttaagcttaacagatggttctaagtgcgtagaacttgccattaacctactgcagttactagttcataaactcaaagttgacactatgagttcggagaaactgcaaggaatgactagaatggtaacttgtcttgccaggatatttgctgttctccacactgcagttaaatttgatgccttgcacatgcttaccttcctcctgtcccaaaaagaatctccacttcatgattttttgagatcaatacctgcatcaatttgggaatctcacattcgagttggaatcactgccattctccaaaatcgtgttgtatcctctgaaaagttgcacgctcttcttttggcggagtgcatgatgtccatactgggcgaggattggttgtcagaagattttgaagtccaggataaccaaaatgtgttgtctgttgacaaatttgtattgcttgtgctggaatccgcaagggttgaagtggcagtcttgctaaatgagcttgcttatctgaagtacgagtcatcaaaaatttctcagacagatgaagccatcagtcagaaacagaggaacctggctatactattttcgttaatagaaagaataattaaaatgatatcaaatgccagtagtggtgaaggtgcaccaattcataccatccgtgaaagtaccataatgcaggccattacgggattaaatgagacaatcaatttagtcttagactttctgcaggacgcgaaggatcatggtcaatggaaaggtgacgatcttttagcagctgcaagaatagtaggaagttatctggcagaagcaccatatgcctgcaaggagaagactgggaatctattggaatttatcttttctatagaaggtcaagatgaatcaagttccttctattctatttgcttcatgcttccaatgctatcccaaataacaatggaggttgatggatgtagaactttggcatcatttggtggccataaggcagttatagattgccttgttaaaatgactgagcagggtggaatgacgattgataacggtagcatgtttttggcatgtgataccatcataaatttcatgtctaatatgaagagtgtccatattccagtggattattgtttcattcgcctcctaaaagcacttgttacatgggctggaaccacagatgcctcatcagttaccatgacagcatcctgcttatgtgtaatgctgttggacatgacgtcagaaaagtttctattgagctgctctcattttgacgccaatatccttgggagtttgtctgagatcatcatcagaagtttgcagcaggatatccctgatgatgatagtgagcaattcaagcagaagcagatcattgtatcagtatgtggtgcaggttataagcgatgggctgatcgatttccacgtgttaaagatgttgtggagcagcatgtatccgtgtgaatgtgatcaacccccaggagctgttctctatgaatgcaaacctgcaaacgtgacagtgcagctttgacaatgcctcggttctggtggttcattccttttacctggttagcgaaattctccagcggcaggccggcagctaacgaggtgcaccaacgtggatcagaaagatgtcgttgtttatccgggaaattctcagctgcgaagcaaatctgacattgtaatgtttatgctgcacgagaaagaacaaggcggtttggggactagattctcatctcgctttcaccatttctgaacgcatgtgtaacagaaccaagcccaagtttcaggcaaggggttttcatttatattgtttagcatgtatacatgcgagacgaacatatgaaaggataaactcctacttaaatgtaagtagagatattgtagtggagtaaaaagcacacgtctagatttgagatggctcctaaatcttaaaaagtgagtctgaactaatggaatgttgtttgggatagctcctaaaccttaacaaatgaatctgaatctagaatttactcaga

SEQ ID NO: 51809 - DNA, 2512 bp, Zea Mays
agcgctcagttcatcggcagtccggcacggcgcagaagctctcctcgctcgcgccgccacacagcccacaaccttctatggattcgtcctcggccaccgccgctaccgttgcgccggtggtgacctcggccccgccgctcgaagactgcctccgcctcctccgcggcgagcgcgacgagcagaagctggcgggcctgctagtcgccgccaacgtctgccgcgcgggcgacgccgacgccgtcgccaacgtctaccgcgccgtcgggccccgcttcctccgacgcctcctcaacactgggttggggaaagtggagggcgggaaggaggaggagcgagaggcatacatgcggctcgccgtcaccgtgctcgcagggctcgcgcgcgtcccggaggttgcggccgacgagggtgtcgtttccaccgtgcccctagtcgccgaggttgtcgccaaatcgactgatccagcaatcactgaagaatgctttgaacttctgtcacttattgcaatagcgtctgaagatggggcatatgagttttgtgagcccggtgtaatagacatgatcttccttcaaatcttaagcttaacagatggttctaagtgcgtagaacttgccattaacctactgcagttactagttcataaactcaaagttgacactatgagttcggagaaactgcaaggaatgactagaatggtaacttgtcttgccaggatatttgctgttctccacactgcagttaaatttgatgccttgcacatgcttaccttcctcctgtcccaaaaagaatctccacttcatgattttttgagatcaatacctgcatcaatttgggaatctcacattcgagttggaatcactgccattctccaaaatcgtgttgtatcctctgaaaagttgcacgctcttcttttggcggagtgcatgatgtccatactgggcgaggattggttgtcagaagattttgaagtccaggataaccaaaatgtgttgtctgttgacaaggttgaagtggcagtcttgctaaatgagcttgcttatctgaagtacgagtcatcaaaaatttctcagacagatgaagccatcagtcagaaacagaggaacctggctatactattttcgttaatagaaagaataattaaaatgatatcaaatgccagtagtggtgaaggtgcaccaattcataccatccgtgaaagtaccataatgcaggccattacgggattaaatgagacaatcaatttagtcttagactttctgcaggacgcgaaggatcatggtcaatggaaaggtgacgatcttttagcagctgcaagaatagtaggaagttatctggcagaagcaccatatgcctgcaaggagaagactgggaatctattggaatttatcttttctatagaaggtcaagatgaatcaagttccttctattctatttgcttcatgcttccaatgctatcccaaataacaatggaggttgatggatgtagaactttggcatcatttggtggccataaggcagttatagattgccttgttaaaatgactgagcagggtggaatgacgattgataacggtagcatgtttttggcatgtgataccatcataaatttcatgtctaatatgaagagtgtccatattccagtggattattgtttcattcgcctcctaaaagcacttgttacatgggctgatgcctcatcagttaccatgacagcatcctgcttatgtgtaatgctgttggacatgacgtcagaaaagtttctattgagctgctctcattttgacgccaatatccttgggagtttgtctgagatcatcatcagaagtttgcagcaggatatccctgatgatgatagtgagcaattcaagcagaagcagatcattgtatcaggttataagcgatgggctgatcgatttccacgtgttaaagatgttgtggagcagcatgtatccgtgtgaatgtgatcaacccccaggagctgttctctatgaatgcaaacctgcaaacgtgacagtgcagctttgacaatgcctcggttctggtggttcattccttttacctggttagcgaaattctccagcggcaggccggcagctaacgaggtgcaccaacgtggatcagaaagatgtcgttgtttatccgggaaattctcagctgcgaagcaaatctgacattgtaatgtttatgctgcacgagaaagaacaaggcggtttggggactagattctcatctcgctttcaccatttctgaacgcatgtgtaacagaaccaagcccaagtttcaggcaaggggttttcatttatattgtttagcatgtatacatgcgagacgaacatatgaaaggataaactcctacttaaatgtaagtagagatattgtagtggagtaaaaagcacacgtctagatttgagatggctcctaaatcttaaaaagtgagtctgaactaatggaatgttgtttgggatagctcctaaaccttaacaaatgaatctgaatctagaatttactcaga

SEQ ID NO: 51810 - DNA, 4580 bp, Zea Mays
caaactttagatattaaacctgacaccgtcagaattacattctttatggattcatagtgtacaatataggaggtgtttacatatcattatcgaagggaggtgaagcaacgcaaacgcggcaccaccaaccggtttcgtcgggttgctgcttagtttattttaacaccttctaactttatatataaaaaaaatacagtgctctacttgttgcagtgagacttgaacagaagttggttcctcactcgctatctctatctgagcgtcaactggacaacaactgcatccagctcgatataatgaacgcgtttcgatgagcaaaatgtcacgggaaacgaaactttgacccactaaaaagcgcataccattttaggggtattttggatttaactatatccattgatgtaatttgaatggtagatggttaagaaactttgtaagattgaacttctttcagatttcaatacggaatacacggttaccgttccagaacagagcaaacgagtgacgctgaaacccaagccggggcgagaattcgggtcgaaatgttgtttttttttattgcttttcggagtacccaatttgccctgtacaaacaaaggagccggccggccctgagctcacagctaggaccgggtccacgcgccaaactccctatctactcgacggccggatcagccggacagcacgccgccggcgaggagctcgtacggcgcgtcccgccttgcgcgtgcggccgcgaccgtcgcgccggcgctggtccccgcgggcggcggcttggcgcgggcggggccatcctccccggcgtcggcttccctcggcggcagctcggcgcggcacatggggcaggtggggcggatcccgagccacggcgcgatgcagccgtggtggtaccagtgcgcgcagggcaggcgcgccacggggtccgccgccgcgatctcctccgtgcacaccgcgcacaccgtgccggccacccccgcgggcgcgcgcaccggcggcggcggctccgcgcggcggccgccggaggaagagggggacggcgcgggaggtggaggaaggtcgacggggaaggactcctcgtcgacgtagtccaccaccagcgggttccgcccgaggatcgacgagaggaggtacctcgccgtgatccagtcgccgtcgtccatgatcctgaatggatgcacgcccaacgtgtagcgctgctgtgctctgctctgctctgctcgccgtcgtaccagtactactagtagcagccagtattcattcgcttcgtttgcccccgtctccgtctgttaaataggagtcggagcagcagttgttctggctgacggtgcagtgacggggttgggcagataagagtaaagattgggttgccaacttgcgagcctctctctcactgacctgaccagataactttcagcggcacatcgggcgagccattggcaattttgccattatcatttgtgggcttcgccagtatgccatcggacccacaaatcatagacacagacggtcccaccagtcatagacacgggatggtataataacaggcagccaaaattgagagtgacaaaatagcaaatttctccacatcgggctggggcaaaggaaaggcagtacctatccgccgcaattccgtgggctgcaaaacccattctgctgcttctacgggggataacgtagcgacacaaattatattggggaaaaaacacccaacgaaaccttatcttgaggagagagataggacttggtaatacaccgcaaaagattcacagaagcaaaaaaaaaaaaaaaaggtgagagagaagcaccggatatgttcctcttgcagatatcagtgtccttttggaaggtatataagctagaggttggtgcgcacttcagcccacaacaaacacgacacgacagagcagatgtcattagaaggcaaccactgtataataccactgtttgggaactttgaactttatttcacaaaaccatagtttataataacatggtttaaagtatgtcataacataattatagtatactttacatcattccaatccaataactgtttagagacatagtattttagttatagtgtaggagagaaaaaagactgtagctgcgtgcaaaccaaagttttcttgatcctaaaaataccgtggtattggcaaaaccataatttaaaatatagagttcttgtatgtgctcccaaacgtcttttggtataaaatactatggtatgctcaaatattacggtataccgtgttcccaaacatgatgtcagtggcaggcccctgaacaccttccccggagatagtgagactactcaagcgcggggcaacgaaactcaccccagcacctgttatcctcttgcgatccaaaagcttgagcctctccaggaatggcgctgacgaaataccctccaaccccgagtcataaaagatgtacactccgtccagcatgaaagcacggactaggcaggtctgaatgagtgcgactataccatacctttctgtgtgaaaccttatttcagtgggatacacactcgaacaaaacgtaaaggtcagctcaacaacctcaagcatagggcagttgagaccaggggccttgagcctttcatcagtcagtctggttggcgcagagtcaaaggcttctgaggttgcttgcagttctggagcagcgcaatcatctcgtcgtcatctagaccaacggcaacgtttctctaatgctttgcactttctcaaaagaaaaaaaaaacggtgactccaatcccttgagcagtcggtcctaggagaccctcacgggcctgcaaagttaatatatgtgccaacctcaaattctcacagaagatatcatatttttacgggtagcaggcatcatacgcgggatcagagggagggcctactactactactactacaacaaaacaacaatatcttttagtcccaagtaagttggataggctaaagttaaaacccaacagagcccacagatcaaggttcagtcatgtggataactattttctattcaccctatttaaggttaaatcttttattatatttcatctttgtaagtcttcttttaccgtctcttcccacatcaactttgatctccccgtacatctctttccatcactatcgcacattataatctcattaagcattggtgcccatagagatctccattaaacatgttcaaaccatcatcaccgagagaccctagtaaccaataattgccattgatctcaaacttctcaaactttatctatcctggagacctggacaaaattttaggaggtcaaacttgtggtgaaggattcccttgcaatcattcaccacaagttccaccaatgatccggtcctgccaaggtactctagccactcgacgcctctcttgatgaagaacttgatgtatttagggactgtttgacacggctccggctctactaaaaatgacttcgctttgacttctcttgaagagcaattcctatataggaggtagtgttttcttaacaaatcgtctagtaaaacggctcattttggcgtgagagaaatgcaagatgggagagtggggtaggaggcactaggataggagcccccccccccctttggctcactcctctctataaaataatagctctgattactcagtgctctttgttgagagatctttttttagaccatctgggagggctcctacaggagccggagccggtttgagagtcccttaaactctttcaacacttaattaatcagttagatagatttatatgttgaataattagccttattctcgaaatcatcttttttatttatatacaccctatgggaccgagaccagcttaaaaataaccttaggattagcttaaaaataaccttaggattaccctgatcgcagtaaccaatgctgacagttaggaggtgtttggtttgatggatcaattcatccaaaatgaggtggtgcattatgattccattcctcaaatttgatgaaatgaactcattctttatatcagtactaactctgaggaataagatgatgatggatcaaatcattccattctacaaaccaaacaaaaagtgagaagtaagtagataatggactagccctttcctcaaaccaaacaccttattaaatcttaacttccatgttaagttagactaagatctcaccgaagagagaggtgtccgagtttattttcttctaaatcgctgagcatgcaaataagctaatgtagaagcgcaaccaaattaaactaaaacactacggatgagtaggaaattctgaaacaaatagcaaattaacctagaacaaatcaacgaattagaagtaatactcatgccaaactaaaaataaatttgtaaggagcactttactaataataccatgaaacttgcgagcgtacagtatgtaacgacgcctagtggttcctaaactgacagttctatcgagcaaatcaaaaccatttgcccgatgcagcaaaagttacagcctggaattcgatgttcacatagtactacaacattaacaaatactccataagcaaggaaccaattatgctggagtattttgcacctccgtcatctcaatcagaa

SEQ ID NO: 51811 - DNA, 2357 bp, Zea Mays
ctcctgccaccaacgccaaatcctactcgcggtcgcgggaggcgaaaatcccgttagttgcccagacccagacccagagaggagggcgacgaacacacggtgacggagagccgagtggacaggacaggagcgcggagggaggaggaaacaaagcagaaaagcaacccccgtcttccatctttgcggagcgacgcgcatctgccctgcccatctctttcgtgctcctaccccccgccttcttccgcccgccgcctcagccctcaaggcttttccttctcatcttcttctcagaccggggacgggcccgacggggacagggacaaaaggtggtgcgatcttgttgggcacactccgcctccgcgcgcgggaagagagagagagagagagagagagagagagagagagaaggacggagggtggcagggccgccgcgccggtgagccgacccccagccatggcattgccggctccccccgtccgcctggcgctgctgctgctcgtcgcgctgccattctgcgccgcgcatcccgggccgggggccttcaacgctcctcgccacttccagacgcccgcgctccactctgatggatttggcttggtggcaagaaggtcgattgctgaagctcctgctgacatcaacgtcactacgaatagctcctttgtgctggcggcagataggacatatcgaagggaccctttgaatggcttcaggaaatacccgggcggctggaatatcagtgaagtgcactatttcgcttccgtcggatatacagccattccgctgttcgccattgctctcgtgtggtttgtgatctttttcctggttatgcttgggatttgctgccgtcattgctgttgcccgcatcacacctacaagtattcacgaacagcatatgctctatcattgatacttctaatactgttcacatgtgctgcaattgctggatgtgctatgttatacgatggccagggaaaattccacaagagcacaacaactactctgaagtttgttgttagccaggcaaactatactgttgacaaccttaggaacctatctgatagtttgtctgctgcaaagaaggtcgacatagcacagtcctttttgctgcctcctaatgtgcaaaatgagataaatgaaattcaaggaaagctgaactcatcagctactgatcttgctattaaaacaacagataatgccgcgaagatcaaaaaggtgctaaacagagtgcggcttgctttagttgtcattgcagctgtgatgcttcttctggcatttgttggcttcttgttatccatctttggtctggaattccttgtctctgtcttggttattattggatggatattggttactggaacgtttatcctgtgtggtgtatttcttcttctgcacaaatacttgcgttgcaatggaagagtgggttgctcatccgacagaacacacagccctggacgaggttatcccctgcgtggagcctgccacggcgaacgaatccctgtacagaagcaggcaggtgacgttcgagctggtgaacgtggtgaaccaggtgatcaccaacgtgtcgaacaggaacttccccccgcagctgacgcctttgtactacaaccagtcggggccactgatgcctctgctctgcaaccccttcacgcctgatctgagggaccgcaactgcagcagaggagaggttaccttggacaacgcaacccaggtgtggaagaagtacgagtgccagagcaccaccgtctcaggaggagccgagatctgcgcgacggtggggcgtgtgacccccagcatctacgggcagatgaccgcgggcgtgacggtgagccaggggctgtaccagtacgggcctttcctcatccagctgcaggactgcaccttcgtgcgcgacaccttcacgaccatcaaccagggctactgcccggggctggagcgctacagcaagtgggtgtacgtgggcctggtgatggtctcgttggcggtgatgctgtcgctcatcttctgggtgatctacgccagggagcggcggcaccgcgtgtacagcaagcagcaccagccgtacccggtggaggacaagccggcggcgacggtcccgggcgcttgaattgatatggcccgcccgttccagtgctccggcctactcccgtgccgctgtgcatactgtactccgcgcgctagttgggttttacgtggtggtgtaggtggatgatgtaccctggattgttgttcgtttgcttggtgttgctgtatgtttgctgattttaagttgttgtgcattctcgtactgacggtagctggacaatgaattgattgtgttgggattggttattattaggtgttcttcagttcgtttctc

SEQ ID NO: 51812 - DNA, 1822 bp, Zea Mays
cttcttcttgctggggaacggtcccccagaattttctgatggatttggcttggtggcaagaaggtcgattgctgaagctcctgctgacatcaacgtcactacgaatagctcctttgtgctggcggcagataggacatatcgaagggaccctttgaatggcttcaggaaatacccgggcggctggaatatcagtgaagtgcactatttcgcttccgtcggatatacagccattccgctgttcgccattgctctcgtgtggtttgtgatctttttcctggttatgcttgggatttgctgccgtcattgctgttgcccgcatcacacctacaagtattcacgaacagcatatgctctatcattgatacttctaatactgttcacatgtgctgcaattgctggatgtgctatgttatacgatggccagggaaaattccacaagagcacaacaactactctgaagtttgttgttagccaggcaaactatactgttgacaaccttaggaacctatctgatagtttgtctgctgcaaagaaggtcgacatagcacagtcctttttgctgcctcctaatgtgcaaaatgagataaatgaaattcaaggaaagctgaactcatcagctactgatcttgctattaaaacaacagataatgccgcgaagatcaaaaaggtgctaaacagagtgcggcttgctttagttgtcattgcagctgtgatgcttcttctggcatttgttggcttcttgttatccatctttggtctggaattccttgtctctgtcttggttattattggatggatattggttactggaacgtttatcctgtgtggtgtatttcttcttctgcacaatgtcgtttcagatacttgcgttgcaatggaagagtgggttgctcatccgacagaacacacagccctggacgaggttatcccctgcgtggagcctgccacggcgaacgaatccctgtacagaagcaggcaggtgacgttcgagctggtgaacgtggtgaaccaggtgatcaccaacgtgtcgaacaggaacttccccccgcagctgacgcctttgtactacaaccagtcggggccactgatgcctctgctctgcaaccccttcacgcctgatctgagggaccgcaactgcagcagaggagaggttaccttggacaacgcaacccaggtgtggaagaagtacgagtgccagagcaccaccgtctcaggaggagccgagatctgcgcgacggtggggcgtgtgacccccagcatctacgggcagatgaccgcgggcgtgacggtgagccaggggctgtaccagtacgggcctttcctcatccagctgcaggactgcaccttcgtgcgcgacaccttcacgaccatcaaccagggctactgcccggggctggagcgctacagcaagtgggtgtacgtgggcctggtgatggtctcgttggcggtgatgctgtcgctcatcttctgggtgatctacgccagggagcggcggcaccgcgtgtacagcaagcagcaccagccgtacccggtggaggacaagccggcggcgacggtcccgggcgcttgaattgatatggcccgcccgttccagtgctccggcctactcccgtgccgctgtgcatactgtactccgcgcgctagttgggttttacgtggtggtgtaggtggatgatgtaccctggattgttgttcgtttgcttggtgttgctgtatgtttgctgattttaagttgttgtgcattctcgtactgacggtagctggacaatgaattgattgtgttgggattggttattattaggtgttcttcagttcgtttctc

SEQ ID NO: 51813 - DNA, 1809 bp, Zea Mays
cttttgtgctgctttgctgttctcgatggatttggcttggtggcaagaaggtcgattgctgaagctcctgctgacatcaacgtcactacgaatagctcctttgtgctggcggcagataggacatatcgaagggaccctttgaatggcttcaggaaatacccgggcggctggaatatcagtgaagtgcactatttcgcttccgtcggatatacagccattccgctgttcgccattgctctcgtgtggtttgtgatctttttcctggttatgcttgggatttgctgccgtcattgctgttgcccgcatcacacctacaagtattcacgaacagcatatgctctatcattgatacttctaatactgttcacatgtgctgcaattgctggatgtgctatgttatacgatggccagggaaaattccacaagagcacaacaactactctgaagtttgttgttagccaggcaaactatactgttgacaaccttaggaacctatctgatagtttgtctgctgcaaagaaggtcgacatagcacagtcctttttgctgcctcctaatgtgcaaaatgagataaatgaaattcaaggaaagctgaactcatcagctactgatcttgctattaaaacaacagataatgccgcgaagatcaaaaaggtgctaaacagagtgcggcttgctttagttgtcattgcagctgtgatgcttcttctggcatttgttggcttcttgttatccatctttggtctggaattccttgtctctgtcttggttattattggatggatattggttactggaacgtttatcctgtgtggtgtatttcttcttctgcacaatgtcgtttcagatacttgcgttgcaatggaagagtgggttgctcatccgacagaacacacagccctggacgaggttatcccctgcgtggagcctgccacggcgaacgaatccctgtacagaagcaggcaggtgacgttcgagctggtgaacgtggtgaaccaggtgatcaccaacgtgtcgaacaggaacttccccccgcagctgacgcctttgtactacaaccagtcggggccactgatgcctctgctctgcaaccccttcacgcctgatctgagggaccgcaactgcagcagaggagaggttaccttggacaacgcaacccaggtgtggaagaagtacgagtgccagagcaccaccgtctcaggaggagccgagatctgcgcgacggtggggcgtgtgacccccagcatctacgggcagatgaccgcgggcgtgacggtgagccaggggctgtaccagtacgggcctttcctcatccagctgcaggactgcaccttcgtgcgcgacaccttcacgaccatcaaccagggctactgcccggggctggagcgctacagcaagtgggtgtacgtgggcctggtgatggtctcgttggcggtgatgctgtcgctcatcttctgggtgatctacgccagggagcggcggcaccgcgtgtacagcaagcagcaccagccgtacccggtggaggacaagccggcggcgacggtcccgggcgcttgaattgatatggcccgcccgttccagtgctccggcctactcccgtgccgctgtgcatactgtactccgcgcgctagttgggttttacgtggtggtgtaggtggatgatgtaccctggattgttgttcgtttgcttggtgttgctgtatgtttgctgattttaagttgttgtgcattctcgtactgacggtagctggacaatgaattgattgtgttgggattggttattattaggtgttcttcagttcgtttctc

SEQ ID NO: 51814 - DNA, 1000 bp, Zea Mays
ataattttcgcgggatttcgacttgggtgtcgtttcagatacttgcgttgcaatggaagagtgggttgctcatccgacagaacacacagccctggacgaggttatcccctgcgtggagcctgccacggcgaacgaatccctgtacagaagcaggcaggtgacgttcgagctggtgaacgtggtgaaccaggtgatcaccaacgtgtcgaacaggaacttccccccgcagctgacgcctttgtactacaaccagtcggggccactgatgcctctgctctgcaaccccttcacgcctgatctgagggaccgcaactgcagcagaggagaggttaccttggacaacgcaacccaggtgtggaagaagtacgagtgccagagcaccaccgtctcaggaggagccgagatctgcgcgacggtggggcgtgtgacccccagcatctacgggcagatgaccgcgggcgtgacggtgagccaggggctgtaccagtacgggcctttcctcatccagctgcaggactgcaccttcgtgcgcgacaccttcacgaccatcaaccagggctactgcccggggctggagcgctacagcaagtgggtgtacgtgggcctggtgatggtctcgttggcggtgatgctgtcgctcatcttctgggtgatctacgccagggagcggcggcaccgcgtgtacagcaagcagcaccagccgtacccggtggaggacaagccggcggcgacggtcccgggcgcttgaattgatatggcccgcccgttccagtgctccggcctactcccgtgccgctgtgcatactgtactccgcgcgctagttgggttttacgtggtggtgtaggtggatgatgtaccctggattgttgttcgtttgcttggtgttgctgtatgtttgctgattttaagttgttgtgcattctcgtactgacggtagctggacaatgaattgattgtgttgggattggttattattaggtgttcttcagttcgtttctc

SEQ ID NO: 51815 - DNA, 1131 bp, Zea Mays
atctgatatggaattatgattgtatatgattgcagtgcatcgtatcagaatatcctaatagttgaatatttttttaatatttaaaaaaatttagcttttcgctggcataatacatgcttaccggtccgagatgttctggatgcaatttcgatattccgatctggattggcagatcgcagttgggccggcccgacaaaacgacttaatagacctattcagtaagcccaaagagccagaccctgcgtttccttacttcctggtaaagaaagaagcgaagccaggtacttgttgttgagcgcggagagaggagaggcgcagagcatcgacgatggcgagcggcagcatgaagagggagatcagcgagacccacgacaccctccgcttcggcctcaatgccggcgtcaaggccgacctcgcgccgccgcacccgctccagtccagcatccaatcggaggccaagttctgggcggacaagaagaagtttgggacagaggccatctacggatccgccttgaacatccgcaaggatctcgatgcccaaatcctctcaaggttccaaaggccccctggtgctttgccatcatctctgcttggatatgaggcactgacaggttccctagatgattttggttttgaagattatcttaacatgcctcaagattctgaaggtttccgtcaacctgacatgcaccacggaatggaggttcgccttggtttgtccaagggacctatctgccctagcttcagttgaggcagtgaatgtagttctgcggttctgccgcacgttgatgcaccttagtccagtacactcgggtcaataaaagaccacattaggatggtgaaacggtgaaaactgatggcttgcatatgttcagagtgttatgttgtaatgaacagtgttatgttgtaatgaacgcatatatcgcatgattgatagcttggctagctgtgcgcaggcttagtggaagcattgactggggtgcaggtcggcgcgagcccggctcttatgggtgtaggaaccaatcacgccgattgtgaagcatcgcagttgagcttcaggatctctgcagctgcaggtggcttcttccgtactcgaattagagatgggtccgtaggcttcaatcgaagtta

SEQ ID NO: 51816 - DNA, 2209 bp, Zea Mays
aaccagagtgctcgtcctttcgcgctgcctgcttcagctccctccctggcctctccctctcgttgccataaaagattccaagcttgcccggcccgccgatcctactgccattaaagtcggcaagcggcgtcggcggcagcagcctgaaaccaggggaaaccgaaccaccacggtcaactatctatctatctgcaatctccatccatctcctcccacacccactgaccaaccacagcacagcagcctcaagatgctttacatggtgtagccggcaagaaccttccctcccgggcgcaaaggggctctctctcctttaatttccttcaagaggggatagatagcccctctttcccccacctgcatcttccctccggttgcgcgctgtccctcttgttggttcttggcatcgatcgtcggttttcgcgccgcctgcggaaatggcggcggggctgctgctcaagatggtcggcttctgcttctgggcgctcttctggctcgccggctccgccaccgtgagcacgaccacccccgccctcgccggcggcggcgaggcggtggtcgtggacgcccggtcagccatcgccgtcacggacgacgacttcgtctgcgccacattggactggtggccgccggagaaatgcgactacggcacctgcagctggggcctcgcctccctcctcaacctgaatctctctaacaaaatcctggtgaatgccgtcaaagcgttctctcctctgaagctccggctgggcggctctctgcaagacatgctgatatacggcaccggcgacactcgccagcaggcgccctgcgccccgtttgtgaagaacgcgtcagccatgttcggtttctcgcagggctgcctgccgctgcgtagatgggacgagctcaacgcgttcttccagaaaaccgggccaaggatcgtttttgggctgaatgcgctgaatggccgggtcccgatgcctgatggttctttaggggggccgtggaattacacgaacgcagcttctttcattcgctacaccgtgagcaagggatacgatgtacatggatgggagctcggaaatgagctcagtggcagcggagtcggggctcgaatcgacgcggaccagtacgcagcagacgtgatcgctctgaaacacatcgtcgacagcgcctaccaaggggttgacgaccatctggttcagaaaatccttgacccttcttacctcgacggcgaggcgagcacgttcagcaaccttcaggggatactcaagtccgcaggcacgtccgctgtcgcctgggttggcgaggctggaggcgcgtacaacagtggccaccaccttgtcactgatgcgtttgtgttcagcttctggtatctggatcagcttgggatgtcgtcgaagtacgacacgaagagctactgcagacagaccttggttggaggcaactatggcctgctcaacacaagtacatttgaaccaaaccctgactattacagtgctttgctgtggcaccgcctcatgggcaccaaggtcctctcgacggcattcaacggcacgaacaagatccgtggctacgcacactgcgcgaaaaactcggaagggatcactctgctcctgatcaacctggacggcagcagcacgaaccgcatctacgtgacgagccaaggcgcgcacgcccagagcggaaggaagaaggggagcgaagggctcggcgaagcagcagcagccgcgctcacgagacaggagtaccatctgactcccaaggacgggaacctgcagagccagcaggtgctgctgaacggcaacgccctggcaaccgacgccgacggggagatcccggagctggagcccgtgcaggtggaggggacgcagcccataaccgtgggcccttactccatcgtgtttgctcacgtccccagcttctacgctcctgcgtgcctgtagctagagttttcgtctggattttttttttccagcctttctcggtgtgcatctcgtaggttaggtaagtctgtccggggtgaacggcgaagcttgttcatctctgctcatagtccgtgaagtgtgtaagctgcgaggctggaaggtttgtggtttatgattgtttgggaaaggagtggtcagatatataatgtgtgagcaaaagaaggaaggaagctggaaatgagataataaaagaaagggtttggagtttattttgtttgagagagcagcagaaaaaggtg

SEQ ID NO: 51817 - DNA, 1426 bp, Zea Mays
cttaacatgtgtcctttcagaatggaaggtggaggctggactgaagaagtacaagccagacatcataattagtgtccatcccctcatgcaacacattcctctgtgggttctcaaatggcaaggcctacagaacagggtagtctttgtaactgtgatcacagacctcaacacatgccaccctacatggtttcatgctgatgtgaatagatgttactgcccttcagaagaagttgccaagcgggcagcactggatgatctacaaccatctcaaatccgcgtgttcggtcttccgattcgaccatctttctgccgtgcagttcttgttaaggatgatttgaggagggaacttgaattggatcctgagcttcctgcagtactgctcatgggaggtggagagggcatgggtcctgtcaaaaagactgccagagccctaggagaatcattgtttgacaaagagcttggaaaaccaattgggcagcttattgtcatttgtggccggaacaaaacgctaagctcctcactgcaggcagttgaatggaaaataccagtaaaggttaggggatttgaaacccaaatggagaagtggatgggagcttgtgattgcattataacaaaggctggaccaggtaccattgctgaagccttgataaggggtcttcctataatccttaatgacttcatacctggacaggaagttggcaacgtaccttatgttgtggacaatggtgcaggtgtgttctcgaaaagccccaaggaaactgctagtcttgttgcccgctggtttggtccagattcagaggaattgaaaaaaatgtcagaaaaggcactgaaattggcccaaccagaagctgtctttgacattgtcaaagacatgcatgagctctcccaggagcaaggtgtcatatcacagatatctagttccttgacttcatccttcttcttaccatcgcctgaaagcacccctctccaacttatctgaaaccatcaagctaggattgatattgttgacatcgtgaacttggcattgtccctacagtgtgggcgtgctttcggctgatccgctcacatggtagttatgggcagggtcgtttgactgacaggttctcgcgtgtgatgatgtttgccttcatgttaacttttgtaaaaaaaacattcattcatattatgtttctggctcccttcgtcatcaaaggggaattggtggtggtggtggcttgtaaaatacactcaaattttgtgcatggacatgtcagacccttatcatgtatactagctgatgtgatccgttcatgtaagtggaagatgtgtataatatgattacagattgttggagtggaaatttatctctctctctatctctatctgtttttagtttggtatatggtcggctgttgtacgagtattttggtggtgaactgaatgtgcc

SEQ ID NO: 51818 - DNA, 1387 bp, Zea Mays
attaaatctcattcaatccactaggattgagagcaaatatagggtggggcaagcaaggcaggcggagcgggcaagggcaagcgagggatgagaatgagggccgtggtgatcacgtgcgccggcgggccggaggtgctggaggcgcgggaggtggaggaccatcccgcgctaggcgaaggagaggtgctcctcgaggtcgccgccgcgggcgtcaatcgcgcggacaccgtgcagcggatgggccggtacccgccgcctgccggcgcgtccccttacccggggctcgagtgctccggcaccatcctcgcgctcggccccaacgtcccctcccgctgggccgtgggcgataaggtttgcgcgctcctcagcggcggcgggtacgcggataaggtggtggcgccggcggggcagctgctgccgatacccgagggggtgtcgctgacgcacgcagccggcttgcccgaggtggcctgcaccgtctggtcaaccgtattcatgaccagtcacctctcccccggtgaatcattccttatccatggaggatccagtggaattggtacattcgctatacagattgctaagcacctcggaattaaggtttttgtcactgcaggaagtgaagaaaaactagcagcctgcaaagctttgggtgccgatgtatgcattaactacagaactgaagacttcgttgaacgtatcaaacaggaaaccaacggaaagggaactacttcgatgctctcttttttggcagctagtgttgatgtgattctggataacattggaggatcatatctccagcgcaacctgaatagcttaggtgttgatggtagacttttcatcattggcttccaagggggcatagcagctgaagtgaacctgcaagctgtgcttgcacgccgtttgaccatacaagctgctggactgcgcaacagaagccttgctaataaggcagagattgttagtgaggtggaaaagaacgtgtggcctgctgtcgctgctggcaaagtgaagccggtgatttacaagacgtttccgttatgtgaagctgctgaggctcataggttgatggaagctagcacccacatcggcaagatactgctgctcccatgactgcacctgtggcgtttgcgctcttgctctcggaggagtcagttcaaaaacatatgcaattcctgagactgtgacaacctgcacggatgttgtactggtgtcgcatgtcttttttatatatatcttgtagtactagattggatcttttaccccgagaaattatcttgtcaattggatccttaaagtgctgatgacatttttctgtgagctatgatataataaatctggcagatagagccactacagcacgtcagtacctgatgccagtgtactgatg

SEQ ID NO: 51819 - DNA, 1423 bp, Zea Mays
attaaatctcattcaatccactaggattgagagcaaatatagggtggggcaagcaaggcaggcggagcgggcaagggcaagcgagggatgagaatgagggccgtggtgatcacgtgcgccggcgggccggaggtgctggaggcgcgggaggtggaggaccatcccgcgctaggcgaaggagaggtgctcctcgaggtcgccgccgcgggcgtcaatcgcgcggacaccgtgcagcggatgggccggtacccgccgcctgccggcgcgtccccttacccggggctcgagtgctccggcaccatcctcgcgctcggccccaacgtcccctcccgctgggccgtgggcgataaggtttgcgcgctcctcagcggcggcgggtacgcggataaggtggtggcgccggcggggcagctgctgccgatacccgagggggtgtcgctgacgcacgcagccggcttgcccgaggtggcctgcaccgtctggtcaaccgtattcatgaccagtcacctctcccccggtgaatcattccttatccatggaggatccagtggaattggtacattcgctatacagattgctaagcacctcggaattaaggtttttgtcactgcaggaagtgaagaaaaactagcagcctgcaaagctttgggtgccgatgtatgcattaactacagaactgaagacttcgttgaacgtatcaaacaggaaaccaacggaaaggctagtatgtatcgagcattatcatcaaatagcgcaacatccctgactgtaatctgaaactcactaccaggtgttgatgtgattctggataacattggaggatcatatctccagcgcaacctgaatagcttaggtgttgatggtagacttttcatcattggcttccaagggggcatagcagctgaagtgaacctgcaagctgtgcttgcacgccgtttgaccatacaagctgctggactgcgcaacagaagccttgctaataaggcagagattgttagtgaggtggaaaagaacgtgtggcctgctgtcgctgctggcaaagtgaagccggtgatttacaagacgtttccgttatgtgaagctgctgaggctcataggttgatggaagctagcacccacatcggcaagatactgctgctcccatgactgcacctgtggcgtttgcgctcttgctctcggaggagtcagttcaaaaacatatgcaattcctgagactgtgacaacctgcacggatgttgtactggtgtcgcatgtcttttttatatatatcttgtagtactagattggatcttttaccccgagaaattatcttgtcaattggatccttaaagtgctgatgacatttttctgtgagctatgatataataaatctggcagatagagccactacagcacgtcagtacctgatgccagtgtactgatg

SEQ ID NO: 51820 - DNA, 88 bp, Zea Mays
tatagatgtctctcagtacagaaggtagaaggtctggccgctgaacctttattgcaacaagagaaccatcaactgtgcgcccctggta

SEQ ID NO: 51821 - DNA, 447 bp, Zea Mays
ccaacctttaataaaagtaggcccaaggttaagaaatgtctccttgagaagttggccgaccatatattgagtatcatcaaacccgttgccgctgttaccactactataggtagcatctgtggttaactgagctctttttgaaatccgcatcttcaccacagctgagagaaatgtgaagagtatctgcagagcaaaggttgacagcaaatggaccaattagatagaatagctggaagagagtgtaggttagtactaaaagcaaaggaagagctcatagttaacctgaatgacgcgagaggcaaggatatgcggacgtgaggcgaagtactgggcaaggaggtcaggatcataatgctgggggagcggcgtagtcaggatggccgaatagtagttgatgtacagtttcagggcttcaaggtcagccatcatcaactccatacaggataa

SEQ ID NO: 51822 - DNA, 2652 bp, Zea Mays
cgcgtctcaagtgtaaaagcggaggagtgggtcgccacttccgtcgtctcagcctgcctgcctggccaccaacacgagcgttcaaaacccaggagctatccagcacatcctagctttccccccttctatggctctatctcatcctgataacaaagcagaaacagtagctgtaggcctcatcagttaccttcccgcacgttctgccacccatagtttatcaattttatcaacctatattaataatccctcgattatgttttccactctgatcgagctcaccctatcgcctggcatgtgtgtatagtactataatacactctcccaatcttgttctctcctcctactcatcctctctgtcttaagaggaggccagtccggaggaagaagggacaggaggagacacagacagagagagaggggcaggaattcaattccaccgacccacgcacctctaggtcaccccgctcccacccctttcctccatttacctccacctatatagctccccataattccccgggcctcccctctcttgttaggagtacacacttctccttagaattggagctgtacgagccacccagcaactttcttcatcatcttcttcagccctcgctctgtccgtcgacacagcagctttgcttgccaccaagctagccatgcaggaggagtaagagtacaaccgtaggagagagagagagagagagagagagagagagagctaacaccaccccgattccacccaccactgtccctagctagcttatttacaggcgttcgtgatcgccaacagcttctcgtcagaaagagtgcaacgggccggccgggcagaagaggtagctgggagctagagagaaaaaaaaaaggtgcaccgagcaacccaggccagggaggaagggaggagtgagccgtcagtcgaccgtttccggcgaactcacagcaggcagatggcaggcggcggattcgtggaggacatgatgagggagcagagcctgctggaggcgacgtgcggcgacctcttcgaccacatcgacgacctcctcgacttccccaacgaggactccgccgccgccgtgctcctcctggacgcgccggcgcccgggagcccgctgtcggcgcgcatcatcgacgtcggccgcgccggcaatgcgctcgccccgcctgctgcccccgcgcagcacgacgcttccgctagcgccttcttcgccgccgcggggaacgatgtgttcgacaccaaggacgtcgtcggcgcacacatcggctcgtgcgacgacattgacatggacatggcgcagctggagtggctgtcggggctcttcgacgacgcctccatcccgcacgagccggtgttccctggcgcgacggcgggcggcgcggcgcccatcatgaagagctccgcgctggcggccggcgcgctgctgccgcaggacaaaatggaggacgcgctgctgttccgcagctccagccccatctcggtgctggagcacggcagcggtggcagcggcagcgccagcgccaccggctccgcgtcctcgtcctcctcctcggcgtcgtcctcctcggagtccttctccgggagtgggagtgggagtggcggagggcatgtttggtcggcgccagtgtcgccgcgcccggcgccgccgccggcgctcgtcataccggcgcgcgcacggagcaagcgctcccgttcgtccgcgttcaccggagccgccgcgcgcgccggggcggagacgcccaccatcctcgtgccgacgcccatgtactcctccgggtcggcccactcggaccccgagagcatcgccgagtccagcccgcacccggcgccgcccatgaagaagaagaagaaggccaagaagcctgtggtccccgcgccagctgcctcttctgacgacaacgatggcgacgccgactacgaggaaggcggcgagcaaacggagccgcagggcggcgccgtcaggaggtgcacacattgccagatcgagaagacgccgcagtggcgcgcggggccgctggggcccaagacgctctgcaacgcctgcggcgtgcgctacaagtccggtcgtctgttcccggagtaccgccccgcggcgagccccaccttcgtgccgtccatccactccaactcgcacaagagggtggtggagatgcgccagaaggctgtccggagcggcgacccgtcgtgcgaccttctccatttcatccgccgccgggattgacgtcccggcatggcgtcgccggactgtcggtcggtctcgtcccccatatagctatatatgtatgcatgcatggttgcttcatcagtcgtcgtcgcccatcatggtcatcatcaccgcttcaccggtcaccgccatggatcgtctcccgcccatcatcacatgcattggtttgtgtcagcatccatccaatcccaatccatcgccgggcgtcccgacgttgttagttcattaggtcttttttttcctcatcgggggctagtgttattttacctttgatccttttgtctattggttaattggttccccctggatgttttttgtttgtatagagagtgaaaaagagagaagaaatagatgagtcagagtggttgctgcattgcaataaaaaaaacaaggagaaaaaaaataaactaatttcccttgaaaaaaataaaaa

SEQ ID NO: 51823 - DNA, 3085 bp, Zea Mays
cgcgtctcaagtgtaaaagcggaggagtgggtcgccacttccgtcgtctcagcctgcctgcctggccaccaacacgagcgttcaaaacccaggagctatccagcacatcctagctttccccccttctatggctctatctcatcctgataacaaagcagaaacagtagctgtaggcctcatcagttaccttcccgcacgttctgccacccatagtttatcaattttatcaacctatattaataatccctcgattatgttttccactctgatcgagctcaccctatcgcctggcatgtgtgtatagtactataatacactctcccaatcttgttctctcctcctactcatcctctctgtcttaagaggaggccagtccggaggaagaagggacaggaggagacacagacagagagagaggggcaggaattcaattccaccgacccacgcacctctaggtcaccccgctcccacccctttcctccatttacctccacctatatagctccccataattccccgggcctcccctctcttgttaggagtacacacttctccttagaattggagctgtacgagccacccagcaactttcttcatcatcttcttcagccctcgctctgtccgtcgacacagcagctttgcttgccaccaagctagccatgcaggaggagtaagagtacaaccgtaggagagagagagagagagagagagagagagagagctaacaccaccccgattccacccaccactgtccctagctagcttatttacaggcgttcgtgatcgccaacagcttctcgtcagaaagagtgcaacgggccggccgggcagaagaggtagctgggagctagagagaaaaaaaaaaggtgcaccgagcaacccaggccagggaggaagggaggagtgagccgtcagtcgaccgtttccggcgaactcacaggcagatggcaggcggcggattcgtggaggacatgatgagggagcagagcctgctggaggcgacgtgcggcgacctcttcgaccacatcgacgacctcctcgacttccccaacgaggactccgccgccgccgtgctcctcctggacgcgccggcgcccgggagcccgctgtcggcgcgcatcatcgacgtcggccgcgccggcaatgcgctcgccccgcctgctgcccccgcgcagcacgacgcttccgctagcgccttcttcgccgccgcggggaacgatgtgttcgacaccaaggacgtcgtcggcgcacacatcggctcgtgcgacgacattgacatggacatggcgcagctggagtggctgtcggggctcttcgacgacgcctccatcccgcacgagccggtgttccctggcgcgacggcgggcggcgcggcgcccatcatgaagagctccgcgctggcggccggcgcgctgctgccgcaggacaaaatggaggacgcgctgctgttccgcagctccagccccatctcggtgctggagcacggcagcggtggcagcggcagcgccagcgccaccggctccgcgtcctcgtcctcctcctcggcgtcgtcctcctcggagtccttctccgggagtgggagtgggagtggcggagggcatgtttggtcggcgccagtgtcgccgcgcccggcgccgccgccggcgctcgtcataccggcgcgcgcacggagcaagcgctcccgttcgtccgcgttcaccggagccgccgcgcgcgccggggcggagacgcccaccatcctcgtgccgacgcccatgtactcctccgggtcggcccactcggaccccgagagcatcgccgagtccagcccgcacccggcgccgcccatgaagaagaagaagaaggccaagaagcctgtggtccccgcgccagctgcctcttctgacgacaacgatggcgacgccgactacgaggaaggcggcgagcaaacggagccgcagggcggcgccgtcaggaggtgcacacattgccagatcgagaagacgccgcagtggcgcgcggggccgctggggcccaagacgctctgcaacgcctgcggcgtgcgctacaagtccggtcgtctgttcccggagtaccgccccgcggcgagccccaccttcgtgccgtccatccactccaactcgcacaagagggtggtggagatgcgccagaaggctgtccggagcggcgacccgtcgtgcgaccttctccatttcatccgccgccgggattgacgtcccggcatggcgtcgccggactgtcggtcggtctcgtcccccatatagctatatatgtatgcatgcatggttgcttcatcagtcgtcgtcgcccatcatggtcatcatcaccgcttcaccggtcaccgccatggatcgtctcccgcccatcatcacatgcattggtttgtgtcagcatccatccaatcccaatccatcgccgggcgtcccgacgttgttagttcattaggtcttttttttcctcatcgggggctagtgttattttacctttgatccttttgtctattggttaattggttccccctggatgttttttgtttgtatagagagtgaaaaagagagaagaaatagatgagtcagagtggttgctgcattgcaataaaaaaaacaaggagagtgcttgaagcaggtgaaagggcaatttgttggtttgctaattagaagagaggttctgtcaggtcaggtcaggtagttgctatcattattcatgaggattttcaaacttaatagggggacagccatcatccatcatagtttgtatttggaacttggtatactgaactctgaaaattctttttgcagttcatctatgcttagggattgataagtgttgtctggtttcttctatattgatagtgctaccttttagccaataattagttatgtaagagttgctcttggtcttgcctccatctactccctctgttcctgcaatacagggcattctaacaaagaattaacgcaacactcaaatgacgcttgtactcatgaattatatcttattagggctagtttggaaactccattttcccattgaatttctatttttaagaaaaaaataaactaatttcccttgaaaaaaataaaaa

SEQ ID NO: 51824 - DNA, 2101 bp, Zea Mays
cttgaattcagttgaaattgggggatatataaaatctccccctccgaccctcctgtcccgctcctcttctatttgttcgtttacagccccccagctcatcaaagatcacattttgagcactgctatataaacaaagttggcaggagtcgtagattagcaggccgcccgtctatttttttgttcatgttttgaaagtgaaggaggatttgggtgggcaacgtctacctctgccaaaaataatcggcgtccatatgcaggcgtcgtatctttggaataagtgaatagcaggcagatggcaggcggcggattcgtggaggacatgatgagggagcagagcctgctggaggcgacgtgcggcgacctcttcgaccacatcgacgacctcctcgacttccccaacgaggactccgccgccgccgtgctcctcctggacgcgccggcgcccgggagcccgctgtcggcgcgcatcatcgacgtcggccgcgccggcaatgcgctcgccccgcctgctgcccccgcgcagcacgacgcttccgctagcgccttcttcgccgccgcggggaacgatgtgttcgacaccaaggacgtcgtcggcgcacacatcggctcgtgcgacgacattgacatggacatggcgcagctggagtggctgtcggggctcttcgacgacgcctccatcccgcacgagccggtgttccctggcgcgacggcgggcggcgcggcgcccatcatgaagagctccgcgctggcggccggcgcgctgctgccgcaggacaaaatggaggacgcgctgctgttccgcagctccagccccatctcggtgctggagcacggcagcggtggcagcggcagcgccagcgccaccggctccgcgtcctcgtcctcctcctcggcgtcgtcctcctcggagtccttctccgggagtgggagtgggagtggcggagggcatgtttggtcggcgccagtgtcgccgcgcccggcgccgccgccggcgctcgtcataccggcgcgcgcacggagcaagcgctcccgttcgtccgcgttcaccggagccgccgcgcgcgccggggcggagacgcccaccatcctcgtgccgacgcccatgtactcctccgggtcggcccactcggaccccgagagcatcgccgagtccagcccgcacccggcgccgcccatgaagaagaagaagaaggccaagaagcctgtggtccccgcgccagctgcctcttctgacgacaacgatggcgacgccgactacgaggaaggcggcgagcaaacggagccgcagggcggcgccgtcaggaggtgcacacattgccagatcgagaagacgccgcagtggcgcgcggggccgctggggcccaagacgctctgcaacgcctgcggcgtgcgctacaagtccggtcgtctgttcccggagtaccgccccgcggcgagccccaccttcgtgccgtccatccactccaactcgcacaagagggtggtggagatgcgccagaaggctgtccggagcggcgacccgtcgtgcgaccttctccatttcatccgccgccgggattgacgtcccggcatggcgtcgccggactgtcggtcggtctcgtcccccatatagctatatatgtatgcatgcatggttgcttcatcagtcgtcgtcgcccatcatggtcatcatcaccgcttcaccggtcaccgccatggatcgtctcccgcccatcatcacatgcattggtttgtgtcagcatccatccaatcccaatccatcgccgggcgtcccgacgttgttagttcattaggtcttttttttcctcatcgggggctagtgttattttacctttgatccttttgtctattggttaattggttccccctggatgttttttgtttgtatagagagtgaaaaagagagaagaaatagatgagtcagagtggttgctgcattgcaattgcagttgcttgcaagctaggtaggtgagaaggagagctaaaccagcagcagagggagacagatttagagaggaaactttgcagctagtcagtcagtcacttagaaaaaaaacaaggagaaaaaaaataaactaatttcccttgaaaaaaataaaaa

SEQ ID NO: 51825 - DNA, 1467 bp, Zea Mays
atgaagttccaacgtctcctgcagttgctctatttggccaagtctgaaaagatgtttcaacgtttaaatgttgaaaaggtggttcctaacgttttatcgttttaccgctttaataagcatgcttccttcctctcctcacgctctctttgttggtcccagcaatggcgttgtggtgccctccggcgtgcccggcaagatccgccccatggggggcccagatctgctctccccgacctttgtgcgccggggatctatggtggtggtaggggcctgctatggcgacgcgtgctgcgtggctgctccggatccgatgcgcagcgggcttccctcctcctttcgacggtgatcccctgttgtggcgacgtggcccacagtcggtggtcgtggcgacgatcgcggcgagtgactgcgcccatggccagggccagggcggtggcgacggcggaggctgcatgctttgacctggggttctggcctaacgatgtgctggagggcatcttgggcgaaatcctcagcgacggtgacgcctgtgggtgccacttacccctgttgagggcgtcacattgctctgtcttccatgggcgaaagaccggtctatctcgtacatgtgacggtggcgtccttaacgtcactccattcctaaaggcgtcacgtttgaagttcatctcggcctcgacgttgcctgcggttgatgctttcgcttcttggcgtctggattgcgggtggaggtgggtttttgcaacgtgaagtcgaagctaccacgttaggggatatggctcggcaacgatgacatgcggtgaacccccttcctcgtggtctggattgtttgggaggtcgagcaaaagccagaggtgggtgttggatcaagaccgttggtggataatcggagctgcctcgtgtgggtgtgttgaggcttggcaacgatggatggtcacgatcttcctccttctgtgtcaggttttaggtgtagacgttgtcgtgtttcttttggccatgtgcggcccgtctggcaaagccggagctgctagtaccttgtgtggagcttggcgacgatgactctggatgggctttgtgtgggggttgccgctgcctgtttgtttgggcactctgtgtaggttttgggcccggtttttccttaaaactgtgtcaattctaatcttcttcttaatggaaaggcagagctcctgccattacgttcaaaaaaagaatttgtagaattttgggtcagttcacagatgcttctccagagcataaaatacaatctgttgcatacatcagtgcaaatggggtactccaatatctaggatctgaccgagtgcctcaactcaatgtcagatagtctgcaaggctggaagcataatttgactacagggtacttattaaatacaaatggttatggctgccagaatttatattaaataaacaatcttaatttcgtccaggtttaagtcatctttcaatgtttaa

SEQ ID NO: 51826 - DNA, 1570 bp, Zea Mays
cttggtccgctccggtggtctgcctccccaagggatccgaatattccacgctgtctctgctgctgttttggcatggagatggaggcaggcacaggcagggaggttgattttgactgacaatccaggattcaagatgccccgactccgatgaatcacacactacgtacttgcccaatgattcgatatccccctgtcgaaataactaacataatgtataaaattcccctcaatcaaaaagataatttacaagattcttgcgtttaggataatataatgcgtatcattgccgcccgggaaagggttttagattgggcgagacgtggtttccggcgaccgggcgcgggtttagggcaggcagattaatgactgatgacacgtatctggacaagtgacagcatggccgatggcccacagcccacatgaggcagtgaattattaggggggcgtcaccacgtcaggtcaggtttgcatgcattgcaacgtggcgtctctgcagggggtgggacatgcatgcattgcatgatgttcatgaatcatatgaaccatgcatgattcgactgactccaaccgtatcagcatcttcttctgttttggtctctgttaagaaaaaaaataaaatgactactgattctgcgtgtcatggtgttctttgaaaagttgctggcgcgaacacaaacacgctaaagtccatccatccgtgcgtccattccatgcacacgacatggcttcaatttcgcgtaacgcatgcatgactagggccgttggaatacctgcctcgtgagcgtgcatgcgctgccaaatgtggcggtaacctgctgctagctgctttcgtgtctacaaacagcctactccgtgtgcagcgacatacgtgcggccgggcagatgagtggggcattggcagcctgcaaactggatcgggaagagacaaaaaaaagttaggctcgggatgcatgatgcatgcccgacttgattacccgaggacgccttaacccaaccggccaaccttggtacggacggacacggacgtatgctgctcgttctactattattacaatatgaatatcgcggttcttggcaatggccagcaacgtacggtgattcttcgtcgtgtctctagagatcaatacagtccagcagccggacctccgcattgaagctggctagacagcctagacttgctacagagtacggaggcacccgaccagcgttcggcgccgcttccgccgccccaaggccggaccgcggccgaaccgccgccgtcgtcgttgaaggatctcacgggaacgtgcacaggctcgaccgacgccgccatgggcaggcgcgcgcacgtacggcgagttcgttctggacgggacgacgagccgccagccagtccaacagccgcgcgcgcgcgcgcaacgccataacgcctccggcgcggcagcgcccctctcccacccgcctacctagtcactgaatccaaaaccgggtcggagcgccccaggacgcgcggcagcgcccccggctccaggccgcgctggattctggcctggttccaagcccgtcgacgccgccgccatttggcccggcg

SEQ ID NO: 51827 - DNA, 2742 bp, Zea Mays
gtagaaactcaatgtcagtggatatttgaagcacacggtcttgtctcgctcacccgggcaatccgcgcgaggtgcggcgcacatagccaggacccagaggcgattaggcgaacgggcggcgcggcacgagtcgagttttgaccgtgcggcgcgccgcgcgcgtatcaggcaacaatggagacgccgcgccttgtagtcgggcggcgtcgcggggccactcctcggttccggcggcggcgcctgccgcatccgcgcggcggggcacattgcttccccttcgcccgcgctcgaccacccgtgcttataacccggtgcttctacttcccctcttccagttgcgttcgaatcccacacccagcaccactccgtgcggccacgctctcacaattgctgcgcacgcgcgtgcgtgtatgcgtggctgttcctcagctgttccggtcctcccattcgtgtttcagggtggggaacacggcgattctcgaagctccagtaacgtcaggtaccaggtttgcttgatgagcaacgtgagggtgatgttggggagctctttagcctggctcaatggagtaattcactcttcccttgctttacctaatatatcctgtgcattaacaagcagcggcttatggccatgggggagccgaagaaactgcaggatgaaaataatttgcttctcgaggaaatacgagtactacaaacagaaataaaaggtattcccctagaatcaacacaattcagtgagttacccctgcagatagatacaatagtcgtttctggaatgatcagcatatcagaagcatctgattttatagagaaagttgtcactaatagaagcataatacaaagtgccttttctgattttcatcataaaccaaatactgaatccatcacttattaagggaagctaaccagacgagaagtttgcatctcagaggtgcccaaatcttccaaatcttttcagctggctcaaaatttattgatccagcaaggaagcgatcataagccgactttgctgaatattcccctgcgattgatggcagccaatgcacatccaagtccccccatcttaagctgaacttctcgagttaataaatcacagaccaggaaaaaaaatcaggaggaattccgcaggcagactgtcagatagatcagtcacccacctattattctgcagtgcttcctgaactgttctgattttctaaagtctcctaggaatgcggctcaggagagctggtgcaatataacaacagactgaccatgtatccaacgatcagtctatccatgagaggggaaaaatggcagacgacaaggataggcacgtgaccatagagagagaatcactttaaatgctggttttgacggttgttctatgcacaaacagtagctaatctagaacttttactgtaatcctaggacctttccttttggtaaaacacacaagtaaatctttagcgtccttttagtttgttttataggcaatgggattaatcttggatttttttttcggacaacgcaggagagcttcatgtcatttcattaagaagagggattaatctcagattgtactcaatatttgaagaactaaaatgctattgtatttttcaaaacactagaagaattcctgaatcctaattttctgagcctgctgagccaatcacctgcgactgtgttagattctggttcccacacctgtgtcctggtaacactattcctgcctatgttggactcctatatggctatatccacgtgagtgagcttgaagatactcacaaacatggcaacttgtatatgcttcccactgatgtttcacccagtataactgcaattactttataatagtcaagtggcatatttgatttgagtcttttgatgtcatatttgttgatgctatatttgagactatgttcaatgcaggaaacatcttcatattgtgtatatctacagtaaaatttactcaataacatcatgtggatcattatcaacctatgttgtcagtttttatcttgtgagattcaaaaatgggtaatttggtggaggtgatactacccaagcgagacatttttttgctcattctagatggatgctctaaactggacattcttctgaagatgaaggcaataaagtatggatctgtgccagtacagataagctttcccagcgatgaatcaagggagtcggaggagcatgattggcacaatacagcactgtctcagtacatcatctcaacctatggagatccgtctctttctcaagtacttgatgactttgtaagttcacaatctcatgggagaatagctatcttgtcacaagctgttcactgtgcacaatcagttatctcttaatagatcaaataatgttctgaacatcagcattggtcgatcaaagttgcaatcaaaaggcccaggaagctgattgcgtgaaactatcttattttctgaagttacatgccttttgaggtttgaatttagcatagtttacttaattacttcccaatgtgcagaacaatgacccattgcattgtcagacctcgccggagaagcaacctcctgttgccggcgagctcaccctgctggtcacagaaaagactcacgcacacacacgaacacaagtgggcacactctgatttggtgctgtgaacaaccaacagcttttctgactctatttctctgtatataaagagacgtgtacagaccatgagcttacaacctgacagtttaccgcttaaagaaaggaaaaagaaat

SEQ ID NO: 51828 - DNA, 3564 bp, Zea Mays
gtagaaactcaatgtcagtggatatttgaagcacacggtcttgtctcgctcacccgggcaatccgcgcgaggtgcggcgcacatagccaggacccagaggcgattaggcgaacgggcggcgcggcacgagtcgagttttgaccgtgcggcgcgccgcgcgcgtatcaggcaacaatggagacgccgcgccttgtagtcgggcggcgtcgcggggccactcctcggttccggcggcggcgcctgccgcatccgcgcggcggggcacattgcttccccttcgcccgcgctcgaccacccgtgcttataacccggtgcttctacttcccctcttccagttgcgttcgaatcccacacccagcaccactccgtgcggccacgctctcacaattgctgcgcacgcgcgtgcgtgtatgcgtggctgttcctcagctgttccggtcctcccattcgtgtttcagggtggggaacacggcgattctcgaagctccagtaacgtcaggtaccaggtttgcttgatgagcaacgtgagggtgatgttggggagctctttagcctggctcaatggagtaattcactcttcccttgctttacctaatatatcctgtgcattaacaagcagcggcttatggccatgggggagccgaagaaactgcaggatgaaaataatttgcttctcgaggaaatacgagtactacaaacagaaataaaaggtattcccctagaatcaacacaattcagtgagttacccctgcagatagatacaatagtcgtttctggaatgatcagcatatcagaagcatctgattttatagagaaagttgtcactaatagaagcataatacaaagtgccttttctgattttcatcataaaccaaatactgaatccatcacttattaagggaagctaaccagacgagaagtttgcatctcagaggtgcccaaatcttccaaatcttttcagctggctcaaaatttattgatccagcaaggaagcgatcataagccgactttgctgaatattcccctgcgattgatggcagccaatgcacatccaagtccccccatcttaagctgaacttctcgagttaataaatcacagaccaggaaaaaaaatcaggaggaattccgcaggcagactgtcagatagatcagtcacccacctattattctgcagtgcttcctgaactgttctgattttctaaagtctcctaggaatgcggctcaggagagctggtgcaatataacaacagactgaccatgtatccaacgatcagtctatccatgagaggggaaaaatggcagacgacaaggataggcacgtgaccatagagagagaatcactttaaatgctggttttgacggttgttctatgcacaaacagtagctaatctagaacttttactgtaatcctaggacctttccttttggtaaaacacacaagtaaatctttagcgtccttttagtttgttttataggcaatgggattaatcttggatttttttttcggacaacgcaggagagcttcatgtcatttcattaagaagagggattaatctcagattgtactcaatatttgaagaactaaaatgctattgtatttttcaaaacactagaagaattcctgaatcctaattttctgagcctgctgagccaatcacctgcgactgtgttagattctggttcccacacctgtgtcctggtaacactattcctgcctatgttggactcctatatggctatatccacgtgagtgagcttgaagatactcacaaacatggcaacttgtatatgcttcccactgatgtttcacccagtataactgcaattactttataatagtcaagtggcatatttgatttgagtcttttgatgtcatatttgttgatgctatatttgagactatgttcaatgcaggaaacatcttcatattgtgtatatctacagtaaaatttactcaataacatcatgtggatcattatcaacctatgttgtcagtttttatcttgtgagattcaaaaatgggtaatttggtggaggtgatactacccaagtatgcaacttctcttcactaactaaacctttcgtatataatacttgatagactgtttggacaccttaagcttttatgttgtagcggtaccattagtcatatgaatggggaagtttcttttgagttgatttaatgtaaaaaatgatgagcaatataaatttataacatgcttctaagcttccttttagttattactatgtacgagtaaactcctgaaatttgaatattaatatccaggcgagacatttttttgctcattctagatggatgctctaaactggacattcttctgaaggtttgaatttgattgtcaacttttagttttgatgacatagttcttaactgtgttttttattccatcaggacagcacgtcccaaatgattttgtgttaactagcaaacagttcgagataacttatgttttgcagtattgtcatattggtatatagtctacaattttcttctcttctcgttcttgctcacatgtgttacatttgaaattcgttataaaccttattaatatggactgtttttggcttgtgccacatttacatcttgcttattgcacgcaaagctatcatgctcaccgcattggtacggcacaaaataggtacatcagcataaacgtggatgtaattcatgatgtaaggagagctgaggcagagtatgaatcttatattttgctggtctttgccataataacaaaatatggactgggtaaagatacactcctagtgtgcaaaaagacgtaacaggtcctattatcttatctcgctattctcttattttagctgatgcttctgtatttgtgtagttctacaggcattttactcctaattttgcctcttttatgcagtacatcaactggtggtggtctttactattagaaccatctcagctctcctatttcagtcgttatatgttgttatatgttacatggctaccctgacgactttgagcgatatgtaggagtattagatttggggactattgtctcccccgttgaccttccaaatatatatttcaggacacaaaacataaagggaaatataaaagtctgttgtggttattttctagcccactgctgtgtctcttatttctctttgtgtgcagatgaaggcaataaagtatggatctgtgccagtacagataagctttcccagcgatgaatcaagggagtcggaggagcatgattggcacaatacagcactgtctcagtacatcatctcaacctatggagatccgtctctttctcaagtacttgatgactttaacaatgacccattgcattgtcagacctcgccggagaagcaacctcctgttgccggcgagctcaccctgctggtcacagaaaagactcacgcacacacacgaacacaagtgggcacactctgatttggtgctgtgaacaaccaacagcttttctgactctatttctctgtatataaagagacgtgtacagaccatgagcttacaacctgacagtttaccgcttaaagaaaggaaaaagaaat

SEQ ID NO: 51829 - DNA, 1704 bp, Zea Mays
agtggatatttgaagcacacggtcttgtctcgctcacccgggcaatccgcgcgaggtgcggcgcacatagccaggacccagaggcgattaggcgaacgggcggcgcggcacgagtcgagttttgaccgtgcggcgcgccgcgcgcgtatcaggcaacaatggagacgccgcgccttgtagtcgggcggcgtcgcggggccactcctcggttccggcggcggcgcctgccgcatccgcgcggcggggcacattgcttccccttcgcccgcgctcgaccacccgtgcttataacccggtgcttctacttcccctcttccagttgcgttcgaatcccacacccagcaccactccgtgcggccacgctctcacaattgctgcgcacgcgcgtgcgtgtatgcgtggctgttcctcagctgttccggtcctcccattcgtgtttcagggtggggaacacggcgattctcgaagctccagtaacgtcaggtaccaggtttgcttgatgagcaacgtgagggtgatgttggggagctctttagcctggctcaatggaatatcctgtgcattaacaagcagcggcttatggccatgggggagccgaagaaactgcaggatgaaaataatttgcttctcgaggaaatacgagtactacaaacagaaataaaaggaaacatcttcatattgtgtatatctacagtaaaatttactcaataacatcatgtggatcattatcaacctatgttgtcagtttttatcttgtgagattcaaaaatgggtaatttggtggaggtgatactacccaagtacatcagcataaacgtggatgtaattcatgatgtaaggagagctgaggcagagtatgaatcttatattttgctggtctttgccataataacaaaatatggactgggtaaagatacactcctagtgtgcaaaaagacgtaacaggtcctattatcttatctcgctattctcttattttagctgatgcttctgtatttgtgtagttctacaggcattttactcctaattttgcctcttttatgcagtacatcaactggtggtggtctttactattagaaccatctcagctctcctatttcagtcgttatatgttgttatatgttacatggctaccctgacgactttgagcgatatgtaggagtattagatttggggactattgtctcccccgttgaccttccaaatatatatttcaggacacaaaacataaagggaaatataaaagtctgttgtggttattttctagcccactgctgtgtctcttatttctctttgtgtgcagatgaaggcaataaagtatggatctgtgccagtacagataagctttcccagcgatgaatcaagggagtcggaggagcatgattggcacaatacagcactgtctcagtacatcatctcaacctatggagatccgtctctttctcaagtacttgatgactttaacaatgacccattgcattgtcagacctcgccggagaagcaacctcctgttgccggcgagctcaccctgctggtcacagaaaagactcacgcacacacacgaacacaagtgggcacactctgatttggtgctgtgaacaaccaacagcttttctgactctatttctctgtatataaagagacgtgtacagaccatgagcttacaacctgacagtttaccgcttaaagaaaggaaaaagaaat

SEQ ID NO: 51830 - DNA, 3723 bp, Zea Mays
agtggatatttgaagcacacggtcttgtctcgctcacccgggcaatccgcgcgaggtgcggcgcacatagccaggacccagaggcgattaggcgaacgggcggcgcggcacgagtcgagttttgaccgtgcggcgcgccgcgcgcgtatcaggcaacaatggagacgccgcgccttgtagtcgggcggcgtcgcggggccactcctcggttccggcggcggcgcctgccgcatccgcgcggcggggcacattgcttccccttcgcccgcgctcgaccacccgtgcttataacccggtgcttctacttcccctcttccagttgcgttcgaatcccacacccagcaccactccgtgcggccacgctctcacaattgctgcgcacgcgcgtgcgtgtatgcgtggctgttcctcagctgttccggtcctcccattcgtgtttcagggtggggaacacggcgattctcgaagctccagtaacgtcaggtaccaggtttgcttgatgagcaacgtgagggtgatgttggggagctctttagcctggctcaatggaatatcctgtgcattaacaagcagcggcttatggccatgggggagccgaagaaactgcaggatgaaaataatttgcttctcgaggaaatacgagtactacaaacagaaataaaaggtgcagtctcggttaccaacattttcaggattaggttatgtggatgataatgtgaaatttcttaaacttcagcaatcctatgctgcttgttgatatgattgttttactttccatttcttgttcttaactatagtggtaagctgcatgcatcaaatacctttcagtatgcttttacacattccatcttctcatggcattttttcaggtattcccctagaatcaacacaattcagtgagttacccctgcagatagatacaatagtcgtttctggaatgatcagcatatcagaagcatctgattttatagagaaagttgtcactaatagaagcataatacaaagtgccttttctgattttcatcataaaccaaatactgaatccatcacttattaagggaagctaaccagacgagaagtttgcatctcagaggtgcccaaatcttccaaatcttttcagctggctcaaaatttattgatccagcaaggaagcgatcataagccgactttgctgaatattcccctgcgattgatggcagccaatgcacatccaagtccccccatcttaagctgaacttctcgagttaataaatcacagaccaggaaaaaaaatcaggaggaattccgcaggcagactgtcagatagatcagtcacccacctattattctgcagtgcttcctgaactgttctgattttctaaagtctcctaggaatgcggctcaggagagctggtgcaatataacaacagactgaccatgtatccaacgatcagtctatccatgagaggggaaaaatggcagacgacaaggataggcacgtgaccatagagagagaatcactttaaatgctggttttgacggttgttctatgcacaaacagtagctaatctagaacttttactgtaatcctaggacctttccttttggtaaaacacacaagtaaatctttagcgtccttttagtttgttttataggcaatgggattaatcttggatttttttttcggacaacgcaggagagcttcatgtcatttcattaagaagagggattaatctcagattgtactcaatatttgaagaactaaaatgctattgtatttttcaaaacactagaagaattcctgaatcctaattttctgagcctgctgagccaatcacctgcgactgtgttagattctggttcccacacctgtgtcctggtaacactattcctgcctatgttggactcctatatggctatatccacgtgagtgagcttgaagatactcacaaacatggcaacttgtatatgcttcccactgatgtttcacccagtataactgcaattactttataatagtcaagtggcatatttgatttgagtcttttgatgtcatatttgttgatgctatatttgagactatgttcaatgcaggaaacatcttcatattgtgtatatctacagtaaaatttactcaataacatcatgtggatcattatcaacctatgttgtcagtttttatcttgtgagattcaaaaatgggtaatttggtggaggtgatactacccaagtatgcaacttctcttcactaactaaacctttcgtatataatacttgatagactgtttggacaccttaagcttttatgttgtagcggtaccattagtcatatgaatggggaagtttcttttgagttgatttaatgtaaaaaatgatgagcaatataaatttataacatgcttctaagcttccttttagttattactatgtacgagtaaactcctgaaatttgaatattaatatccaggcgagacatttttttgctcattctagatggatgctctaaactggacattcttctgaaggtttgaatttgattgtcaacttttagttttgatgacatagttcttaactgtgttttttattccatcaggacagcacgtcccaaatgattttgtgttaactagcaaacagttcgagataacttatgttttgcagtattgtcatattggtatatagtctacaattttcttctcttctcgttcttgctcacatgtgttacatttgaaattcgttataaaccttattaatatggactgtttttggcttgtgccacatttacatcttgcttattgcacgcaaagctatcatgctcaccgcattggtacggcacaaaataggtacatcagcataaacgtggatgtaattcatgatgtaaggagagctgaggcagagtatgaatcttatattttgctggtctttgccataataacaaaatatggactgggtaaagatacactcctagtgtgcaaaaagacgtaacaggtcctattatcttatctcgctattctcttattttagctgatgcttctgtatttgtgtagttctacaggcattttactcctaattttgcctcttttatgcagtacatcaactggtggtggtctttactattagaaccatctcagctctcctatttcagtcgttatatgttgttatatgttacatggctaccctgacgactttgagcgatatgtaggagtattagatttggggactattgtctcccccgttgaccttccaaatatatatttcaggacacaaaacataaagggaaatataaaagtctgttgtggttattttctagcccactgctgtgtctcttatttctctttgtgtgcagatgaaggcaataaagtatggatctgtgccagtacagataagctttcccagcgatgaatcaagggagtcggaggagcatgattggcacaatacagcactgtctcagtacatcatctcaacctatggagatccgtctctttctcaagtacttgatgactttaacaatgacccattgcattgtcagacctcgccggagaagcaacctcctgttgccggcgagctcaccctgctggtcacagaaaagactcacgcacacacacgaacacaagtgggcacactctgatttggtgctgtgaacaaccaacagcttttctgactctatttctctgtatataaagagacgtgtacagaccatgagcttacaacctgacagtttaccgcttaaagaaaggaaaaagaaat

SEQ ID NO: 51831 - DNA, 3784 bp, Zea Mays
agtggatatttgaagcacacggtcttgtctcgctcacccgggcaatccgcgcgaggtgcggcgcacatagccaggacccagaggcgattaggcgaacgggcggcgcggcacgagtcgagttttgaccgtgcggcgcgccgcgcgcgtatcaggcaacaatggagacgccgcgccttgtagtcgggcggcgtcgcggggccactcctcggttccggcggcggcgcctgccgcatccgcgcggcggggcacattgcttccccttcgcccgcgctcgaccacccgtgcttataacccggtgcttctacttcccctcttccagttgcgttcgaatcccacacccagcaccactccgtgcggccacgctctcacaattgctgcgcacgcgcgtgcgtgtatgcgtggctgttcctcagctgttccggtcctcccattcgtgtttcagggtggggaacacggcgattctcgaagctccagtaacgtcaggttggacggcgtcgaagcacatagtgatcaggtaccaggtttgcttgatgagcaacgtgagggtgatgttggggagctctttagcctggctcaatggagtaattcactcttcccttgctttacctaatatatcctgtgcattaacaagcagcggcttatggccatgggggagccgaagaaactgcaggatgaaaataatttgcttctcgaggaaatacgagtactacaaacagaaataaaaggtgcagtctcggttaccaacattttcaggattaggttatgtggatgataatgtgaaatttcttaaacttcagcaatcctatgctgcttgttgatatgattgttttactttccatttcttgttcttaactatagtggtaagctgcatgcatcaaatacctttcagtatgcttttacacattccatcttctcatggcattttttcaggtattcccctagaatcaacacaattcagtgagttacccctgcagatagatacaatagtcgtttctggaatgatcagcatatcagaagcatctgattttatagagaaagttgtcactaatagaagcataatacaaagtgccttttctgattttcatcataaaccaaatactgaatccatcacttattaagggaagctaaccagacgagaagtttgcatctcagaggtgcccaaatcttccaaatcttttcagctggctcaaaatttattgatccagcaaggaagcgatcataagccgactttgctgaatattcccctgcgattgatggcagccaatgcacatccaagtccccccatcttaagctgaacttctcgagttaataaatcacagaccaggaaaaaaaatcaggaggaattccgcaggcagactgtcagatagatcagtcacccacctattattctgcagtgcttcctgaactgttctgattttctaaagtctcctaggaatgcggctcaggagagctggtgcaatataacaacagactgaccatgtatccaacgatcagtctatccatgagaggggaaaaatggcagacgacaaggataggcacgtgaccatagagagagaatcactttaaatgctggttttgacggttgttctatgcacaaacagtagctaatctagaacttttactgtaatcctaggacctttccttttggtaaaacacacaagtaaatctttagcgtccttttagtttgttttataggcaatgggattaatcttggatttttttttcggacaacgcaggagagcttcatgtcatttcattaagaagagggattaatctcagattgtactcaatatttgaagaactaaaatgctattgtatttttcaaaacactagaagaattcctgaatcctaattttctgagcctgctgagccaatcacctgcgactgtgttagattctggttcccacacctgtgtcctggtaacactattcctgcctatgttggactcctatatggctatatccacgtgagtgagcttgaagatactcacaaacatggcaacttgtatatgcttcccactgatgtttcacccagtataactgcaattactttataatagtcaagtggcatatttgatttgagtcttttgatgtcatatttgttgatgctatatttgagactatgttcaatgcaggaaacatcttcatattgtgtatatctacagtaaaatttactcaataacatcatgtggatcattatcaacctatgttgtcagtttttatcttgtgagattcaaaaatgggtaatttggtggaggtgatactacccaagtatgcaacttctcttcactaactaaacctttcgtatataatacttgatagactgtttggacaccttaagcttttatgttgtagcggtaccattagtcatatgaatggggaagtttcttttgagttgatttaatgtaaaaaatgatgagcaatataaatttataacatgcttctaagcttccttttagttattactatgtacgagtaaactcctgaaatttgaatattaatatccaggcgagacatttttttgctcattctagatggatgctctaaactggacattcttctgaaggtttgaatttgattgtcaacttttagttttgatgacatagttcttaactgtgttttttattccatcaggacagcacgtcccaaatgattttgtgttaactagcaaacagttcgagataacttatgttttgcagtattgtcatattggtatatagtctacaattttcttctcttctcgttcttgctcacatgtgttacatttgaaattcgttataaaccttattaatatggactgtttttggcttgtgccacatttacatcttgcttattgcacgcaaagctatcatgctcaccgcattggtacggcacaaaataggtacatcagcataaacgtggatgtaattcatgatgtaaggagagctgaggcagagtatgaatcttatattttgctggtctttgccataataacaaaatatggactgggtaaagatacactcctagtgtgcaaaaagacgtaacaggtcctattatcttatctcgctattctcttattttagctgatgcttctgtatttgtgtagttctacaggcattttactcctaattttgcctcttttatgcagtacatcaactggtggtggtctttactattagaaccatctcagctctcctatttcagtcgttatatgttgttatatgttacatggctaccctgacgactttgagcgatatgtaggagtattagatttggggactattgtctcccccgttgaccttccaaatatatatttcaggacacaaaacataaagggaaatataaaagtctgttgtggttattttctagcccactgctgtgtctcttatttctctttgtgtgcagatgaaggcaataaagtatggatctgtgccagtacagataagctttcccagcgatgaatcaagggagtcggaggagcatgattggcacaatacagcactgtctcagtacatcatctcaacctatggagatccgtctctttctcaagtacttgatgactttaacaatgacccattgcattgtcagacctcgccggagaagcaacctcctgttgccggcgagctcaccctgctggtcacagaaaagactcacgcacacacacgaacacaagtgggcacactctgatttggtgctgtgaacaaccaacagcttttctgactctatttctctgtatataaagagacgtgtacagaccatgagcttacaacctgacagtttaccgcttaaagaaaggaaaaagaaat

SEQ ID NO: 51832 - DNA, 2035 bp, Zea Mays
agtggatatttgaagcacacggtcttgtctcgctcacccgggcaatccgcgcgaggtgcggcgcacatagccaggacccagaggcgattaggcgaacgggcggcgcggcacgagtcgagttttgaccgtgcggcgcgccgcgcgcgtatcaggcaacaatggagacgccgcgccttgtagtcgggcggcgtcgcggggccactcctcggttccggcggcggcgcctgccgcatccgcgcggcggggcacattgcttccccttcgcccgcgctcgaccacccgtgcttataacccggtgcttctacttcccctcttccagttgcgttcgaatcccacacccagcaccactccgtgcggccacgctctcacaattgctgcgcacgcgcgtgcgtgtatgcgtggctgttcctcagctgttccggtcctcccattcgtgtttcagggtggggaacacggcgattctcgaagctccagtaacgtcaggtgctggggattttgtaggttggacggcgtcgaagcacatagtgatcaggtaccaggtttgcttgatgagcaacgtgagggtgatgttggggagctctttagcctggctcaatggagtaattcactcttcccttgctttacctaatatatcctgtgcattaacaagcagcggcttatggccatgggggagccgaagaaactgcaggatgaaaataatttgcttctcgaggaaatacgagtactacaaacagaaataaaaggaaacatcttcatattgtgtatatctacagtaaaatttactcaataacatcatgtggatcattatcaacctatgttgtcagtttttatcttgtgagattcaaaaatgggtaatttggtggaggtgatactacccaagtatgcaacttctcttcactaactaaacctttcgtatataatacttgatagactgtttggacaccttaagcttttatgttgtagcggtaccattagtcatatgaatggggaagtttcttttgagttgatttaatgtaaaaaatgatgagcaatataaatttataacatgcttctaagcttccttttagttattactatgtacgagtaaactcctgaaatttgaatattaatatccaggcgagacatttttttgctcattctagatggatgctctaaactggacattcttctgaaggtttgaatttgattgtcaacttttagttttgatgacatagttcttaactgtgttttttattccatcaggacagcacgtcccaaatgattttgtgttaactagcaaacagttcgagataacttatgttttgcagtattgtcatattggtatatagtctacaattttcttctcttctcgttcttgctcacatgtgttacatttgaaattcgttataaaccttattaatatggactgtttttggcttgtgccacatttacatcttgcttattgcacgcaaagctatcatgctcaccgcattggtacggcacaaaataggtacatcagcataaacgtggatgtaattcatgatgtaaggagagctgaggcagagtatgaatcttatattttgctggtctttgccataataacaaaatatggactgggtaaagatacactcctagtgtgcaaaaagacgtaacagatgaaggcaataaagtatggatctgtgccagtacagataagctttcccagcgatgaatcaagggagtcggaggagcatgattggcacaatacagcactgtctcagtacatcatctcaacctatggagatccgtctctttctcaagtacttgatgactttaacaatgacccattgcattgtcagacctcgccggagaagcaacctcctgttgccggcgagctcaccctgctggtcacagaaaagactcacgcacacacacgaacacaagtgggcacactctgatttggtgctgtgaacaaccaacagcttttctgactctatttctctgtatataaagagacgtgtacagaccatgagcttacaacctgacagtttaccgcttaaagaaaggaaaaagaaat

SEQ ID NO: 51833 - DNA, 1719 bp, Zea Mays
agtggatatttgaagcacacggtcttgtctcgctcacccgggcaatccgcgcgaggtgcggcgcacatagccaggacccagaggcgattaggcgaacgggcggcgcggcacgagtcgagttttgaccgtgcggcgcgccgcgcgcgtatcaggcaacaatggagacgccgcgccttgtagtcgggcggcgtcgcggggccactcctcggttccggcggcggcgcctgccgcatccgcgcggcggggcacattgcttccccttcgcccgcgctcgaccacccgtgcttataacccggtgcttctacttcccctcttccagttgcgttcgaatcccacacccagcaccactccgtgcggccacgctctcacaattgctgcgcacgcgcgtgcgtgtatgcgtggctgttcctcagctgttccggtcctcccattcgtgtttcagggtggggaacacggcgattctcgaagctccagtaacgtcaggtaccaggtttgcttgatgagcaacgtgagggtgatgttggggagctctttagcctggctcaatggaatatcctgtgcattaacaagcagcggcttatggccatgggggagccgaagaaactgcaggatgaaaataatttgcttctcgaggaaatacgagtactacaaacagaaataaaaggaaacatcttcatattgtgtatatctacagtaaaatttactcaataacatcatgtggatcattatcaacctatgttgtcagtttttatcttgtgagattcaaaaatgggtaatttggtggaggtgatactacccaagcgagacatttttttgctcattctagatggatgctctaaactggacattcttctgaaggtttgaatttgattgtcaacttttagttttgatgacatagttcttaactgtgttttttattccatcaggacagcacgtcccaaatgattttgtgttaactagcaaacagttcgagataacttatgttttgcagtattgtcatattggtatatagtctacaattttcttctcttctcgttcttgctcacatgtgttacatttgaaattcgttataaaccttattaatatggactgtttttggcttgtgccacatttacatcttgcttattgcacgcaaagctatcatgctcaccgcattggtacggcacaaaataggtacatcagcataaacgtggatgtaattcatgatgtaaggagagctgaggcagagtatgaatcttatattttgctggtctttgccataataacaaaatatggactgggtaaagatacactcctagtgtgcaaaaagacgtaacagatgaaggcaataaagtatggatctgtgccagtacagataagctttcccagcgatgaatcaagggagtcggaggagcatgattggcacaatacagcactgtctcagtacatcatctcaacctatggagatccgtctctttctcaagtacttgatgactttaacaatgacccattgcattgtcagacctcgccggagaagcaacctcctgttgccggcgagctcaccctgctggtcacagaaaagactcacgcacacacacgaacacaagtgggcacactctgatttggtgctgtgaacaaccaacagcttttctgactctatttctctgtatataaagagacgtgtacagaccatgagcttacaacctgacagtttaccgcttaaagaaaggaaaaagaaat

SEQ ID NO: 51834 - DNA, 2712 bp, Zea Mays
agtggatatttgaagcacacggtcttgtctcgctcacccgggcaatccgcgcgaggtgcggcgcacatagccaggacccagaggcgattaggcgaacgggcggcgcggcacgagtcgagttttgaccgtgcggcgcgccgcgcgcgtatcaggcaacaatggagacgccgcgccttgtagtcgggcggcgtcgcggggccactcctcggttccggcggcggcgcctgccgcatccgcgcggcggggcacattgcttccccttcgcccgcgctcgaccacccgtgcttataacccggtgcttctacttcccctcttccagttgcgttcgaatcccacacccagcaccactccgtgcggccacgctctcacaattgctgcgcacgcgcgtgcgtgtatgcgtggctgttcctcagctgttccggtcctcccattcgtgtttcagggtggggaacacggcgattctcgaagctccagtaacgtcaggtaccaggtttgcttgatgagcaacgtgagggtgatgttggggagctctttagcctggctcaatggaatatcctgtgcattaacaagcagcggcttatggccatgggggagccgaagaaactgcaggatgaaaataatttgcttctcgaggaaatacgagtactacaaacagaaataaaaggagagcttcatgtcatttcattaagaagagggattaatctcagattgtactcaatatttgaagaactaaaatgctattgtatttttcaaaacactagaagaattcctgaatcctaattttctgagcctgctgagccaatcacctgcgactgtgttagattctggttcccacacctgtgtcctggtaacactattcctgcctatgttggactcctatatggctatatccacgtgagtgagcttgaagatactcacaaacatggcaacttgtatatgcttcccactgatgtttcacccagtataactgcaattactttataatagtcaagtggcatatttgatttgagtcttttgatgtcatatttgttgatgctatatttgagactatgttcaatgcaggaaacatcttcatattgtgtatatctacagtaaaatttactcaataacatcatgtggatcattatcaacctatgttgtcagtttttatcttgtgagattcaaaaatgggtaatttggtggaggtgatactacccaagtatgcaacttctcttcactaactaaacctttcgtatataatacttgatagactgtttggacaccttaagcttttatgttgtagcggtaccattagtcatatgaatggggaagtttcttttgagttgatttaatgtaaaaaatgatgagcaatataaatttataacatgcttctaagcttccttttagttattactatgtacgagtaaactcctgaaatttgaatattaatatccaggcgagacatttttttgctcattctagatggatgctctaaactggacattcttctgaaggtttgaatttgattgtcaacttttagttttgatgacatagttcttaactgtgttttttattccatcaggacagcacgtcccaaatgattttgtgttaactagcaaacagttcgagataacttatgttttgcagtattgtcatattggtatatagtctacaattttcttctcttctcgttcttgctcacatgtgttacatttgaaattcgttataaaccttattaatatggactgtttttggcttgtgccacatttacatcttgcttattgcacgcaaagctatcatgctcaccgcattggtacggcacaaaataggtacatcagcataaacgtggatgtaattcatgatgtaaggagagctgaggcagagtatgaatcttatattttgctggtctttgccataataacaaaatatggactgggtaaagatacactcctagtgtgcaaaaagacgtaacaggtcctattatcttatctcgctattctcttattttagctgatgcttctgtatttgtgtagttctacaggcattttactcctaattttgcctcttttatgcagtacatcaactggtggtggtctttactattagaaccatctcagctctcctatttcagtcgttatatgttgttatatgttacatggctaccctgacgactttgagcgatatgtaggagtattagatttggggactattgtctcccccgttgaccttccaaatatatatttcaggacacaaaacataaagggaaatataaaagtctgttgtggttattttctagcccactgctgtgtctcttatttctctttgtgtgcagatgaaggcaataaagtatggatctgtgccagtacagataagctttcccagcgatgaatcaagggagtcggaggagcatgattggcacaatacagcactgtctcagtacatcatctcaacctatggagatccgtctctttctcaagtacttgatgactttaacaatgacccattgcattgtcagacctcgccggagaagcaacctcctgttgccggcgagctcaccctgctggtcacagaaaagactcacgcacacacacgaacacaagtgggcacactctgatttggtgctgtgaacaaccaacagcttttctgactctatttctctgtatataaagagacgtgtacagaccatgagcttacaacctgacagtttaccgcttaaagaaaggaaaaagaaat

SEQ ID NO: 51835 - DNA, 2344 bp, Zea Mays
agtggatatttgaagcacacggtcttgtctcgctcacccgggcaatccgcgcgaggtgcggcgcacatagccaggacccagaggcgattaggcgaacgggcggcgcggcacgagtcgagttttgaccgtgcggcgcgccgcgcgcgtatcaggcaacaatggagacgccgcgccttgtagtcgggcggcgtcgcggggccactcctcggttccggcggcggcgcctgccgcatccgcgcggcggggcacattgcttccccttcgcccgcgctcgaccacccgtgcttataacccggtgcttctacttcccctcttccagttgcgttcgaatcccacacccagcaccactccgtgcggccacgctctcacaattgctgcgcacgcgcgtgcgtgtatgcgtggctgttcctcagctgttccggtcctcccattcgtgtttcagggtggggaacacggcgattctcgaagctccagtaacgtcaggtaccaggtttgcttgatgagcaacgtgagggtgatgttggggagctctttagcctggctcaatggagtaattcactcttcccttgctttacctaatatatcctgtgcattaacaagcagcggcttatggccatgggggagccgaagaaactgcaggatgaaaataatttgcttctcgaggaaatacgagtactacaaacagaaataaaaggaaacatcttcatattgtgtatatctacagtaaaatttactcaataacatcatgtggatcattatcaacctatgttgtcagtttttatcttgtgagattcaaaaatgggtaatttggtggaggtgatactacccaagtatgcaacttctcttcactaactaaacctttcgtatataatacttgatagactgtttggacaccttaagcttttatgttgtagcggtaccattagtcatatgaatggggaagtttcttttgagttgatttaatgtaaaaaatgatgagcaatataaatttataacatgcttctaagcttccttttagttattactatgtacgagtaaactcctgaaatttgaatattaatatccaggcgagacatttttttgctcattctagatggatgctctaaactggacattcttctgaaggtttgaatttgattgtcaacttttagttttgatgacatagttcttaactgtgttttttattccatcaggacagcacgtcccaaatgattttgtgttaactagcaaacagttcgagataacttatgttttgcagtattgtcatattggtatatagtctacaattttcttctcttctcgttcttgctcacatgtgttacatttgaaattcgttataaaccttattaatatggactgtttttggcttgtgccacatttacatcttgcttattgcacgcaaagctatcatgctcaccgcattggtacggcacaaaataggtacatcagcataaacgtggatgtaattcatgatgtaaggagagctgaggcagagtatgaatcttatattttgctggtctttgccataataacaaaatatggactgggtaaagatacactcctagtgtgcaaaaagacgtaacaggtcctattatcttatctcgctattctcttattttagctgatgcttctgtatttgtgtagttctacaggcattttactcctaattttgcctcttttatgcagtacatcaactggtggtggtctttactattagaaccatctcagctctcctatttcagtcgttatatgttgttatatgttacatggctaccctgacgactttgagcgatatgtaggagtattagatttggggactattgtctcccccgttgaccttccaaatatatatttcaggacacaaaacataaagggaaatataaaagtctgttgtggttattttctagcccactgctgtgtctcttatttctctttgtgtgcagatgaaggcaataaagtatggatctgtgccagtacagataagctttcccagcgatgaatcaagggagtcggaggagcatgattggcacaatacagcactgtctcagtacatcatctcaacctatggagatccgtctctttctcaagtacttgatgactttaacaatgacccattgcattgtcagacctcgccggagaagcaacctcctgttgccggcgagctcaccctgctggtcacagaaaagactcacgcacacacacgaacacaagtgggcacactctgatttggtgctgtgaacaaccaacagcttttctgactctatttctctgtatataaagagacgtgtacagaccatgagcttacaacctgacagtttaccgcttaaagaaaggaaaaagaaat

SEQ ID NO: 51836 - DNA, 3754 bp, Zea Mays
agtggatatttgaagcacacggtcttgtctcgctcacccgggcaatccgcgcgaggtgcggcgcacatagccaggacccagaggcgattaggcgaacgggcggcgcggcacgagtcgagttttgaccgtgcggcgcgccgcgcgcgtatcaggcaacaatggagacgccgcgccttgtagtcgggcggcgtcgcggggccactcctcggttccggcggcggcgcctgccgcatccgcgcggcggggcacattgcttccccttcgcccgcgctcgaccacccgtgcttataacccggtgcttctacttcccctcttccagttgcgttcgaatcccacacccagcaccactccgtgcggccacgctctcacaattgctgcgcacgcgcgtgcgtgtatgcgtggctgttcctcagctgttccggtcctcccattcgtgtttcagggtggggaacacggcgattctcgaagctccagtaacgtcaggttggacggcgtcgaagcacatagtgatcaggtaccaggtttgcttgatgagcaacgtgagggtgatgttggggagctctttagcctggctcaatggaatatcctgtgcattaacaagcagcggcttatggccatgggggagccgaagaaactgcaggatgaaaataatttgcttctcgaggaaatacgagtactacaaacagaaataaaaggtgcagtctcggttaccaacattttcaggattaggttatgtggatgataatgtgaaatttcttaaacttcagcaatcctatgctgcttgttgatatgattgttttactttccatttcttgttcttaactatagtggtaagctgcatgcatcaaatacctttcagtatgcttttacacattccatcttctcatggcattttttcaggtattcccctagaatcaacacaattcagtgagttacccctgcagatagatacaatagtcgtttctggaatgatcagcatatcagaagcatctgattttatagagaaagttgtcactaatagaagcataatacaaagtgccttttctgattttcatcataaaccaaatactgaatccatcacttattaagggaagctaaccagacgagaagtttgcatctcagaggtgcccaaatcttccaaatcttttcagctggctcaaaatttattgatccagcaaggaagcgatcataagccgactttgctgaatattcccctgcgattgatggcagccaatgcacatccaagtccccccatcttaagctgaacttctcgagttaataaatcacagaccaggaaaaaaaatcaggaggaattccgcaggcagactgtcagatagatcagtcacccacctattattctgcagtgcttcctgaactgttctgattttctaaagtctcctaggaatgcggctcaggagagctggtgcaatataacaacagactgaccatgtatccaacgatcagtctatccatgagaggggaaaaatggcagacgacaaggataggcacgtgaccatagagagagaatcactttaaatgctggttttgacggttgttctatgcacaaacagtagctaatctagaacttttactgtaatcctaggacctttccttttggtaaaacacacaagtaaatctttagcgtccttttagtttgttttataggcaatgggattaatcttggatttttttttcggacaacgcaggagagcttcatgtcatttcattaagaagagggattaatctcagattgtactcaatatttgaagaactaaaatgctattgtatttttcaaaacactagaagaattcctgaatcctaattttctgagcctgctgagccaatcacctgcgactgtgttagattctggttcccacacctgtgtcctggtaacactattcctgcctatgttggactcctatatggctatatccacgtgagtgagcttgaagatactcacaaacatggcaacttgtatatgcttcccactgatgtttcacccagtataactgcaattactttataatagtcaagtggcatatttgatttgagtcttttgatgtcatatttgttgatgctatatttgagactatgttcaatgcaggaaacatcttcatattgtgtatatctacagtaaaatttactcaataacatcatgtggatcattatcaacctatgttgtcagtttttatcttgtgagattcaaaaatgggtaatttggtggaggtgatactacccaagtatgcaacttctcttcactaactaaacctttcgtatataatacttgatagactgtttggacaccttaagcttttatgttgtagcggtaccattagtcatatgaatggggaagtttcttttgagttgatttaatgtaaaaaatgatgagcaatataaatttataacatgcttctaagcttccttttagttattactatgtacgagtaaactcctgaaatttgaatattaatatccaggcgagacatttttttgctcattctagatggatgctctaaactggacattcttctgaaggtttgaatttgattgtcaacttttagttttgatgacatagttcttaactgtgttttttattccatcaggacagcacgtcccaaatgattttgtgttaactagcaaacagttcgagataacttatgttttgcagtattgtcatattggtatatagtctacaattttcttctcttctcgttcttgctcacatgtgttacatttgaaattcgttataaaccttattaatatggactgtttttggcttgtgccacatttacatcttgcttattgcacgcaaagctatcatgctcaccgcattggtacggcacaaaataggtacatcagcataaacgtggatgtaattcatgatgtaaggagagctgaggcagagtatgaatcttatattttgctggtctttgccataataacaaaatatggactgggtaaagatacactcctagtgtgcaaaaagacgtaacaggtcctattatcttatctcgctattctcttattttagctgatgcttctgtatttgtgtagttctacaggcattttactcctaattttgcctcttttatgcagtacatcaactggtggtggtctttactattagaaccatctcagctctcctatttcagtcgttatatgttgttatatgttacatggctaccctgacgactttgagcgatatgtaggagtattagatttggggactattgtctcccccgttgaccttccaaatatatatttcaggacacaaaacataaagggaaatataaaagtctgttgtggttattttctagcccactgctgtgtctcttatttctctttgtgtgcagatgaaggcaataaagtatggatctgtgccagtacagataagctttcccagcgatgaatcaagggagtcggaggagcatgattggcacaatacagcactgtctcagtacatcatctcaacctatggagatccgtctctttctcaagtacttgatgactttaacaatgacccattgcattgtcagacctcgccggagaagcaacctcctgttgccggcgagctcaccctgctggtcacagaaaagactcacgcacacacacgaacacaagtgggcacactctgatttggtgctgtgaacaaccaacagcttttctgactctatttctctgtatataaagagacgtgtacagaccatgagcttacaacctgacagtttaccgcttaaagaaaggaaaaagaaat

SEQ ID NO: 51837 - DNA, 3597 bp, Zea Mays
agtggatatttgaagcacacggtcttgtctcgctcacccgggcaatccgcgcgaggtgcggcgcacatagccaggacccagaggcgattaggcgaacgggcggcgcggcacgagtcgagttttgaccgtgcggcgcgccgcgcgcgtatcaggcaacaatggagacgccgcgccttgtagtcgggcggcgtcgcggggccactcctcggttccggcggcggcgcctgccgcatccgcgcggcggggcacattgcttccccttcgcccgcgctcgaccacccgtgcttataacccggtgcttctacttcccctcttccagttgcgttcgaatcccacacccagcaccactccgtgcggccacgctctcacaattgctgcgcacgcgcgtgcgtgtatgcgtggctgttcctcagctgttccggtcctcccattcgtgtttcagggtggggaacacggcgattctcgaagctccagtaacgtcaggtgctggggattttgtaggttggacggcgtcgaagcacatagtgatcaggtaccaggtttgcttgatgagcaacgtgagggtgatgttggggagctctttagcctggctcaatggagtaattcactcttcccttgctttacctaatatatcctgtgcattaacaagcagcggcttatggccatgggggagccgaagaaactgcaggatgaaaataatttgcttctcgaggaaatacgagtactacaaacagaaataaaaggtattcccctagaatcaacacaattcagtgagttacccctgcagatagatacaatagtcgtttctggaatgatcagcatatcagaagcatctgattttatagagaaagttgtcactaatagaagcataatacaaagtgccttttctgattttcatcataaaccaaatactgaatccatcacttattaagggaagctaaccagacgagaagtttgcatctcagaggtgcccaaatcttccaaatcttttcagctggctcaaaatttattgatccagcaaggaagcgatcataagccgactttgctgaatattcccctgcgattgatggcagccaatgcacatccaagtccccccatcttaagctgaacttctcgagttaataaatcacagaccaggaaaaaaaatcaggaggaattccgcaggcagactgtcagatagatcagtcacccacctattattctgcagtgcttcctgaactgttctgattttctaaagtctcctaggaatgcggctcaggagagctggtgcaatataacaacagactgaccatgtatccaacgatcagtctatccatgagaggggaaaaatggcagacgacaaggataggcacgtgaccatagagagagaatcactttaaatgctggttttgacggttgttctatgcacaaacagtagctaatctagaacttttactgtaatcctaggacctttccttttggtaaaacacacaagtaaatctttagcgtccttttagtttgttttataggcaatgggattaatcttggatttttttttcggacaacgcaggagagcttcatgtcatttcattaagaagagggattaatctcagattgtactcaatatttgaagaactaaaatgctattgtatttttcaaaacactagaagaattcctgaatcctaattttctgagcctgctgagccaatcacctgcgactgtgttagattctggttcccacacctgtgtcctggtaacactattcctgcctatgttggactcctatatggctatatccacgtgagtgagcttgaagatactcacaaacatggcaacttgtatatgcttcccactgatgtttcacccagtataactgcaattactttataatagtcaagtggcatatttgatttgagtcttttgatgtcatatttgttgatgctatatttgagactatgttcaatgcaggaaacatcttcatattgtgtatatctacagtaaaatttactcaataacatcatgtggatcattatcaacctatgttgtcagtttttatcttgtgagattcaaaaatgggtaatttggtggaggtgatactacccaagtatgcaacttctcttcactaactaaacctttcgtatataatacttgatagactgtttggacaccttaagcttttatgttgtagcggtaccattagtcatatgaatggggaagtttcttttgagttgatttaatgtaaaaaatgatgagcaatataaatttataacatgcttctaagcttccttttagttattactatgtacgagtaaactcctgaaatttgaatattaatatccaggcgagacatttttttgctcattctagatggatgctctaaactggacattcttctgaaggtttgaatttgattgtcaacttttagttttgatgacatagttcttaactgtgttttttattccatcaggacagcacgtcccaaatgattttgtgttaactagcaaacagttcgagataacttatgttttgcagtattgtcatattggtatatagtctacaattttcttctcttctcgttcttgctcacatgtgttacatttgaaattcgttataaaccttattaatatggactgtttttggcttgtgccacatttacatcttgcttattgcacgcaaagctatcatgctcaccgcattggtacggcacaaaataggtacatcagcataaacgtggatgtaattcatgatgtaaggagagctgaggcagagtatgaatcttatattttgctggtctttgccataataacaaaatatggactgggtaaagatacactcctagtgtgcaaaaagacgtaacaggtcctattatcttatctcgctattctcttattttagctgatgcttctgtatttgtgtagttctacaggcattttactcctaattttgcctcttttatgcagtacatcaactggtggtggtctttactattagaaccatctcagctctcctatttcagtcgttatatgttgttatatgttacatggctaccctgacgactttgagcgatatgtaggagtattagatttggggactattgtctcccccgttgaccttccaaatatatatttcaggacacaaaacataaagggaaatataaaagtctgttgtggttattttctagcccactgctgtgtctcttatttctctttgtgtgcagatgaaggcaataaagtatggatctgtgccagtacagataagctttcccagcgatgaatcaagggagtcggaggagcatgattggcacaatacagcactgtctcagtacatcatctcaacctatggagatccgtctctttctcaagtacttgatgactttaacaatgacccattgcattgtcagacctcgccggagaagcaacctcctgttgccggcgagctcaccctgctggtcacagaaaagactcacgcacacacacgaacacaagtgggcacactctgatttggtgctgtgaacaaccaacagcttttctgactctatttctctgtatataaagagacgtgtacagaccatgagcttacaacctgacagtttaccgcttaaagaaaggaaaaagaaat

SEQ ID NO: 51838 - DNA, 1941 bp, Zea Mays
agtggatatttgaagcacacggtcttgtctcgctcacccgggcaatccgcgcgaggtgcggcgcacatagccaggacccagaggcgattaggcgaacgggcggcgcggcacgagtcgagttttgaccgtgcggcgcgccgcgcgcgtatcaggcaacaatggagacgccgcgccttgtagtcgggcggcgtcgcggggccactcctcggttccggcggcggcgcctgccgcatccgcgcggcggggcacattgcttccccttcgcccgcgctcgaccacccgtgcttataacccggtgcttctacttcccctcttccagttgcgttcgaatcccacacccagcaccactccgtgcggccacgctctcacaattgctgcgcacgcgcgtgcgtgtatgcgtggctgttcctcagctgttccggtcctcccattcgtgtttcagggtggggaacacggcgattctcgaagctccagtaacgtcaggtaccaggtttgcttgatgagcaacgtgagggtgatgttggggagctctttagcctggctcaatggaatatcctgtgcattaacaagcagcggcttatggccatgggggagccgaagaaactgcaggatgaaaataatttgcttctcgaggaaatacgagtactacaaacagaaataaaaggcgagacatttttttgctcattctagatggatgctctaaactggacattcttctgaaggtttgaatttgattgtcaacttttagttttgatgacatagttcttaactgtgttttttattccatcaggacagcacgtcccaaatgattttgtgttaactagcaaacagttcgagataacttatgttttgcagtattgtcatattggtatatagtctacaattttcttctcttctcgttcttgctcacatgtgttacatttgaaattcgttataaaccttattaatatggactgtttttggcttgtgccacatttacatcttgcttattgcacgcaaagctatcatgctcaccgcattggtacggcacaaaataggtacatcagcataaacgtggatgtaattcatgatgtaaggagagctgaggcagagtatgaatcttatattttgctggtctttgccataataacaaaatatggactgggtaaagatacactcctagtgtgcaaaaagacgtaacaggtcctattatcttatctcgctattctcttattttagctgatgcttctgtatttgtgtagttctacaggcattttactcctaattttgcctcttttatgcagtacatcaactggtggtggtctttactattagaaccatctcagctctcctatttcagtcgttatatgttgttatatgttacatggctaccctgacgactttgagcgatatgtaggagtattagatttggggactattgtctcccccgttgaccttccaaatatatatttcaggacacaaaacataaagggaaatataaaagtctgttgtggttattttctagcccactgctgtgtctcttatttctctttgtgtgcagatgaaggcaataaagtatggatctgtgccagtacagataagctttcccagcgatgaatcaagggagtcggaggagcatgattggcacaatacagcactgtctcagtacatcatctcaacctatggagatccgtctctttctcaagtacttgatgactttaacaatgacccattgcattgtcagacctcgccggagaagcaacctcctgttgccggcgagctcaccctgctggtcacagaaaagactcacgcacacacacgaacacaagtgggcacactctgatttggtgctgtgaacaaccaacagcttttctgactctatttctctgtatataaagagacgtgtacagaccatgagcttacaacctgacagtttaccgcttaaagaaaggaaaaagaaat

SEQ ID NO: 51839 - DNA, 677 bp, Zea Mays
gtttatctgtgtcgaggtgctggggattttgtaggttggacggcgtcgaagcacatagtgatcaggtaccaggtttgcttgatgagcaacgtgagggtgatgttggggagctctttagcctggctcaatggagtaattcactcttcccttgctttacctaatatatcctgtgcattaacaagcagcggcttatggccatgggggagccgaagaaactgcaggatgaaaataatttgcttctcgaggaaatacgagtactacaaacagaaataaaagatgaaggcaataaagtatggatctgtgccagtacagataagctttcccagcgatgaatcaagggagtcggaggagcatgattggcacaatacagcactgtctcagtacatcatctcaacctatggagatccgtctctttctcaagtacttgatgactttaacaatgacccattgcattgtcagacctcgccggagaagcaacctcctgttgccggcgagctcaccctgctggtcacagaaaagactcacgcacacacacgaacacaagtgggcacactctgatttggtgctgtgaacaaccaacagcttttctgactctatttctctgtatataaagagacgtgtacagaccatgagcttacaacctgacagtttaccgcttaaagaaaggaaaaagaaat

SEQ ID NO: 51840 - DNA, 2851 bp, Zea Mays
tctgtgtcgaggtgctggggattttgtaggttggacggcgtcgaagcacatagtgatcaggtaccaggtttgcttgatgagcaacgtgagggtgatgttggggagctctttagcctggctcaatggaatatcctgtgcattaacaagcagcggcttatggccatgggggagccgaagaaactgcaggatgaaaataatttgcttctcgaggaaatacgagtactacaaacagaaataaaaggtgcagtctcggttaccaacattttcaggattaggttatgtggatgataatgtgaaatttcttaaacttcagcaatcctatgctgcttgttgatatgattgttttactttccatttcttgttcttaactatagtggtaagctgcatgcatcaaatacctttcagtatgcttttacacattccatcttctcatggcattttttcaggtattcccctagaatcaacacaattcagtgagttacccctgcagatagatacaatagtcgtttctggaatgatcagcatatcagaagcatctgattttatagagaaagttgtcactaatagaagcataatacaaagtgccttttctgattttcatcataaaccaaatactgaatccatcacttattaagggaagctaaccagacgagaagtttgcatctcagaggtgcccaaatcttccaaatcttttcagctggctcaaaatttattgatccagcaaggaagcgatcataagccgactttgctgaatattcccctgcgattgatggcagccaatgcacatccaagtccccccatcttaagctgaacttctcgagttaataaatcacagaccaggaaaaaaaatcaggaggaattccgcaggcagactgtcagatagatcagtcacccacctattattctgcagtgcttcctgaactgttctgattttctaaagtctcctaggaatgcggctcaggagagctggtgcaatataacaacagactgaccatgtatccaacgatcagtctatccatgagaggggaaaaatggcagacgacaaggataggcacgtgaccatagagagagaatcactttaaatgctggttttgacggttgttctatgcacaaacagtagctaatctagaacttttactgtaatcctaggacctttccttttggtaaaacacacaagtaaatctttagcgtccttttagtttgttttataggcaatgggattaatcttggatttttttttcggacaacgcaggagagcttcatgtcatttcattaagaagagggattaatctcagattgtactcaatatttgaagaactaaaatgctattgtatttttcaaaacactagaagaattcctgaatcctaattttctgagcctgctgagccaatcacctgcgactgtgttagattctggttcccacacctgtgtcctggtaacactattcctgcctatgttggactcctatatggctatatccacgtgagtgagcttgaagatactcacaaacatggcaacttgtatatgcttcccactgatgtttcacccagtataactgcaattactttataatagtcaagtggcatatttgatttgagtcttttgatgtcatatttgttgatgctatatttgagactatgttcaatgcaggaaacatcttcatattgtgtatatctacagtaaaatttactcaataacatcatgtggatcattatcaacctatgttgtcagtttttatcttgtgagattcaaaaatgggtaatttggtggaggtgatactacccaagtatgcaacttctcttcactaactaaacctttcgtatataatacttgatagactgtttggacaccttaagcttttatgttgtagcggtaccattagtcatatgaatggggaagtttcttttgagttgatttaatgtaaaaaatgatgagcaatataaatttataacatgcttctaagcttccttttagttattactatgtacgagtaaactcctgaaatttgaatattaatatccaggcgagacatttttttgctcattctagatggatgctctaaactggacattcttctgaaggtttgaatttgattgtcaacttttagttttgatgacatagttcttaactgtgttttttattccatcaggacagcacgtcccaaatgattttgtgttaactagcaaacagttcgagataacttatgttttgcagtattgtcatattggtatatagtctacaattttcttctcttctcgttcttgctcacatgtgttacatttgaaattcgttataaaccttattaatatggactgtttttggcttgtgccacatttacatcttgcttattgcacgcaaagctatcatgctcaccgcattggtacggcacaaaataggtacatcagcataaacgtggatgtaattcatgatgtaaggagagctgaggcagaatgaaggcaataaagtatggatctgtgccagtacagataagctttcccagcgatgaatcaagggagtcggaggagcatgattggcacaatacagcactgtctcagtacatcatctcaacctatggagatccgtctctttctcaagtacttgatgactttaacaatgacccattgcattgtcagacctcgccggagaagcaacctcctgttgccggcgagctcaccctgctggtcacagaaaagactcacgcacacacacgaacacaagtgggcacactctgatttggtgctgtgaacaaccaacagcttttctgactctatttctctgtatataaagagacgtgtacagaccatgagcttacaacctgacagtttaccgcttaaagaaaggaaaaagaaat

SEQ ID NO: 51841 - DNA, 2798 bp, Zea Mays
taggttggacggcgtcgaagcacatagtgatcaggtaccaggtttgcttgatgagcaacgtgagggtgatgttggggagctctttagcctggctcaatggagtaattcactcttcccttgctttacctaatatatcctgtgcattaacaagcagcggcttatggccatgggggagccgaagaaactgcaggatgaaaataatttgcttctcgaggaaatacgagtactacaaacagaaataaaaggtgcagtctcggttaccaacattttcaggattaggttatgtggatgataatgtgaaatttcttaaacttcagcaatcctatgctgcttgttgatatgattgttttactttccatttcttgttcttaactatagtggtaagctgcatgcatcaaatacctttcagtatgcttttacacattccatcttctcatggcattttttcaggtattcccctagaatcaacacaattcagtgagttacccctgcagatagatacaatagtcgtttctggaatgatcagcatatcagaagcatctgattttatagagaaagttgtcactaatagaagcataatacaaagtgccttttctgattttcatcataaaccaaatactgaatccatcacttattaagggaagctaaccagacgagaagtttgcatctcagaggtgcccaaatcttccaaatcttttcagctggctcaaaatttattgatccagcaaggaagcgatcataagccgactttgctgaatattcccctgcgattgatggcagccaatgcacatccaagtccccccatcttaagctgaacttctcgagttaataaatcacagaccaggaaaaaaaatcaggaggaattccgcaggcagactgtcagatagatcagtcacccacctattattctgcagtgcttcctgaactgttctgattttctaaagtctcctaggaatgcggctcaggagagctggtgcaatataacaacagactgaccatgtatccaacgatcagtctatccatgagaggggaaaaatggcagacgacaaggataggcacgtgaccatagagagagaatcactttaaatgctggttttgacggttgttctatgcacaaacagtagctaatctagaacttttactgtaatcctaggacctttccttttggtaaaacacacaagtaaatctttagcgtccttttagtttgttttataggcaatgggattaatcttggatttttttttcggacaacgcaggagagcttcatgtcatttcattaagaagagggattaatctcagattgtactcaatatttgaagaactaaaatgctattgtatttttcaaaacactagaagaattcctgaatcctaattttctgagcctgctgagccaatcacctgcgactgtgttagattctggttcccacacctgtgtcctggtaacactattcctgcctatgttggactcctatatggctatatccacgaaacatcttcatattgtgtatatctacagtaaaatttactcaataacatcatgtggatcattatcaacctatgttgtcagtttttatcttgtgagattcaaaaatgggtaatttggtggaggtgatactacccaagcgagacatttttttgctcattctagatggatgctctaaactggacattcttctgaaggtttgaatttgattgtcaacttttagttttgatgacatagttcttaactgtgttttttattccatcaggacagcacgtcccaaatgattttgtgttaactagcaaacagttcgagataacttatgttttgcagtattgtcatattggtatatagtctacaattttcttctcttctcgttcttgctcacatgtgttacatttgaaattcgttataaaccttattaatatggactgtttttggcttgtgccacatttacatcttgcttattgcacgcaaagctatcatgctcaccgcattggtacggcacaaaataggtacatcagcataaacgtggatgtaattcatgatgtaaggagagctgaggcagagtatgaatcttatattttgctggtctttgccataataacaaaatatggactgggtaaagatacactcctagtgtgcaaaaagacgtaacagtacatcaactggtggtggtctttactattagaaccatctcagctctcctatttcagtcgttatatgttgttatatgttacatggctaccctgacgactttgagcgatatgtaggagtattagatttggggactattgtctcccccgttgaccttccaaatatatatttcaggacacaaaacataaagggaaatataaaagtctgttgtggttattttctagcccactgctgtgtctcttatttctctttgtgtgcagatgaaggcaataaagtatggatctgtgccagtacagataagctttcccagcgatgaatcaagggagtcggaggagcatgattggcacaatacagcactgtctcagtacatcatctcaacctatggagatccgtctctttctcaagtacttgatgactttaacaatgacccattgcattgtcagacctcgccggagaagcaacctcctgttgccggcgagctcaccctgctggtcacagaaaagactcacgcacacacacgaacacaagtgggcacactctgatttggtgctgtgaacaaccaacagcttttctgactctatttctctgtatataaagagacgtgtacagaccatgagcttacaacctgacagtttaccgcttaaagaaaggaaaaagaaat

SEQ ID NO: 51842 - DNA, 1831 bp, Zea Mays
ggccaagcccctcgcgaaaatccccccactccaccaccacttctctcgctttcgctttatcacctgtcgcccccgcccccgagcctggtcgccgcttcacccgccgtcgccgtcgtcggtcgggacgcctccgggcggccgcgccctcgacggaggaatgtcttctgttgctcccgccctcgtccaccaccgcggggtctcaggcagagcaatcttacctttgcatcatggagaatgcagagtccctccaggtgcttgtttcatgggcacatcacctacgttggggccaatgagggtatccttggtatgtaatgcaagccccaaccaccataggccaaggaattcggatatatcgcgacaacaaaaaggggggtcctccagaggaaaaggcaagtcgtaccaggataaagatgactctgagaacattgatgaatttgatagtgatatcatgttctccaagaatgggccaccaatctctttggcaagcaattcccgtcctcaagccacatcggctcctggggaaagagagaaggagatcgtggaactctttaaaagggttcaagcacagctgcgagctagggggaaaagcagggaagacaagaagcctgaacatgcaaaagtgcagggtgaaaggggcagtgttgattcacttcttcagttgctcaggaaacactctgtggaccagagaagaaagaatggtgacgacaaagagcagaattccgatgtattgaggagaggcaacgattctggaaatagacaaggttcaaccgtctttggcacaaaaagtgacatccaggaagagaagaagaagccacctccggcacccttcataaggccagcctcaaatttcaggcgaaggtctcctgttcctggagtgaagttccagcctgttatcaatgcggatctggacactgatgacgatcgcaagtccatcggcagtaatgccgtggatgctgtacagaaagctaagacagctcttgatgagaggactgctacagatgagcctgactccatgtctccatatgaggcggattctgtaatagaaccaggaaacatttctttgaatgacctcgatgacattttacatgacgatgaagaattcgatgcggatgaaccagacgacgagtatccagaaccttctttgggtatctctgatgtcacagatacggatgagtcgcacgagaacgactccacccccacgggaagtgcggatctaagctctctgaaggttgcggagctgagagagctcgcaaagtctcgaggaatcaaagggtactcgaagaagaagaaaaacgagctggttgaagtgttgagcagcagcatggattgatgataaagtgggtgacctggcgctctgtttgaagtttgaacccactttgcttggccccctctagaaaattgtaaatgagcaaggctaactctgttccggtctgtgctgatcttttgctggttcattttgtacgcctagcttggtagccgtttagctgaattctgtggtgactgaaggctggcaattattggtctgcgctgcgctctcgacgccgtgcagtagctgcggctttgctcatggaagacacgcccttctctgcatatgctttggttcctggcagccgtcagatgtggagtgattggacggttagttgggctcctcacgtgccgcgtctctgctccttgtctctctggctggctctgcttccgcctgggcctgggcatattgcggagccttgattaaagctggcccagctcggatacggccgcagctatcattgtacgtactactgcaaccgagttccagccagccagccaccccacccctctcctttctttttcc

SEQ ID NO: 51843 - DNA, 1747 bp, Zea Mays
aaaatccccccactccaccaccacttctctcgctttcgctttatcacctgtcgcccccgcccccgagcctggtcgccgcttcacccgccgtcgccgtcgtcggtcgggacgcctccgggcggccgcgccctcgacggaggaatgtcttctgttgctcccgccctcgtccaccaccgcggggtctcaggcagagcaatcttacctttgcatcatggagaatgcagagtccctccaggtgcttgtttcatgggcacatcacctacgttggggccaatgagggtatccttggtatgtaatgcaagccccaaccaccataggccaaggaattcggatatatcgcgacaacaaaaaggggggtcctccagaggaaaaggcaagtcgtaccaggataaagatgactctgagaacattgatgaatttgatagtgatatcatgttctccaagaatgggccaccaatctctttggcaagcaattcccgtcctcaagccacatcggctcctggggaaagagagaaggagatcgtggaactctttaaaagggttcaagcacagctgcgagctagggggaaaagcagggaagacaagaagcctgaacatgcaaaagtgcagggtgaaaggggcagtgttgattcacttcttcagttgctcaggaaacactctgtggaccagagaagaaagaatggtgacgacaaagagcagaattccgatgtattgaggagaggcaacgattctggaaatagacaaggttcaaccgtctttggcacaaaaagtgacatccaggaagagaagaagaagccacctccggcacccttcataaggccagcctcaaatttcaggcgaaggtctcctgttcctggagtgaagttccagcctgttatcaatgcggatctggacactgatgacgatcgcaagtccatcggcagtaatgccgtggatgctgtacagaaagctaagacagctcttgatgagaggactgctacagatgagcctgactccatgtctccatatgaggcggattctgtaatagaaccaggaaacatttctttgaatgacctcgatgacattttacatgacgatgaagaattcgatgcggatgaaccagacgacgagtatccagaaccttctttgggtatctctgatgtcacagatacggatgagtcgcacgagaacgactccacccccacgggaagtgcggatctaagctctctgaaggttgcggagctgagagagctcgcaaagtctcgaggaatcaaagggtactcgaagaagaagaaaaacgagctggttgaagtgttgagcagcagcatggattgatgataaagtgggtgacctggcgctctgtttgaagtttgaacccactttgcttggccccctctagaaaattgtaaatgagcaaggctaactctgttccggtgactgaaggctggcaattattggtctgcgctgcgctctcgacgccgtgcagtagctgcggctttgctcatggaagacacgcccttctctgcatatgctttggttcctggcagccgtcagatgtggagtgattggacggttagttgggctcctcacgtgccgcgtctctgctccttgtctctctggctggctctgcttccgcctgggcctgggcatattgcggagccttgattaaagctggcccagctcggatacggccgcagctatcattgtacgtactactgcaaccgagttccagccagccagccaccccacccctctcctttctttttcc

SEQ ID NO: 51844 - DNA, 1499 bp, Zea Mays
ctccacttgtgaagtagcactgggtctcaggcagagcaatcttacctttgcatcatggagaatgcagagtccctccaggtgcttgtttcatgggcacatcacctacgttggggccaatgagggtatccttggtatgtaatgcaagccccaaccaccataggccaaggaattcggatatatcgcgacaacaaaaaggggggtcctccagaggaaaaggcaagtcgtaccaggataaagatgactctgagaacattgatgaatttgatagtgatatcatgttctccaagaatgggccaccaatctctttggcaagcaattcccgtcctcaagccacatcggctcctggggaaagagagaaggagatcgtggaactctttaaaagggttcaagcacagctgcgagctagggggaaaagcagggaagacaagaagcctgaacatgcaaaagtgcagggtgaaaggggcagtgttgattcacttcttcagttgctcaggaaacactctgtggaccagagaagaaagaatggtgacgacaaagagcagaattccgatgtattgaggagaggcaacgattctggaaatagacaaggttcaaccgtctttggcacaaaaagtgacatccaggaagagaagaagaagccacctccggcacccttcataaggccagcctcaaatttcaggcgaaggtctcctgttcctggagtgaagttccagcctgttatcaatgcggatctggacactgatgacgatcgcaagtccatcggcagtaatgccgtggatgctgtacagaaagctaagacagctcttgatgagaggactgctacagatgagcctgactccatgtctccatatgaggcggattctgtaatagaaccaggaaacatttctttgaatgacctcgatgacattttacatgacgatgaagaattcgatgcggatgaaccagacgacgagtatccagaaccttctttgggtatctctgatgtcacagatacggatgagtcgcacgagaacgactccacccccacgggaagtgcggatctaagctctctgaaggttgcggagctgagagagctcgcaaagtctcgaggaatcaaagggtactcgaagaagaagaaaaacgagctggttgaagtgttgagcagcagcatggattgatgataaagtgactgaaggctggcaattattggtctgcgctgcgctctcgacgccgtgcagtagctgcggctttgctcatggaagacacgcccttctctgcatatgctttggttcctggcagccgtcagatgtggagtgattggacggttagttgggctcctcacgtgccgcgtctctgctccttgtctctctggctggctctgcttccgcctgggcctgggcatattgcggagccttgattaaagctggcccagctcggatacggccgcagctatcattgtacgtactactgcaaccgagttccagccagccagccaccccacccctctcctttctttttcc

SEQ ID NO: 51845 - DNA, 2488 bp, Zea Mays
catcatcccattccccccatccccaccctcctttccagcatccactgccaccatcaactgttcatccacctcgccagagcttcatgctgactcccaaggatgacttgaccacctgagatgctgagagcgtcagagagcatagcatagcatagcatttcttggtgtcgctggatggatggggatgactggatcactcacccggaggcggatcagaaagagtactagctaaccactgccaagattccgccgcgcgcacggatgcatctgtgagcgagcttacacgccgcagagaatactagatcacggcgctgcacattccgggagcgcagctggaaccaagcggctaaggatcgatggatcaccaccaccatcatcaccaccaccatcaccatcacatgatcccgggacaagagccgtcggcgacggacggcgcagcccctgacagcttcttcctgggccccgccgcagccgtcatcttctccggaggcgccggggccggttcgtcgtcgtcgggcgccgcggccctcggatcctccgccgggggaggcggtgggccatctccgtccagctcgtcgccgtcgctgagccggtacgagtcccagaagcgccgggactggaacactttcgggcagtatctgcgcaaccaccggccgccgctgtcgttgtcgcggtgcagcggcgcgcacgtgctggagttcctcaagtacatggatcagttcggcaagaccaaggtgcacacgccggtgtgccccttctacgggcaccccaacccgcccgcgccatgcccgtgcccgctgcgccaggcatggggctccctcgacgcgctcatcggccgcctccgcgccgcctacgaggagaacggcggcacgcccgagatgaaccccttcggcgcgcgggccgtgcggctctacctgcgcgaggtgcgcgagacgcaggcgcgggccagggggatcagctacgagaagaagaagcgcaagaagccgtcggcggcttcggccgcggccgcggggccgtcgtccgagggaagcccaccaccggggccgtccagcggcggtggaggacccgacacgtcgtcgccgcagttcatcatgccgtgagttttttgttcctagctagctagttaagtgatccatcgccatttgccatctacaatccttcccttgatcgtccatctgatgagctagccaacacacagcagcgcgagttggagttcgttccggtgctgctggtctaggccgttgttctttgtcttcttctccagtggcttgcattttgcaaaagatttctcgacctcccccacacccacaccccccaccttcttttctctgtttcattcacttgaatcatcactgtgcgcgtgcgtgagtactggtttaatcgtcgtcgctgttttgtttagctttcatcaacccattggcagcaggcagagtttatgttagttttgcttggtttgttattctcctcccgaggtacgacatgatgcaaacttgcaagaacagtttgagattccctaccaatgcagctgttgtgtgcttatgcatgtcatggcatggtgtgggagaagttttagtttgcagctagcaacaacagtgacaaaagctgtagctgtatagctagctagtagcatctttcagaatttgttcttgtatgcaacttgcaagcaactagtagtttggttctgctgcagaagccagcagccaaactagcttgctgtgctattcattatattggcagaacagaaatataatccttctacatcacactatatctgttcatggactgctgatgtgtggttcaatttcctttattattaggagagcaaaagtagggcaatgcatgcatatgtgcagtgggggagtgctacctgatttgaagcaaatataagccaggaaaaacatatatatgtatatgtttacctagctacttttaattatgtcctcgatcaatgccagtctggaaaaacacgatttatgtgtcaattatatatttctaggagaatccatatcttgtaacttgaataatatatttcttctgatgagattgcaattgcatgtttcatgtttggtttcctttgcgtggttggcattgctgttgtttgctttgcatggccattgcccattgtggtggtattgctttgaaccctagtacatagatgatgcattcgagctgcctactatattgttcacccctgaaaattattacgatggccaaaagggtagctcatggccaccagcaagccagaagaaacaagcatggcaagcaaaagaagcaacgaagaggggggtgtctttcgaaaaaagaaaaggtagaagacacgcaggaactgaaaacgtatagttttttgttcagtttggtgcagtgtgtgtacaatcgggcagcacctgttttagcccatgctgtcatgcttctggccatacctttccttattcatgttaaaattactggatctggctacatttggtcatttgccttcacttcttgtctcttc

SEQ ID NO: 51846 - DNA, 1353 bp, Zea Mays
gtgttggacacatttctttctcctagctgctgtattgttacgcgtctcatgctatcttacttcttattttaaattttacgttataaacagtgtgatctaatgttgttcacttttagattaaagtcagtttttccagactgcttcagctataattcatagagataacactatagaaacagtaaatacaaattaaatctaaacaaatagcctgaaaaatgtaacataaatatagttaggatttattatggaagacaacatcatccatgcatccatccaatctctcgagagtcgagagtgagtgagaatcactcgtcatcaaaccttgcttagcagctgtgcaagcaagtgagaaacacccactctatgacgatcattttgcttcgacatcgtcacggaattcatggaacgggatgggacgaggggaacagcacagcagagcaaagtggagagagataggcaggcaagattgccatccctattgttccaacgatacgagtcatcgtcacattcacaaagtttgaagaactacagcctctagatgagtttgccaccccaccttccagcccgacacagtttcaagacgcgaaaaccaaagaatcagaaggatcaggctcatggtattcatgggtaaagggtggccgaggcacgcagtccagcgacagcggtgatagccggagctggaaagatgaggtggatccgttccacataccgtcggactacacctgggttgatgccaccgagaagaagcggaggatgaaggcaaagaaagccaagagcaggcggggcccagcccgaaaacagtcctcaaagaacactgcggaaggagcccaccgcccaatgatggatggcttcgaggagtaaaccatgctctcaccggcgttgtaagttgcctctgcattcattcttaagatgttagttgttgatggcagcttcacgccgaggcaggttgaaagttgtgccttggagcaccccctgtggtgttggtgtggcaatggatgggagtcgaatctcattgagaacgtacagatggcttataccccactaatctgtaattcagtcagcgctatttttgtccccacctccgattttcatcttgctggatgtatgcttgacagatgatgatacggccctgttgttgttgaaaaagatgtgttgaggggactgtagtgttcctctcccccctgttgtatggaagattaccaatatgcagcgattttctcgcaaagaggaagctcaatgcacatgcttgtttgttcacattcctttttctgctgagtttctgctgatgcatgtgtaacgacagtgtaatttgatgttttcccacgctttcgagctaaggctttaatctaaaat

SEQ ID NO: 51847 - DNA, 2449 bp, Zea Mays
ggtctgtgggctgtggcctcctctcctctcctctcctctcgtcttcgtcccgatcgggcgtccgggccagcgcgcgcgcgagagagaagagacacagacagcgagagaaagggtggaagggaaaaaataacagccgagccgacccagaataggaggaccacttcccttccctccccctccggccactacgcccctcttccccaccgctcgcccgcaccacgccggcgccggcgccgtcaccggagcgagcggccgcgacccggaggagcctccgcacccccgccgcgccagatctggccccgcccgcagcccccatgctccagatccgcctggcctagccacgaccggccgtccgctccccgcgcccccgcgtgccatggacgacgtgtccaggtacgcgcacagcccggcgcacctggccgtcctgcggcgcgaccacgcggcgctgcggcggctggtcgccgcgctcccgcgcctgccgcgcgccggggaggtggcgaccgaggaggagtccatcgcgggggaggccttggcggacgccgtctcggccgtcgtcgaccgccgcgacgtgcctcggagggagaccccgctccacctcgccgtgcgcctccgggaccccgtcgccgccgacgtcctcatgtccgccggcgccgactggtcgctgcagaacgccgacggctggtccgcgctccaggaggccgtctgcacccgcgaggaggccatcgccaccatcatcgcgcgccactaccagccgctcgcctgggccaagtggtgccgccgcctcccgcgcatcctcgcctccatctcccgcatccgcgacttctacatggagatcaccttccacttcgagtcctccgtcatccccttcatcagccgcatcgcgccctccgacacctaccgcatctggaagcgcggcgccgcgctccgggccgacatgacactcgcggggttcgacggcttccgcatccagcgctccgaccagacgttcctcttcctcggggacggcgccaggcctgaggacgccgggggcaaggagctgcacccgggctcgctcatagtgctggcgcacaaggacaaggagatcacggatgcgctggagggggcgggcgtgcagcccaccgagtccgaggtggcgcatgaggtggcgttgatgtccaagaccaacatgtaccgtccggggattgacgtcacgcaggcggagctcgtgccacacttgaattggcgccgccaggagagggcagaagccgttgggcaatggaaagccaagggcgatgacaagccatcaaagatggggagtaaggatgaaacgagtgacccagggaagcaaaaggagaagggcagcgggaagaagaagaagggtggctcacctgctgagtctctaaaacatgaaagcgagtacaagaaggggttaagaccagtgttgtggctgacaccggatttccctctgaagacagatgaactcatccctctgcttgatgtcctagcaaacaaagtcaaggctgtaaggaggcttagggaactcttgacaaccaaacttcctacaggcacatttccagtcaagattgccatccctattgttccaacgatacgagtcatcgtcacattcacaaagtttgaagaactacagcctctagatgagtttgccaccccaccttccagcccgacacagtttcaagacgcgaaaaccaaagaatcagaaggatcaggctcatggtattcatgggtaaagggtggccgaggcacgcagtccagcgacagcggtgatagccggagctggaaagatgaggtggatccgttccacataccgtcggactacacctgggttgatgccaccgagaagaagcggaggatgaaggcaaagaaagccaagagcaggcggggcccagcccgaaaacagtcctcaaagaacactgcggaaggagcccaccgcccaatgatggatggcttcgaggagtaaaccatgctctcaccggcgttgtaagttgcctctgcattcattcttaagatgttagttgttgatggcagcttcacgccgaggcaggttgaaagttgtgccttggagcaccccctgtggtgttggtgtggcaatggatgggagtcgaatctcattgagaacgtacagatggcttataccccactaatctgtaattcagtcagcgctatttttgtccccacctccgattttcatcttgctggatgtatgcttgacagatgatgatacggccctgttgttgttgaaaaagatgtgttgaggggactgtagtgttcctctcccccctgttgtatggaagattaccaatatgcagcgattttctcgcaaagaggaagctcaatgcacatgcttgtttgttcacattcctttttctgctgagtttctgctgatgcatgtgtaacgacagtgtaatttgatgttttcccacgctttcgagctaaggctttaatctaaaat

SEQ ID NO: 51848 - DNA, 911 bp, Zea Mays
taatgttggagcctccgtcactgattgccatccctattgttccaacgatacgagtcatcgtcacattcacaaagtttgaagaactacagcctctagatgagtttgccaccccaccttccagcccgacacagtttcaagacgcgaaaaccaaagaatcagaaggatcaggctcatggtattcatgggtaaagggtggccgaggcacgcagtccagcgacagcggtgatagccggagctggaaagatgaggtggatccgttccacataccgtcggactacacctgggttgatgccaccgagaagaagcggaggatgaaggcaaagaaagccaagagcaggcggggcccagcccgaaaacagtcctcaaagaacactgcggaaggagcccaccgcccaatgatggatggcttcgaggagtaaaccatgctctcaccggcgttgtaagttgcctctgcattcattcttaagatgttagttgttgatggcagcttcacgccgaggcaggttgaaagttgtgccttggagcaccccctgtggtgttggtgtggcaatggatgggagtcgaatctcattgagaacgtacagatggcttataccccactaatctgtaattcagtcagcgctatttttgtccccacctccgattttcatcttgctggatgtatgcttgacagatgatgatacggccctgttgttgttgaaaaagatgtgttgaggggactgtagtgttcctctcccccctgttgtatggaagattaccaatatgcagcgattttctcgcaaagaggaagctcaatgcacatgcttgtttgttcacattcctttttctgctgagtttctgctgatgcatgtgtaacgacagtgtaatttgatgttttcccacgctttcgagctaaggctttaatctaaaat

SEQ ID NO: 51849 - DNA, 2878 bp, Zea Mays
ccaaactgtaagagcccatctacgatacagcccacccatcaaagtccagccggagtccagactcgccgagccacgccgacgccgacgccgacggcgcgagggagcagacctaaacctccgaaactcctctccgccgccgcacctgcagcaatcatgtcgcagaagaaatcccgcagccggggcgggggaggcggcgccgccgcctccggcgacggccacgaggatctcgcccgcccgccacccctccaggcggtcctcctcgctgacagcttcacgctgaaattccgccccatcaccctcgagcgccccaaggtgctgctaccgctggtgcacatgccgatgatcgagtacacgctcacatggctggagtctgccggggtggaggaggccttcgtcttctgctgcgcgcactcgcaccaggtcaaggagtacttggagaaggccgggtggtccggtaagtccgggcccgggagcatggccgtcacggccgtcgagtcccacgatgcgattagcgctggcgacgcgctccgcgtcatctacgaccgcggcgtgatacacggagattttgttctcatcagtggtgatacagtcagtaacatgagcttgaaggacgctctccaggaacatatggatcggaagaaaaaggacccacttgctgttatgactatggttataaagcattcaaaaccttctatcttgacgcaccaaacccgtcttggtaatgatgaaattgttatggcgatagatcctgagacaaaggagttactttattatgaagacagggcagataactcacacttgcatgttacaattgataaggatatactgaccaataatcctactctccagctgcataatgatatggaggactgctacattgatatctgctctccagaagtcctaagtctttttacagataacttcgattatcagcatcttcgccgtcattttgtgaagggcttactagttgatgatattatggggtacaaaatctatactcatgaattacgctctggatatgctgcaaggattgataattttaggagctatgataccgtgagcaaagatgtaattcaaaggtggacatatcctatggtgcctgatgtagtatccagtcgtgattcctcggagagtagacttcataggcagggaatatacaaggcatcagatgtaacattgtcaccttctgcacaaatcggtgcaaattctgttgttggtagtgtgactagtattgcaggtcactgcaaagttttaaattcagttattggacaaggctgcaagattgggaaaaatgttctgattaacggctcatttatatgggacaatgtcataattgaagatggatgcaaagttagtaactctttagtctgtgatggtgtccatctaagagctggtgctgttgttgaacctggttgtgtactgtcatttaaggttgaagttggaaagaatgttgttgttcctgcccactcaaaagtttcattacttcctcagccttcaaatgaagatagcgatgaagaacttgagtatgctgacactaactctggaattgcagatagtccaccattttccagtatgaggagtaatggtgatcaagcaactgttccttcagaagaagatgagttgggaacatccgagactggcacctgtggtgttgtcggttacatatggacaagtgttgatagtgggatcatggaagaatggagacaatcaattgcccctattcctaaagaaaagcttgaagagctgcagcatgctgtgcctgatgatgataggtcagaagatgaatccaacaatccaactctaccagataaagatgattcttcagacagtctggttgaggatgatgatcatatttctaagtttgagaaagaggtggaagagacattccaacgagctctgggtggcggcgttaatcgagataatttgatactagagattaatggcctaaggttagcctacagccttcaacatgcagattgtgctggagctgtgttctattctgtcatgaagagtgcattactggctgcacaatctagtaatgatactcttttgaagacaactgctgatgcacttggcaagtggaaggatcttttgcgcaattacaccaagacagttgatgaagagatggagatacttttaaagtttgaggaaatgtgtcaagagaccacaaaagatttttctccgctgtttccaaagatcttgccatacctctatgatacggaggtagtaagtgaagatgcaattttgagatgggcggaagagaaagaacatgctgatgagtctgataaagtttttgttaaacagtcagaggcttttattcagtggctcaaggaagcggaagaggaggatgacgaagaagaggaataaccctggagttgagctggcactcgaattctttcatgcattgtgagcgcaggatctgatttgagtgggtctctcgcaaaaatcgaaggacgatgaaaaaaccagaagggccctgggggccaaaagaagaggaaaaagccggcaggagtagcagtggaaggttgcacttgcactgctgggctaagcaatctcgctgtgcgttcgcacatcttctgcagcatgtgctgtttcgagtttataagctgcatactgtgactagtgtgcattgtttaatgttggtgatggttttactatgaccatgagaagagaaagcatgcagttttcctaatactgtttgacctttgtaatcttctggtcgtaaagagttaccgcggaatcacactggacaattcgtcgataagaggaatcgcattttggacttgggatgtgttctgtgcggataagaggaatccatctttagttctggttctgacctcacagccacgctggtcgatcgagatcatgtcgtcgtatt

SEQ ID NO: 51850 - DNA, 2828 bp, Zea Mays
ccggagtccagactcgccgagccacgccgacgccgacgccgacggcgcgagggagcagacctaaacctccgaaactcctctccgccgccgcacctgcagcaatcatgtcgcagaagaaatcccgcagccggggcgggggaggcggcgccgccgcctccggcgacggccacgaggatctcgcccgcccgccacccctccaggcggtcctcctcgctgacagcttcacgctgaaattccgccccatcaccctcgagcgccccaaggtgctgctaccgctggtgcacatgccgatgatcgagtacacgctcacatggctggagtctgccggggtggaggaggccttcgtcttctgctgcgcgcactcgcaccaggtcaaggagtacttggagaaggccgggtggtccggtaagtccgggcccgggagcatggccgtcacggccgtcgagtcccacgatgcgattagcgctggcgacgcgctccgcgtcatctacgaccgcggcgtgatacacggagattttgttctcatcagtggtgatacagtcagtaacatgagcttgaaggacgctctccaggaacatatggatcggaagaaaaaggacccacttgctgttatgactatggttataaagcattcaaaaccttctatcttgacgcaccaaacccgtcttggtaatgatgaaattgttatggcgatagatcctgagacaaaggagttactttattatgaagacagggcagataactcacacttgcatgttacaattgataaggatatactgaccaataatcctactctccagctgcataatgatatggaggactgctacattgatatctgctctccagaagtcctaagtctttttacagataacttcgattatcagcatcttcgccgtcattttgtgaagggcttactagttgatgatattatggggtacaaaatctatactcatgaattacgctctggatatgctgcaaggattgataattttaggagctatgataccgtgagcaaagatgtaattcaaaggtggacatatcctatggtgcctgatgtagtatccagtcgtgattcctcggagagtagacttcataggcagggaatatacaaggcatcagtgtaacattgtcaccttctgcacaaatcggtgcaaattctgttgttggtagtgtgactagtattgcaggtcactgcaaagttttaaattcagttattggacaaggctgcaagattgggaaaaatgttctgattaacggctcatttatatgggacaatgtcataattgaagatggatgcaaagttagtaactctttagtctgtgatggtgtccatctaagagctggtgctgttgttgaacctggttgtgtactgtcatttaaggttgaagttggaaagaatgttgttgttcctgcccactcaaaagtttcattacttcctcagccttcaaatgaagatagcgatgaagaacttgagtatgctgacactaactctggaattgcagatagtccaccattttccagtatgaggagtaatggtgatcaagcaactgttccttcagaagaagatgagttgggaacatccgagactggcacctgtggtgttgtcggttacatatggacaagtgttgatagtgggatcatggaagaatggagacaatcaattgcccctattcctaaagaaaagcttgaagagctgcagcatgctgtgcctgatgatgataggtcagaagatgaatccaacaatccaactctaccagataaagatgattcttcagacagtctggttgaggatgatgatcatatttctaagtttgagaaagaggtggaagagacattccaacgagctctgggtggcggcgttaatcgagataatttgatactagagattaatggcctaaggttagcctacagccttcaacatgcagattgtgctggagctgtgttctattctgtcatgaagagtgcattactggctgcacaatctagtaatgatactcttttgaagacaactgctgatgcacttggcaagtggaaggatcttttgcgcaattacaccaagacagttgatgaagagatggagatacttttaaagtttgaggaaatgtgtcaagagaccacaaaagatttttctccgctgtttccaaagatcttgccatacctctatgatacggaggtagtaagtgaagatgcaattttgagatgggcggaagagaaagaacatgctgatgagtctgataaagtttttgttaaacagtcagaggcttttattcagtggctcaaggaagcggaagaggaggatgacgaagaagaggaataaccctggagttgagctggcactcgaattctttcatgcattgtgagcgcaggatctgatttgagtgggtctctcgcaaaaatcgaaggacgatgaaaaaaccagaagggccctgggggccaaaagaagaggaaaaagccggcaggagtagcagtggaaggttgcacttgcactgctgggctaagcaatctcgctgtgcgttcgcacatcttctgcagcatgtgctgtttcgagtttataagctgcatactgtgactagtgtgcattgtttaatgttggtgatggttttactatgaccatgagaagagaaagcatgcagttttcctaatactgtttgacctttgtaatcttctggtcgtaaagagttaccgcggaatcacactggacaattcgtcgataagaggaatcgcattttggacttgggatgtgttctgtgcggataagaggaatccatctttagttctggttctgacctcacagccacgctggtcgatcgagatcatgtcgtcgtatt

SEQ ID NO: 51851 - DNA, 2907 bp, Zea Mays
cagactcgccgagccacgccgacgccgacgccgacggcgcgagggagcagacctaaacctccgaaactcctctccgccgccgcacctgcagcaatcatgtcgcagaagaaatcccgcagccggggcgggggaggcggcgccgccgcctccggcgacggccacgaggatctcgcccgcccgccacccctccaggcggtcctcctcgctgacagcttcacgctgaaattccgccccatcaccctcgagcgccccaaggtgctgctaccgctggtgcacatgccgatgatcgagtacacgctcacatggctggagtctgccggggtggaggaggccttcgtcttctgctgcgcgcactcgcaccaggtcaaggagtacttggagaaggccgggtggtccggtaagtccgggcccgggagcatggccgtcacggccgtcgagtcccacgatgcgattagcgctggcgacgcgctccgcgtcatctacgaccgcggcgtgatacacggagattttgttctcatcagtggtgatacagtcagtaacatgagcttgaaggacgctctccaggaacatatggatcggaagaaaaaggacccacttgctgttatgactatggttataaagcattcaaaaccttctatcttgacgcaccaaacccgtcttggtaatgatgaaattgttatggcgatagatcctgagacaaaggagttactttattatgaagacagggcagataactcacacttgcatgttacaattgataaggatatactgaccaataatcctactctccagctgcataatgatatggaggactgctacattgatatctgctctccagaagtcctaagtctttttacagataacttcgattatcagcatcttcgccgtcattttgtgaagggcttactagttgatgatgtaagacaattcactactgtttgaccacagtaagaaaaaggacatatgctgtttgcctgttctgcaacaaagtaatgtccttaccaattctttcagattatggggtacaaaatctatactcatgaattacgctctggatatgctgcaaggattgataattttaggagctatgataccgtgagcaaagatgtaattcaaaggtggacatatcctatggtgcctgatgtagtatccagtcgtgattcctcggagagtagacttcataggcagggaatatacaaggcatcagatgtaacattgtcaccttctgcacaaatcggtgcaaattctgttgttggtagtgtgactagtattgcaggtcactgcaaagttttaaattcagttattggacaaggctgcaagattgggaaaaatgttctgattaacggctcatttatatgggacaatgtcataattgaagatggatgcaaagttagtaactctttagtctgtgatggtgtccatctaagagctggtgctgttgttgaacctggttgtgtactgtcatttaaggttgaagttggaaagaatgttgttgttcctgcccactcaaaagtttcattacttcctcagccttcaaatgaagatagcgatgaagaacttgagtatgctgacactaactctggaattgcagatagtccactatgaggagtaatggtgatcaagcaactgttccttcagaagaagatgagttgggaacatccgagactggcacctgtggtgttgtcggttacatatggacaagtgttgatagtgggatcatggaagaatggagacaatcaattgcccctattcctaaagaaaagcttgaagagctgcagcatgctgtgcctgatgatgataggtcagaagatgaatccaacaatccaactctaccagataaagatgattcttcagacagtctggttgaggatgatgatcatatttctaagtttgagaaagaggtggaagagacattccaacgagctctgggtggcggcgttaatcgagataatttgatactagagattaatggcctaaggttagcctacagccttcaacatgcagattgtgctggagctgtgttctattctgtcatgaagagtgcattactggctgcacaatctagtaatgatactcttttgaagacaactgctgatgcacttggcaagtggaaggatcttttgcgcaattacaccaagacagttgatgaagagatggagatacttttaaagtttgaggaaatgtgtcaagagaccacaaaagatttttctccgctgtttccaaagatcttgccatacctctatgatacggaggtagtaagtgaagatgcaattttgagatgggcggaagagaaagaacatgctgatgagtctgataaagtttttgttaaacagtcagaggcttttattcagtggctcaaggaagcggaagaggaggatgacgaagaagaggaataaccctggagttgagctggcactcgaattctttcatgcattgtgagcgcaggatctgatttgagtgggtctctcgcaaaaatcgaaggacgatgaaaaaaccagaagggccctgggggccaaaagaagaggaaaaagccggcaggagtagcagtggaaggttgcacttgcactgctgggctaagcaatctcgctgtgcgttcgcacatcttctgcagcatgtgctgtttcgagtttataagctgcatactgtgactagtgtgcattgtttaatgttggtgatggttttactatgaccatgagaagagaaagcatgcagttttcctaatactgtttgacctttgtaatcttctggtcgtaaagagttaccgcggaatcacactggacaattcgtcgataagaggaatcgcattttggacttgggatgtgttctgtgcggataagaggaatccatctttagttctggttctgacctcacagccacgctggtcgatcgagatcatgtcgtcgtatt

SEQ ID NO: 51852 - DNA, 1918 bp, Zea Mays
agacaattcactactgtttgaccacagtaagaaaaaggacatatgctgtttgcctgttctgcaacaaagattgataattttaggagctatgataccgtgagcaaagatgtaattcaaaggtggacatatcctatggtgcctgatgtagtatccagtcgtgattcctcggagagtagacttcataggcagggaatatacaaggcatcagatgtaacattgtcaccttctgcacaaatcggtgcaaattctgttgttggtagtgtgactagtattgcaggtcactgcaaagttttaaattcagttattggacaaggctgcaagattgggaaaaatgttctgattaacggctcatttatatgggacaatgtcataattgaagatggatgcaaagttagtaactctttagtctgtgatggtgtccatctaagagctggtgctgttgttgaacctggttgtgtactgtcatttaaggttgaagttggaaagaatgttgttgttcctgcccactcaaaagtttcattacttcctcagccttcaaatgaagatagcgatgaagaacttgagtatgctgacactaactctggaattgcagatagtccaccattttccagtatgaggagtaatggtgatcaagcaactgttccttcagaagaagatgagttgggaacatccgagactggcacctgtggtgttgtcggttacatatggacaagtgttgatagtgggatcatggaagaatggagacaatcaattgcccctattcctaaagaaaagcttgaagagctgcagcatgctgtgcctgatgatgataggtcagaagatgaatccaacaatccaactctaccagataaagatgattcttcagacagtctggttgaggatgatgatcatatttctaagtttgagaaagaggtggaagagacattccaacgagctctgggtggcggcgttaatcgagataatttgatactagagattaatggcctaaggttagcctacagccttcaacatgcagattgtgctggagctgtgttctattctgtcatgaagagtgcattactggctgcacaatctagtaatgatactcttttgaagacaactgctgatgcacttggcaagtggaaggatcttttgcgcaattacaccaagacagttgatgaagagatggagatacttttaaagtttgaggaaatgtgtcaagagaccacaaaagatttttctccgctgtttccaaagatcttgccatacctctatgatacggaggtagtaagtgaagatgcaattttgagatgggcggaagagaaagaacatgctgatgagtctgataaagtttttgttaaacagtcagaggcttttattcagtggctcaaggaagcggaagaggaggatgacgaagaagaggaataaccctggagttgagctggcactcgaattctttcatgcattgtgagcgcaggatctgatttgagtgggtctctcgcaaaaatcgaaggacgatgaaaaaaccagaagggccctgggggccaaaagaagaggaaaaagccggcaggagtagcagtggaaggttgcacttgcactgctgggctaagcaatctcgctgtgcgttcgcacatcttctgcagcatgtgctgtttcgagtttataagctgcatactgtgactagtgtgcattgtttaatgttggtgatggttttactatgaccatgagaagagaaagcatgcagttttcctaatactgtttgacctttgtaatcttctggtcgtaaagagttaccgcggaatcacactggacaattcgtcgataagaggaatcgcattttggacttgggatgtgttctgtgcggataagaggaatccatctttagttctggttctgacctcacagccacgctggtcgatcgagatcatgtcgtcgtatt

SEQ ID NO: 51853 - DNA, 2448 bp, Zea Mays
agacaattcactactgtttgaccacagtaagaaaaaggacatatgctgtttgcctgttctgcaacaaagattgataattttaggagctatgataccgtgagcaaagatgtaattcaaaggtggacatatcctatggtgcctgatgtagtatccagtcgtgattcctcggagagtagacttcataggcagggaatatacaaggcatcagatgtaacattgtcaccttctgcacaaatcggtgcaaattctgttgttggtagtgtgactagtattgcaggtcactgcaaagttttaaattcagttattggacaaggctgcaagattgggaaaaatgttctgattaacggctcatttatatgggacaatgtcataattgaagatggatgcaaagttagtaactctttagtctgtgatggtgtccatctaagagctggtgctgttgttgaacctggttgtgtactgtcatttaaggttgaagttggaaagaatgttgttgttcctgcccactcaaaagtttcattacttcctcagccttcaaatgaagatagcgatgaagaacttgagtatgctgacactaactctggaattgcagatagtccaccattttccagtatgaggagtaatggtgatcaagcaactgttccttcagaagaagatgagttgggaacatccgagactggcacctgtggtgttgtcggttacatatggacaagtgttgatagtgggatcatggaagaatggagacaatcaattgcccctattcctaaagaaaagcttgaagagctgcagcatgctgtgcctgatgatgataggtcagaagatgaatccaacaatccaactctaccagataaagatgattcttcagacagtctggttgaggatgatgatcatatttctaagtttgagaaagaggtggaagagacattccaacgagctctgggtggcggcgttaatcgagataatttgatactagagattaatggcctaaggttagcctacagccttcaacatgcagattgtgctggagctgtgttctattctgtcatgaagagtgcattactggctgcacaatctagtaatgatactcttttgaagacaactgctgatgcacttggcaagtggaaggatcttttgcgcaattacaccaagacagttgatgaagagatggagatacttttaaagtttgaggaaatgtgtcaagagaccacaaaagatttttctccgctgtttccaaagatcttgccatacctctatgatacggaggtagtaagtgaagatgcaattttgagatgggcggaagagaaagaacatgctgatgagtctgataaagtttttgttaaacagtcagaggcttttattcagtggctcaaggaagcggaagaggaggatgacgaagaagaggaataaccctggagttgagctggcactcgaattctttcatgcattgtgagcgcaggatctgatttgagtgggtctctcggtgagttctcgcgagcagcaagttttgcaacctgtaattgcctgtacatcaacacaacacaattttgtccctaaccgcaactggtggagagtagcaaggagcgatttggcgtgaatgaaccaaaatgatcccagtgtagatgacatgctataactgtgctatctttgcttggttgacgcttgggcgaagtcttcgccacatttgtttaactggccatcacctgtttcttggcacccagccggcactcgcacagatctttaataaaagcttgtttagatatggcccccctttttttatcttctttctggtgagaaatgtagtgggaaagaaacaatggaggcttcttctccgaaaggtcccagtggatcatgtgggttgcgtagatcaggcactaatcttacctcaaaaggggcacagtttgcttaaagcacgctcttttgccccgaaaacctttgatgtttctttattttttttcgccctagttccctgatagccctgcttgctttgtgaaacaactgaacaatgggcagcaaaaatcgaaggacgatgaaaaaaccagaagggccctgggggccaaaagaagaggaaaaagccggcaggagtagcagtggaaggttgcacttgcactgctgggctaagcaatctcgctgtgcgttcgcacatcttctgcagcatgtgctgtttcgagtttataagctgcatactgtgactagtgtgcattgtttaatgttggtgatggttttactatgaccatgagaagagaaagcatgcagttttcctaatactgtttgacctttgtaatcttctggtcgtaaagagttaccgcggaatcacactggacaattcgtcgataagaggaatcgcattttggacttgggatgtgttctgtgcggataagaggaatccatctttagttctggttctgacctcacagccacgctggtcgatcgagatcatgtcgtcgtatt

SEQ ID NO: 51854 - DNA, 1888 bp, Zea Mays
gtttgaccacagtaagaaaaaggacatatgctgtttgcctgttctgcaacaaagagctatgataccgtgagcaaagatgtaattcaaaggtggacatatcctatggtgcctgatgtagtatccagtcgtgattcctcggagagtagacttcataggcagggaatatacaaggcatcagatgtaacattgtcaccttctgcacaaatcggtgcaaattctgttgttggtagtgtgactagtattgcaggtcactgcaaagttttaaattcagttattggacaaggctgcaagattgggaaaaatgttctgattaacggctcatttatatgggacaatgtcataattgaagatggatgcaaagttagtaactctttagtctgtgatggtgtccatctaagagctggtgctgttgttgaacctggttgtgtactgtcatttaaggttgaagttggaaagaatgttgttgttcctgcccactcaaaagtttcattacttcctcagccttcaaatgaagatagcgatgaagaacttgagtatgctgacactaactctggaattgcagatagtccaccattttccagtatgaggagtaatggtgatcaagcaactgttccttcagaagaagatgagttgggaacatccgagactggcacctgtggtgttgtcggttacatatggacaagtgttgatagtgggatcatggaagaatggagacaatcaattgcccctattcctaaagaaaagcttgaagagctgcagcatgctgtgcctgatgatgataggtcagaagatgaatccaacaatccaactctaccagataaagatgattcttcagacagtctggttgaggatgatgatcatatttctaagtttgagaaagaggtggaagagacattccaacgagctctgggtggcggcgttaatcgagataatttgatactagagattaatggcctaaggttagcctacagccttcaacatgcagattgtgctggagctgtgttctattctgtcatgaagagtgcattactggctgcacaatctagtaatgatactcttttgaagacaactgctgatgcacttggcaagtggaaggatcttttgcgcaattacaccaagacagttgatgaagagatggagatacttttaaagtttgaggaaatgtgtcaagagaccacaaaagatttttctccgctgtttccaaagatcttgccatacctctatgatacggaggtagtaagtgaagatgcaattttgagatgggcggaagagaaagaacatgctgatgagtctgataaagtttttgttaaacagtcagaggcttttattcagtggctcaaggaagcggaagaggaggatgacgaagaagaggaataaccctggagttgagctggcactcgaattctttcatgcattgtgagcgcaggatctgatttgagtgggtctctcgcaaaaatcgaaggacgatgaaaaaaccagaagggccctgggggccaaaagaagaggaaaaagccggcaggagtagcagtggaaggttgcacttgcactgctgggctaagcaatctcgctgtgcgttcgcacatcttctgcagcatgtgctgtttcgagtttataagctgcatactgtgactagtgtgcattgtttaatgttggtgatggttttactatgaccatgagaagagaaagcatgcagttttcctaatactgtttgacctttgtaatcttctggtcgtaaagagttaccgcggaatcacactggacaattcgtcgataagaggaatcgcattttggacttgggatgtgttctgtgcggataagaggaatccatctttagttctggttctgacctcacagccacgctggtcgatcgagatcatgtcgtcgtatt

SEQ ID NO: 51855 - DNA, 1794 bp, Zea Mays
gtttccgtcacttgttggagttgctgtaacatttccggtggctcaaagtttcctaaacagaagagatgtggttctaaacaaaagtttgcacgtcgatcgcttgcttccacgcgtgcatcctcccctgtcctgatggcgactggcagggcaggccgccactgggcatccgcatatccctcacgcggtcacagttactccgggacccacatgtcatcacgtcaaccttcgccatgcccaaagcttagcctcgaagcgtctgtactgtgtgcgtcctctcctcgacctcaacccccaccccgccctacctacaaccctattaaattccgccttccgacccgtagacctgattgatccccgcatcgaatccggcggatcgggagcgggagagaccactcccaaatcgcgtcgcgtcgagagcgagagcggaagaggtgcgcgcgggggaaccgaccgaaccgactgatggagtcgacggcggcgcccgccgcctgcgagatcgcgcgcctgccggatgacctcctgtcggcggcgctcggccggacggggccgctggacgcctgccgcgccgccgcggtctcgccggcctttcgcgccgcggccgacgccgacgccgtctggtccagcttcctgccgcccgacctgcccccgctcgccgatggggagctccccgccgacgcgacggccaccaagaagcagctcttcatgcgcctctccgaccccgccagacccgtcctcctcgccgacggcctcacgagcatgtggctggacagggccaccgtggccaagtgttacatgctgtccgccaggaagctgaccatcatttggggcgatacgccgcagtactggcgctggatccccctcaccgactccagtttgacggtatctctagtctagtctggatacacggccgggccaatagttgcgcgtctgtgcagatgtccagtggagattattgtttcgaagcagtctggttctcagaatgcgcagaactccagcacgtttgctggctggaaatccgcggcaagataccctgcgacatgctgtcccggaacaccacttacgccgcctacatggtgttcaagatgtccgacgaatcctatgggctggactatccgctccaggaggctgaagttagcatcggggcaaccaggtccactcgtcaggtctgcctagggtacgtcgacgacgacgaggacggggaagaggtgcctcagaactaccggtcgttcggggcggtgggaactgtatttagaccaaggatcgggaggcggaaccgtcgccagcctcctggagtgcacgtcctgcaccctcagacaagagccggcggctggatggagatggagatgggtgagttcaggaacgaggaaggtgaagatggcgaggtgtccgtcagcctcatggagaccaggggcggcaactggaagagaggtcttactgtgcagggcattgagatcagggtgaagaagtaaggatgtgaaggttgtggggatcgggctttgcgcatcaaaacaaataaaaggatcttagttagatttgtagtgcgtgttctactgcactgcagcacttgcgtatgtgtgtgtcttgcctatgcccagcaaaaaaaaaaaacaaaaagttcttcttgaggcaaaagaactgcagttttgtacacaatattgttgtgtcccagatcactcggtgctcgatgactggccatgtttgcttttgaaagtgtaaactaggtgtgcttgttacgatcacacaaatcaccaatggagaacaccaattctcgctacgccaaccgctccagttcag

SEQ ID NO: 51856 - DNA, 1532 bp, Zea Mays
aagtttcctaaacagaagagatgtggttctaaacaaaagtttgcacgtcgatcgcttgcttccacgcgtgcatcctcccctgtcctgatggcgactggcagggcaggccgccactgggcatccgcatatccctcacgcggtcacagttactccgggacccacatgtcatcacgtcaaccttcgccatgcccaaagcttagcctcgaagcgtctgtactgtgtgcgtcctctcctcgacctcaacccccaccccgccctacctacaaccctattaaattccgccttccgacccgtagacctgattgatccccgcatcgaatccggcggatcgggagcgggagagaccactcccaaatcgcgtcgcgtcgagagcgagagcggaagaggtgcgcgcgggggaaccgaccgaaccgactgatggagtcgacggcggcgcccgccgcctgcgagatcgcgcgcctgccggatgacctcctgtcggcggcgctcggccggacggggccgctggacgcctgccgcgccgccgcggtctcgccggcctttcgcgccgcggccgacgccgacgccgtctggtccagcttcctgccgcccgacctgcccccgctcgccgatggggagctccccgccgacgcgacggccaccaagaagcagctcttcatgcgcctctccgaccccgccagacccgtcctcctcgccgacggcctcacggttctcagaatgcgcagaactccagcacgtttgctggctggaaatccgcggcaagataccctgcgacatgctgtcccggaacaccacttacgccgcctacatggtgttcaagatgtccgacgaatcctatgggctggactatccgctccaggaggctgaagttagcatcggggcaaccaggtccactcgtcaggtctgcctagggtacgtcgacgacgacgaggacggggaagaggtgcctcagaactaccggtcgttcggggcggtgggaactgtatttagaccaaggatcgggaggcggaaccgtcgccagcctcctggagtgcacgtcctgcaccctcagacaagagccggcggctggatggagatggagatgggtgagttcaggaacgaggaaggtgaagatggcgaggtgtccgtcagcctcatggagaccaggggcggcaactggaagagaggtcttactgtgcagggcattgagatcagggtgaagaagtaaggatgtgaaggttgtggggatcgggctttgcgcatcaaaacaaataaaaggatcttagttagatttgtagtgcgtgttctactgcactgcagcacttgcgtatgtgtgtgtcttgcctatgcccagcaaaaaaaaaaaacaaaaagttcttcttgaggcaaaagaactgcagttttgtacacaatattgttgtgtcccagatcactcggtgctcgatgactggccatgtttgcttttgaaagtgtaaactaggtgtgcttgttacgatcacacaaatcaccaatggagaacaccaattctcgctacgccaaccgctccagttcag

SEQ ID NO: 51857 - DNA, 2017 bp, Zea Mays
cgggaatggaagaccggggcagagctggcaagtggcaaggctgcgcagagggactttttgtgtaaaatgcggtgggaaggtgcgctgcacctgcaagcagaggtgtgctctactgacagagtttgaactcaagaggaggcgaggcagaaccgcaatcgcgaccgcgacccgcaggtgacatacatacggtgcgagcgccggaagccggaagcaccggtgacgaagccttccgtgtcatcactcatcaggatctcagggttttgtttcgtttcgcgggcgttgggaatccatccatggcgaggaagatgctcatcgacggggaggtggcggccgtcgcggatggtgggcactatgactacgatctcttcgtcatcggggcgggcagcggcggcgttcgcggctctcgcaccgccgcctccttcggagctaaggttgcgatttgtgagctcccattccaccccatcagctcagagtggctaggaggacatggtgggacttgcgtgatacgtggttgcgtacctaaaaagatactcgtgtatggtgcatcattccgtggagaatttgaggattcgaagaattttgggtgggagattaacggagatattaacttcaattggaaaacgctattggaaaataaggtcatgtttaaatctctaccatgactgtgagcatgttctccgcaactgctgaccctgaaggaatatcatattgcccaaggggcaggcagtctagttgatgctcatactgttgaagttagccagcctgatggttcaaagcaaaggtatacagcgaagcacattttgatcgcgactggtagccgtgctcaacgtgtcaacatacctggaaaggatctggctattacttctgatgaggccttgagcttggaggagcttccaaagcgcgctgtaatcctgggtggcggatatattgctgttgaatttgcttctatctggagggggatgggtgctgaagtagatttgttttatcgaagagatcttcctctaagaggttttgatgatgagatgagagctattgttgcaagcaaccttgagggaaggggaatcaagttgcatccagggacaaatctctctgagttgagtaaaacggctgacggaataaaagttgtaactgataaaggagaagagctcattgcagatgttgtcctatttgcgacagggcgcacaccaaactcccagagactgaacttgcaagctgcaggcgttgagattgaccgggttggagccatcaaggttgacgaatattctcgtacttctgctcctagtgtatgggctgtgggtgatgtaacaaaccggattaatttaacacctgttgcattgatggaggcaacttgctttgctaaaactgtgtttggtggccagcaagttaagcctgatcacagagatgttccttgtgctgttttctccattccaccactatctgtagtgggcctcagcgaagaacaggccttggaggaagctaatggtgatattcttgttttcatctcatcattcaacccaatgaagaacagcatatccaagcgccaggagaagactatcatgaaactggtagttgatgctgaaactgacaaagtacttggtgcatccatgtgtggaccagacgcacctgaaattatccagggcatcgctattgcggttaaatgtggagccaccaaagcagacttcgacagcactgtcggaatccacccttccgctgctgaagagttcgtgaccatgcgcaccgtgacgaggcgcttgagcccgacatccaagccaaagacgaacttgtaagcaagaaattggtattctggggaaatgttacaccggacaaatactctggtttcatcacgttggtaatttttacgtcattggaactggaaccatgtatattgaaggaataagttgtttttttcatggcaacacaccgaaaataatgagaccgtggactttcttgatacaaataatgagctcaagcagagaacgtttatggttggttctcatctgaattctttgcggcgttg

SEQ ID NO: 51858 - DNA, 1823 bp, Zea Mays
ccggggcagagctggcaagtggcaaggctgcgcagagggactttttgtgtaaaatgcggtgggaaggtgcgctgcacctgcaagcagaggtgtgctctactgacagagtttgaactcaagaggaggcgaggcagaaccgcaatcgcgaccgcgacccgcaggtgacatacatacggtgcgagcgccggaagccggaagcaccggtgacgaagccttccgtgtcatcactcatcaggatctcaggttgcgatttgtgagctcccattccaccccatcagctcagagtggctaggaggacatggtgggacttgcgtgatacgtggttgcgtacctaaaaagatactcgtgtatggtgcatcattccgtggagaatttgaggattcgaagaattttgggtgggagattaacggagatattaacttcaattggaaaacgctattggaaaataagactaaagaaattgttagattaaatggtgtgtatcagaggatccttaccagtgccggtgtgacaatgattgaaggggcaggcagtctagttgatgctcatactgttgaagttagccagcctgatggttcaaagcaaaggtatacagcgaagcacattttgatcgcgactggtagccgtgctcaacgtgtcaacatacctggaaaggatctggctattacttctgatgaggccttgagcttggaggagcttccaaagcgcgctgtaatcctgggtggcggatatattgctgttgaatttgcttctatctggagggggatgggtgctgaagtagatttgttttatcgaagagatcttcctctaagaggttttgatgatgagatgagagctattgttgcaagcaaccttgagggaaggggaatcaagttgcatccagggacaaatctctctgagttgagtaaaacggctgacggaataaaagttgtaactgataaaggagaagagctcattgcagatgttgtcctatttgcgacagggcgcacaccaaactcccagagactgaacttgcaagctgcaggcgttgagattgaccgggttggagccatcaaggttgacgaatattctcgtacttctgctcctagtgtatgggctgtgggtgatgtaacaaaccggattaatttaacacctgttgcattgatggaggcaacttgctttgctaaaactgtgtttggtggccagcaagttaagcctgatcacagagatgttccttgtgctgttttctccattccaccactatctgtagtgggcctcagcgaagaacaggccttggaggaagctaatggtgatattcttgttttcatctcatcattcaacccaatgaagaacagcatatccaagcgccaggagaagactatcatgaaactggtagttgatgctgaaactgacaaagtacttggtgcatccatgtgtggaccagacgcacctgaaattatccagggcatcgctattgcggttaaatgtggagccaccaaagcagacttcgacagcactgtcggaatccacccttccgctgctgaagagttcgtgaccatgcgcaccgtgacgaggcgcttgagcccgacatccaagccaaagacgaacttgtaagcaagaaattggtattctggggaaatgttacaccggacaaatactctggtttcatcacgttggtaatttttacgtcattggaactggaaccatgtatattgaaggaataagttgtttttttcatggcaacacaccgaaaataatgagaccgtggactttcttgatacaaataatgagctcaagcagagaacgtttatggttggttctcatctgaattctttgcggcgttg

SEQ ID NO: 51859 - DNA, 1814 bp, Zea Mays
ggggcagagctggcaagtggcaaggctgcgcagagggactttttgtgtaaaatgcggtgggaaggtgcgctgcacctgcaagcagaggtgtgctctactgacagagtttgaactcaagaggaggcgaggcagaaccgcaatcgcgaccgcgacccgcaggtgacatacatacggtgcgagcgccggaagccggaagcaccggtgacgaagccttccgtgtcatcactcatcaggatctcaggttgcgatttgtgagctcccattccaccccatcagctcagagtggctaggaggacatgttgcgtgatacgtggttgcgtacctaaaaagatactcgtgtatggtgcatcattccgtggagaatttgaggattcgaagaattttgggtgggagattaacggagatattaacttcaattggaaaacgctattggaaaataagactaaagaaattgttagattaaatggtgtgtatcagaggatccttaccagtgccggtgtgacaatgattgaaggggcaggcagtctagttgatgctcatactgttgaagttagccagcctgatggttcaaagcaaaggtatacagcgaagcacattttgatcgcgactggtagccgtgctcaacgtgtcaacatacctggaaaggatctggctattacttctgatgaggccttgagcttggaggagcttccaaagcgcgctgtaatcctgggtggcggatatattgctgttgaatttgcttctatctggagggggatgggtgctgaagtagatttgttttatcgaagagatcttcctctaagaggttttgatgatgagatgagagctattgttgcaagcaaccttgagggaaggggaatcaagttgcatccagggacaaatctctctgagttgagtaaaacggctgacggaataaaagttgtaactgataaaggagaagagctcattgcagatgttgtcctatttgcgacagggcgcacaccaaactcccagagactgaacttgcaagctgcaggcgttgagattgaccgggttggagccatcaaggttgacgaatattctcgtacttctgctcctagtgtatgggctgtgggtgatgtaacaaaccggattaatttaacacctgttgcattgatggaggcaacttgctttgctaaaactgtgtttggtggccagcaagttaagcctgatcacagagatgttccttgtgctgttttctccattccaccactatctgtagtgggcctcagcgaagaacaggccttggaggaagctaatggtgatattcttgttttcatctcatcattcaacccaatgaagaacagcatatccaagcgccaggagaagactatcatgaaactggtagttgatgctgaaactgacaaagtacttggtgcatccatgtgtggaccagacgcacctgaaattatccagggcatcgctattgcggttaaatgtggagccaccaaagcagacttcgacagcactgtcggaatccacccttccgctgctgaagagttcgtgaccatgcgcaccgtgacgaggcgcttgagcccgacatccaagccaaagacgaacttgtaagcaagaaattggtattctggggaaatgttacaccggacaaatactctggtttcatcacgttggtaatttttacgtcattggaactggaaccatgtatattgaaggaataagttgtttttttcatggcaacacaccgaaaataatgagaccgtggactttcttgatacaaataatgagctcaagcagagaacgtttatggttggttctcatctgaattctttgcggcgttg

SEQ ID NO: 51860 - DNA, 1914 bp, Zea Mays
ggggcagagctggcaagtggcaaggctgcgcagagggactttttgtgtaaaatgcggtgggaaggtgcgctgcacctgcaagcagaggtgtgctctactgacagagtttgaactcaagaggaggcgaggcagaaccgcaatcgcgaccgcgacccgcaggtgacatacatacggtgcgagcgccggaagccggaagcaccggtgacgaagccttccgtgtcatcactcatcaggatctcagggttttgtttcgtttcgcgggcgttgggaatccatccatggcgaggaagatgctcatcgacggggaggtggcggccgtcgcggatggtgggcactatgactacgatctcttcgtcatcggggcgggcagcggcggcgttcgcggctctcgcaccgccgcctccttcggagctaaggttgcgatttgtgagctcccattccaccccatcagctcagagtggctaggaggacatggtgggacttgcgtgatacgtggttgcgtacctaaaaagatactcgtgtatggtgcatcattccgtggagaatttgaggattcgaagaattttgggtgggagattaacggagatattaacttcaattggaaaacgctattggaaaataagactaaagaaattgttagattaaatggtgtgtatcagaggatccttaccagtgccggtgtgacaatgattgaaggggcaggcagtctagttgatgctcatactgttgaagttagccagcctgatggttcaaagcaaaggtatacagcgaagcacattttgatcgcgactggtagccgtgctcaacgtgtcaacatacctggaaaggatctggctattacttctgatgaggccttgagcttggaggagcttccaaagcgcgctgtaatcctgggtggcggatatattgctgttgaatttgcttctatctggagggggatgggtgctgaagtagatttgttttatcgaagagatcttcctctaagaggttttgatgatgagatgagagctattgttgcaagcaaccttgagggaaggggaatcaagttgcatccagggacaaatctctctgagggcgcacaccaaactcccagagactgaacttgcaagctgcaggcgttgagattgaccgggttggagccatcaaggttgacgaatattctcgtacttctgctcctagtgtatgggctgtgggtgatgtaacaaaccggattaatttaacacctgttgcattgatggaggcaacttgctttgctaaaactgtgtttggtggccagcaagttaagcctgatcacagagatgttccttgtgctgttttctccattccaccactatctgtagtgggcctcagcgaagaacaggccttggaggaagctaatggtgatattcttgttttcatctcatcattcaacccaatgaagaacagcatatccaagcgccaggagaagactatcatgaaactggtagttgatgctgaaactgacaaagtacttggtgcatccatgtgtggaccagacgcacctgaaattatccagggcatcgctattgcggttaaatgtggagccaccaaagcagacttcgacagcactgtcggaatccacccttccgctgctgaagagttcgtgaccatgcgcaccgtgacgaggcgcttgagcccgacatccaagccaaagacgaacttgtaagcaagaaattggtattctggggaaatgttacaccggacaaatactctggtttcatcacgttggtaatttttacgtcattggaactggaaccatgtatattgaaggaataagttgtttttttcatggcaacacaccgaaaataatgagaccgtggactttcttgatacaaataatgagctcaagcagagaacgtttatggttggttctcatctgaattctttgcggcgttg

SEQ ID NO: 51861 - DNA, 1166 bp, Zea Mays
cttgaacaatgcaggaaagttggtgtcatttcattaaaacagaggaatacaaagatgtacaacatctccccgaccctaccaacacacgcacgcacacacacataccagtgacacacaactagttcatgatcatctcatgctacatgaaaagtgaaagatacaaccaaggaagctggagtcgatcagtcactcatttagaagacaaaagtgaaatgtcagaatcagcgtgcaacttgctaatactcagcacgaacttgaactataactatgtcatcatggaaccattagatgaattttctgaatatggaatgcgtcgaagacattgaatcctttcagtaatctcacaattacgatgctgatctatttcatcgtaaacattaacacataataactttatgtagaagccatagtaaggatggtttactctatagtgactgtcttgcatagtcaagaatatccttttcctgtagttcaaagctttggatgaagatacattatttcaggaggtctgagtaaacaaaacattgtagataccaagatttaaaatatacgccctcttgctaacaattgttattgtgagatatgacaggcccattatgcattttatttcttgagggatctctgaaaggcatgctaattaagagaacgactgttatgcaagcagtgcttctgtgcaagcgtgcaagcaaaccatctgatccattagatcgtgatccaaccgtaattcatatctaacatttaaacccttccatcaccagctcaataatttttataaaaaaaactctaacaaatcatggttgtatctgtggttggatcataatttaatggatcagatggtttgcttgcacgcttgcacagaaacactgcttgcatagcagtcgttgccgctaattataactaataaaactattatgcagtctgttccaaagaactttttgttagattaaaacatgtcagaaggcccagcatagtgtgtaaaactttcttcaagggtgcttgcctaaagcgttccctaaagttttagacacaccctaaagctactgtcgttgcctctaaaaggcactctaaattaaagagtcagatcctcatgcatctaaatatatggggttctctcttttcctctaaattttttatgctctaaaatacgaattaaatacagaattaat

SEQ ID NO: 51862 - DNA, 4529 bp, Zea Mays
agataccaagatttaaaatatacgccctcttgctaacaattgttattgtgagatatgacaggcccattatgcattttatttcttgagggatctctgaaaggcatgctaattaagagaacgactgttatgcaatctgttccaaagaactttttgttagattaaaacatgtcagaaggcccagcatagtgtgtaaaactttcttcaagggtgcttgcctaaagcgttccctaaagttttagacacaccctaaagctactgtcgttgcctctaaaaggcactctaaattaaagagtcagatcctcatgcatctaaatatatggggttctctcttttcctctaaattttttatgctctaaaatacgaattaaatacagaattaatatgtacataccattttagactataataaatacatatgtaaaaaaatctaattttaaatatattaggaatatggtgtattatgtatagggggtggatttagaggggagagtggtgaaaaaaaatgagatttaggggatgaaaaatcatcgtggatattctcaaggagtgacgcgtcgagctctcttgatgaatcctcgtattggcccgagccacgcaggtcctttaaaatctgaacagaatgcaggcacaatcgagcatctcaggagacacgtctcgaaagcactgagcagcattacttacaaccaatttgttgcaaaaattcgcaaatgtcaagcagaagaaagtggcacagagaagacattatggagtcgaaggggaggaccgcaggagcgagagggaccgccgctggcctcctcgaagaagagcgtccaccggagggccttattgatatattcggagatccaagtagcagcggcgccggacgaggtgcggccgccggcgaggacaaggacgtcgacgaaaccccgcaccagacggcgctcctcctccatggccaccaccggcgggtgtgcccaccccattttccgagcctgcttctcacaatcctgacttctgcagggactacccggaaaacaatcctgcacttatcactttgcactcagaaccctatatttatgcatttccttttctatcactcttttgtttggttcgcacctcgcacagacgcacgcaagcctgaggtcctgaaatgaaaatttgcaactataacaaggtggtacttgaatagcagccacaaaaccctaacctcgcgaccgtataaacgagccaacccgcccacctcccgcgccgccgccactcagcgccgcgcttgcgtttccttctctccgcttccaagatgtcgaagcgagggcgtggaggttcggctggtaacaagttccggatgtcactgggtctaccagtggcagctactggaatcaagggtcgccttaacaggcttccttctgcctgtgttggtgacatggttatggcaaccgtgaagaagggaaagcctgaccttagaaagaaggtgatgccagctgttattgtgaggcagcgcaagccatggcgccgaaaggatggtgtctacatgtactttgaagacaatgctggagtgattgtgaacccaaagggagagatgaaaggttctgccatcactgggcccatcggaaaggagtgcgctgatctctggcccaggattgctagcgcggcaaatgcgatcgtctaaaggaagcagtttgtcgaagtttcatttaaaatggggacttgagaagggagttcttagttagacgagcttttgattgccctgaatatgtttccccggctaatgcttgtgctgctggaccgtttcctgatagctttgctttgatgacatcctccccgttatcgataaagttgcgtagcctgacattttgcagagtttaagttggcttgttttggagcaagggtagttgctattttagctcctccaatccccttgcgcctaacactatctaagggctagtttgagagccataaaatctgagtggatttgaggtgctaaaattccttccttactcaattttaataagaaggggattttagtccctcctgttcttcggttttgtttggaagctacaaaaccggagaggattagaggggctagaatccactttttatttaaatttgaataattaggggattctaacaactccaattcccttcggttttatgtctcccaagctatctttaagggctggtttgatgataggggaatttgagggggtccattggcgaggaattcctttgctatttgaaattgaatagcactggaatttttcccacatcagttttggaaccttattttcctggaggaattctatttttccaaaaaaaaatgaactaaattcccttgtgaaaatgaaaattacttgagaaaatgtggttcccaaactagttctaaatgtcatatgtaggggagtcattagcaattttgtcattatcatttgtggatttcgctaatatgatatcgggttcgtaaattatagatatacatggttttatttgtcatagacatgagatgacataataataggaagcgaacactgagagtggcaaaattataaatttctccagggtgtcacgccggaacttctgaaactgtaaaaagtggtttctacaagacactgatgcttcagcatcacaggatcaaatcgcatcagcaatatggcgcatgcagcatgctcaaggcatgaaggagacggcatgtaaaattgcctcgaagcgacacttattttttacaacgttgtatcaacaacgccttcagtttccgtaaacagcttgtgttctctaatgtatccaattacttcatcactggtgcccataagaactataccgatgaactgatctgattcggcacgaccgagatgatgttatcctggaaacgagctcagaacatcagtaaggaaacttaaccatcagacagcaagttgcatcactgctggctatcaacttcccggcatcctttcctttccttgcatatggttttgacctggaagcaaaagcaggtgcggaagtttattattagcaaagttattacctgatcttgtatccaaacatctgaatgactcgagcaagtcagaaccacataaaagcattaccttgaggctaccttttcgcaaacttatggcattgcgcgggcccacgtgtcaacggctcatgttaaccccgccgccacttatcccttcccactggcctcgcgcccctccacatcacaagctacaccgcccaggcgtcagctgcttcattgcgtggccgtggccgtggccgtcgacgcctcgcgggaaacatggccagttcctgcctctccaccgccgcggcgcagctccagctgcagctgcagctccatctcgcgtcgtcaccagtgttcccgcgcccagcgcgcgcgcaccaccggctcgtcgccgcgcacgccgttgcggtgcccgtacatcggaggcgcgcgctcgcggtcaccgcgagcgcgtcgcaggaggaggccgaggccacggttgtcgaggaggaattggaggaggtcgcggagcgaggcagagaggtacagttgcaagaacaagacgaagttcaggaggaaggtgcagccgtcggggctagctcggacgacagcggcccgtcggtggccgcgagcaccacgaccaccaagctctacttcgggaacctgccgtacaactgcgacagcgcgcagcttgccggcattgtgcaggagtacgccagcccggagatggtcgaggtgctgtacgatcgtacgacgggcagaagccgagggttcgccttcgtgacgatgaccacggttcaggactgcgagttggtcatcaagaacctcgacggcagcctgtacggtggccggacgatgaaggtgaacttcgccgaccggcccaagcccaagcaggcgctgtacccggagacggagcacaagctgttcgtcggcaacctgtcgtggacggtcacgtcggagatgctcacggaggcgttcggccgctgcggcaccgtggtcggcgcgagggtgctctacgacggcgagaccggccgctccaggggctacggcttcgtctgctactccaccagggaggagatggacgaggcgctttcctcgctcaacggaatggaaatggaaggcagggagatgagggtcaacttggccctcggaaagaagtaacagagttcagatatgtggaggaagttgcaattggtatgtgatggatgcctatgcgatgcaaccgagacgacgacgcttgctcatctcatccggagcacatacgaggagagcagagagcaggaaaaggaaaaggaaacggaaaccttcctgatctagcatagcatgggagtgtcattgccatctggtgtgtgtttagcaaatatatacggttcatacagtgcgaattgtgattctggcgagattaggatgctgattcctccgatcattggagcacagttttggcttgatccatgcacattcgaagctgctgttactgaaagagttgacaggccgtatgtttggtacaactttttttatgagaatatggatttgtggataatactgaaagatgtcctatacgttctgaatccaagaaaaaaac

SEQ ID NO: 51863 - DNA, 1949 bp, Zea Mays
attatgtatagggggtggatttagaggggagagtggtgaaaaaaaatgagatttaggggatgaaaaatcatcgtggatattctcaaggagtgacgcgtcgagctctcttgatgaatcctcgtattggcccgagccacgcaggtcctttaaaatctgaacagaatgcaggcacaatcgagcatctcaggagacacgtctcgaaagcactgagcagcattacttacaaccaatttgttgcaaaaattcgcaaatgtcaagcagaagaaagtggcacagagaagacattatggagtcgaaggggaggaccgcaggagcgagagggaccgccgctggcctcctcgaagaagagcgtccaccggagggccttattgatatattcggagatccaagtagcagcggcgccggacgaggtgcggccgccggcgaggacaaggacgtcgacgaaaccccgcaccagacggcgctcctcctccatggccaccaccggcgggtgtgcccaccccattttccgagcctgcttctcacaatcctgacttctgcagggactacccggaaaacaatcctgcacttatcactttgcactcagaaccctatatttatgcatttccttttctatcactcttttgtttggttcgcacctcgcacagacgcacgcaagcctgaggtcctgaaatgaaaatttgcaactataacaaggtggtacttgaatagcagccacaaaaccctaacctcgcgaccgtataaacgagccaacccgcccacctcccgcgccgccgccactcagcgccgcgcttgcgtttccttctctccgcttccaagatgtcgaagcgagggcgtggaggttcggctggtaacaagttccggatgtcactgggtctaccagtggcagctactggaatcaagggtcgccttaacaggcttccttctgcctgtgttggtgacatggttatggcaaccgtgaagaagggaaagcctgaccttagaaagaaggtgatgccagctgttattgtgaggcagcgcaagccatggcgccgaaaggatggtgtctacatgtactttgaagacaatgctggagtgattgtgaacccaaagggagagatgaaaggttctgccatcactgggcccatcggaaaggagtgcgctgatctctggcccaggattgctagcgcggcaaatgcgatcgtctaaaggaagcagtttgtcgaagtttcatttaaaatggggacttgagaagggagttcttagttagacgagcttttgattgccctgaatatgtttccccggctaatgcttgtgctgctggaccgtttcctgatagctttgctttgatgacatcctccccgttatcgataaaggtgtcacgccggaacttctgaaactgtaaaaagtggtttctacaagacactgatgcttcagcatcacaggatcaaatcgcatcagcaatatggcgcatgcagcatgctcaaggcatgaaggagacggcatgtaaaattgcctcgaagcgacacttattttttacaacgttgtatcaacaacgccttcagtttccgtaaacagcttgtgttctctaatgtatccaattacttcatcactggtgcccataagaactataccgatgaactgatctgattcggcacgaccgagatgatgttatcctggaaacgagctcagaacatcagtaaggaaacttaaccatcagacagcaagttgcatcactgctggctatcaacttcccggcatcctttcctttccttgcatatggttttgacctggaagcaaaagcaggtgcggaagtttattattagcaaagttattacctgatcttgtatccaaacatctgaatgactcgagcaagtcagaaccacataaaagcattaccttgaggctaccttttcgcaaacttatggcattgcgcgggcccacgtgtcaacggctcatgttaaccccgc

SEQ ID NO: 51864 - DNA, 1818 bp, Zea Mays
ctcaaggagtgacgcgtcgagctctcttgatgaatcctcgtattggcccgagccacgcaggtcctttaaaatctgaacagaatgcaggcacaatcgagcatctcaggagacacgtctcgaaagcactgagcagcattacttacaaccaatttgttgcaaaaattcgcaaatgtcaagcagaagaaagtggcacagagaagacattatggagtcgaaggggaggaccgcaggagcgagagggaccgccgctggcctcctcgaagaagagcgtccaccggagggccttattgatatattcggagatccaagtagcagcggcgccggacgaggtgcggccgccggcgaggacaaggacgtcgacgaaaccccgcaccagacggcgctcctcctccatggccaccaccggcgggtgtgcccaccccattttccgagcctgcttctcacaatcctgacttctgcagggactacccggaaaacaatcctgcacttatcactttgcactcagaaccctatatttatgcatttccttttctatcactcttttgtttggttcgcacctcgcacagacgcacgcaagcctgaggtcctgaaatgaaaatttgcaactataacaaggtggtacttgaatagcagccacaaaaccctaacctcgcgaccgtataaacgagccaacccgcccacctcccgcgccgccgccactcagcgccgcgcttgcgtttccttctctccgcttccaagatgtcgtctaccagtggcagctactggaatcaagggtcgccttaacaggcttccttctgcctgtgttggtgacatggttatggcaaccgtgaagaagggaaagcctgaccttagaaagaaggtgatgccagctgttattgtgaggcagcgcaagccatggcgccgaaaggatggtgtctacatgtactttgaagacaatgctggagtgattgtgaacccaaagggagagatgaaaggttctgccatcactgggcccatcggaaaggagtgcgctgatctctggcccaggattgctagcgcggcaaatgcgatcgtctaaaggaagcagtttgtcgaagtttcatttaaaatggggacttgagaagggagttcttagttagacgagcttttgattgccctgaatatgtttccccggctaatgcttgtgctgctggaccgtttcctgatagctttgctttgatgacatcctccccgttatcgataaaggtgtcacgccggaacttctgaaactgtaaaaagtggtttctacaagacactgatgcttcagcatcacaggatcaaatcgcatcagcaatatggcgcatgcagcatgctcaaggcatgaaggagacggcatgtaaaattgcctcgaagcgacacttattttttacaacgttgtatcaacaacgccttcagtttccgtaaacagcttgtgttctctaatgtatccaattacttcatcactggtgcccataagaactataccgatgaactgatctgattcggcacgaccgagatgatgttatcctggaaacgagctcagaacatcagtaaggaaacttaaccatcagacagcaagttgcatcactgctggctatcaacttcccggcatcctttcctttccttgcatatggttttgacctggaagcaaaagcaggtgcggaagtttattattagcaaagttattacctgatcttgtatccaaacatctgaatgactcgagcaagtcagaaccacataaaagcattaccttgaggctaccttttcgcaaacttatggcattgcgcgggcccacgtgtcaacggctcatgttaaccccgc

SEQ ID NO: 51865 - DNA, 1021 bp, Zea Mays
aacggcagccatacgtaggcggagttagagagattattggtcagggcagaaagaggcagcgaagggagagccacatgtgctgcttcgtctgcgtgtgacatgtccggatctcgttggcgccaagaaccaccaccaccaccacatcctggagcagggcgaggcaacctccgcgccactcgccagctgcccagtcgtctcccacgtcctagcacaacagagcagagcagagcgagcaaaggtatctgccatccaccatggccgtctccatcgccggcagcagcatccgcctccacgttgccccgcccagtcgccgccgcgtcagcgtggtctccgccgccgccgcggcgcggctcgaccggcgctcggcggccctgctcctgctgtccacggcggttccagcggcatcggcagcgacagctcccccagcgagcgccgcgggcatcggtctcttcggcatccgcaagaagctggagcgcgcggaggaggcggcagtcgaggcggtgagggaggtggaggaggccgcggcggtgggcggggaggccgtgaagggggcggtgacggaggcggagaaggaggtcgccagcgagggcctgcagctggtggccggcgcggagctcgccggggacgggctagtgcaggccgcggtggtcgccggcgccgaggcgctcggggtcgtcgtgggcctatccgtggtaaatggtatcctgaagcccgaggcctagatggtgtaggctgctgggccttgtagtttcggccgaatacaagtgtttgggctttagcgcttcgttgtcggtgtcgctgtaatttgctgatgacctcttcttttgtgtgtaaattgttattattataacaattattggagtgcggatatgggcagctagaaaagtgtgatcaatttgtaatgctgcaggatttgaacaccatacatgactacatgaggtccactgatcggagcatcagagttagtttaggggccgttcggggatgggatccaggccagtaaccctttcactcattccag

SEQ ID NO: 51866 - DNA, 522 bp, Zea Mays
cggggaagccgtgaaggaggccgcggcggtgggcggggaggccgtgaagggggcggtgacggaggcggagaaggaggtcgccagcgagggcctgcagctggtggccggcgcggagctcgccggggacgggctagtgcaggccgcggtggtcgccggcgccgaggcgctcggggtcgtcgtgggcctatccgtggtaaatggtatcctgaagcccgaggcctagatggtgtaggctgctgggccttgtagtttcggccgaatacaagtgtttgggctttagcgcttcgttgtcggtgtcgctgtaatttgctgatgacctcttcttttgtgtgtaaattgttattattataacaattattggagtgcggatatgggcagctagaaaagtgtgatcaatttgtaatgctgcaggatttgaacaccatacatgactacatgaggtccactgatcggagcatcagagttagtttaggggccgttcggggatgggatccaggccagtaaccctttcactcattccag

SEQ ID NO: 51867 - DNA, 873 bp, Zea Mays
gggattcttctatatcatgactcggtcatatgcttacgttgatgttggattatttttattaaagcgattctcacataaaccaattgaaaaaggtactgtatttgagaatgtacagcagcttctggcaacgataatcagaaaaaaaaacaaacaaacacggccaatggacgggggccacggggcttccattggaagcgaagagataacgtgggtccaaccggaactggctcactattctgttcggttccttccgaaaacacaacaggaaaacacacgcacaaaattgccgtttccgaatggccacggccgtgctccgccgcccattcctcgccgcgctcctcctccccgccgccggaggggcgtccgggacctcctcctggttccgtccccggagacgtaggtcctctccttccgtgcgcgcggtgtcttccgactcccccaagcccgtcgcctccacttcctcccccaccggcggtgacagccccgacgaggaaccaccggtcctaccgctcctccaggagcttgcggattgcttgattcttccgcccaagctcctcgctcagctcccgagcgaccttcgtctcgacctcaatgacgctgcgtttgatctctccaacgggccagttctcgacgagtgtggccaagaagtgggtgatctgctcctgaacctggcaaaagcatgggagttagctgatacgtcaacatcaaatagcattgccaagcagctgccgttgatggagccctacttgacgcgcagcgccaaatcagcgtttggcaagcggctggtgtcagctggaaggaggtttcagtcaatgggacagtacaaccagggagaactcaaaaagagattaaaccacagggcatgtgcaaatg

SEQ ID NO: 51868 - DNA, 3722 bp, Zea Mays
gggattcttctatatcatgactcggtcatatgcttacgttgatgttggattatttttattaaagcgattctcacataaaccaattgaaaaaggtactgtatttgagaatgtacagcagcttctggcaacgataatcagaaaaaaaaacaaacaaacacggccaatggacgggggccacggggcttccattggaagcgaagagataacgtgggtccaaccggaactggctcactattctgttcggttccttccgaaaacacaacaggaaaacacacgcacaaaattgccgtttccgaatggccacggccgtgctccgccgcccattcctcgccgcgctcctcctccccgccgccggaggggcgtccgggacctcctcctggttccgtccccggagacgtaggtcctctccttccgtgcgcgcggtgtcttccgactcccccaagcccgtcgcctccacttcctcccccaccggcggtgacagccccgacgaggaaccaccggtcctaccgctcctccaggagcttgcggattgcttgattcttccgcccaagctcctcgctcagctcccgagcgaccttcgtctcgacctcaatgacgctgcgtttgatctctccaacgggccagttctcgacgagtgtggccaagaagtgggtgatctgctcctgaacctggcaaaagcatgggagttagctgatacgtcaacatcaaatagcattgccaagcagctgccgttgatggagccctacttgacgcgcagcgccaaatcagtgtagcgtttggcaagcggctggtgtcagctggaaggaggtttcagtcaatgggacagtacaaccagggagaactcaaaaagattgctgaaacaatgatcaagaatggtaagctgctatcgaaacacccagtggttcaatctgatgttcaggctatgaaagaaaaaaggagactaaagtttggagaacttgagttcggagtgactgctcaaagtgccactatcggttctgcagtagcggcaatttttggattaatctcatggcaactagcacgaggcgtgcaaagtattcctgacaatacaacgcaatacacaaatgacaatgcactgcagttggccaagtcgctcaagaccgcactgcttgttcttggctacacatctaccggcctatccttattcgcggcttttgggctgctgttgctagcccagcagattaactctgagaacaaatcggagtaactgacaggcactcgctgaagttgtggacctcatgccttgcctttctatgctccaatgaggcaaacgttcatagggaattgcatacactgggaccttgtgtgtatcagtgcatgcaatgttctgtataaaaataaagagccaattgtttgtgattacggataaaataatcggtggagatattgaagcaaacatggaagtcagcctgggactgactgaagaacaaattgttagtgaacgcaacagggaactgcttgtattcaaaattgtgctttcggagtgtggtactgctgttactcatcaaaactgaaaaaaatcgttcttaccatcataattaagtatgatgaatgagtatatattctgcatggtttttttttcgcgaggaagagcatgatctttcctatgaatctgcaagctcaaaaacaagaaaccacgcatgaagcaagagttgacggtatctttttttaatccaaagctgggtaccacgtatccttaattaattatgttccgcgtgaatctcttttctttttcgttacttaaaagaaagaaataaaattctctatacgaatctcatactgatctgccaaggtggccatgtcccaataatgtggggagcccgattcggtatttttttttggaagcccaagtccagagcgggcccagtccagttcatcctccacctgctccgccggctgctcttcttctcccctctcgctatatccccggggacctcacagccacatctctccactgctccgtccagcgcgtccacctcccaaacccctactcccccaggaagcaatggcttcccccacccagggccaggtcatcacctgcaaagcggcggtggcgtacgagccgaacaagccactcgtgatcgaggacgtgcaggtggcgccgccgcaggccggcgaggtccgcgtcaagatcctattcaccgcgctctgccacaccgaccactacacctggagcggcaaggatcctgagggtcttttcccttgcattcttggccacgaagctgccggaattgtggaaagtgtcggtgaaggagtaactgatgtgcagcctggggatcatgtcattccttgctaccaagcagaatgcaaagaatgcaagttttgcaagagcggaaagaccaacctctgtggtaaggtccggagtgccacaggcgtaggtgtcatgatgaatgatatgaagagcaggttctctgtaaatggaaagcccatttaccatttcatggggacatcaacattcagccagtacactgtggtgcatgatgtcagtgttgcaaagatcaacccacaggcacccttagataaagtctgcctgctcggttgtggtgttcctactggtcttggagcggtgtggaatactgcaaaggttgaatctggctcagttgttgctgtttttggccttggaacagttggacttgcagttgctgagggagcaaaagctgctggtgcttctcgagttattggcattgacatcgacaataaaaagtttgatgttgcaaagaactttggagttacagaatttgttaacccaaaagagcatgacaaaccgatacagcaggtcctggtcgatcttacagatggcggcgtggattacagctttgagtgcattggaaatgtttcggttatgagggctgcactggaatgctgccacaagggctggggaacctccgtcatcgtcggcgtcgccgcctctggccaggagatcgccacacgaccattccagctcgtgactgggcgtgtctggaagggaaccgctttcggtggcttcaagagccggacccaggtcccatggcttgttgacaagtacatgaaaaaggtggacgagtacattacgcacaacatgaacctggctgacatcaacgacgccttccacctgctgcacgaaggtggctgtctgcgttgtgtgctggcaatgcagatttgaaattcctaagctaagcagtttttgttttggaactagaactcctttttgcctcgttaggcctggacccgctgtataatgctatgttgtgttggatggctgacgatggttactgctgtgttgctagcaatgtggtacttgatctgtatcacggttgcaaataagtgctgtttctaaaacactccctctcggtgaataaggggttgtttggtttgaggaatcattccatccaaaatgaggtggtgcatcatagatctattcctcaaatttgctcggatgacttcaatccttatattagtactaactaattcactatgaggaatgagatggtgatggatcaactaattccattccacaaaccaaagaaaaaagtgaggtgatgatggactagctcatctttcaaaccaaaacaccctataagtgatctgtatcatatgtggggaagatgtttactatggcagattgtgcgataacaatatggagacaatgtttggaaactgaaccatatattggtgcaaccaggcaaacaagacacaaagatgaaggtggatgaacctccatctta

SEQ ID NO: 51869 - DNA, 2070 bp, Zea Mays
aatcaaaatctttacgttttttttcaatctcatctaatttatgtggtgtaggaataagggaacatgccttaattggatggttgcaccaatgggtatgacaacacctcataccttctcaagatgtttacaatgagacattgtacgtaacaaatttacagtatatggggtggtggatacatcgatacaggtcgcagtcgtatcgatttgggaacccctgccccacccaccactgcgggctgcagcctgccgtttcgctcgaacgaagcaatgctccaggagatccaccgagtgtttggcgagtggaccgtccgtttccagattgacgcggccaataaggagaatgctgtcccgttactcttcactgatggtcactttgcacggcaacctcagccggtgctacaaggccatgagcgcgctgcggccagatggggtatccaggcacttcatgtccgctggtggtttcgaacgcgtcgttttaggggtggtgctcgtcatgtccatctcgggagcttcttatacagcaccgtcatcatcggcgctcacagaggaaaacttgcttttcctggaggcttggcgcgcggttgatcgagcatactatgacaaatcttttaatgggcaaagttggtttagataccgtgaaaatgcccttcgcaatgaaccgatgaacacaagggaagagacatatgcggcaatcaagaaaatgctttcaacattggatgacccttttactcgtttcttagaacctgagaaattgaagagcttgcgggaagtctggtacgcaaggcgcactcacgggtgtaggtttatcgattggttacccaatggcaattaatggatcaccttcaggagttgctgtcatgacagccacccctggtggtcctgcagaaaaggctggcattcttcctggagacaccattttggcaattgacaacagaagcactgaagatatggatatatatgatgccgcagaacgcttacagggccctgaaggaagttcagtagatttgtctattcgtagtgggaccaataccaggcatgtcgttctaaagagacaaacagtcaatttaaaccccgtgaggtcaaggatgtgtgagattccaggttcaaaagatagctcaaagatcggttacatcaaattgacaacatttaaccaaaatgctgcagaatctgttaaggaagccattaagacattgagggacaacaatgttaaatcctttgtgctggatctgcggaataacagtggtggcctttttcctgaaggaattcaaattgcaaagatttggatggacaagggtgttattgtatatatatgcgatagccaaggtgttcgtgacatttatgaggctgatggcgctgatacaattgctgcatcagaaccgttggttgtgctggtaaacaaaggaactgcaagtgcaagtgagatccttgctggagcgctgaaagacaataagagggcagtcgtatatggggaaccaacatatggaaaagggaagattcagtcggttttcggattatctgatggatctggcttggctgttaccgtagcacgctatgaaactcctgcacataccgacattgacaaggttggtgtgattccagaccgaccactgccagcttcatttcctaccgatgaagatgccttctgcagctgccttagggattcaacggctgcttgcaatctgaatgctgctcagctgtttgcaaaatcatgaccaggcccttcattcaacattttgggtcttgggcgttgtacagataaccgtggtgtttcgtaggagctgcttgtgcgtggtgtgtgggtagtccgtaattcttttcattagcattgatttttgtcccagttttatcgcctgtgaaatgaaagcattgtttctgcgtgaaatcacggtcgtgttgaacatgcacttgatgcaacaattttgaatggaagcactaagaaaacctgcaaattgtctttcattttcagtcattttatgcatcagcgttactgaatactcctgtccgcaaaagagtgtcgctatagggtttgtgctggtcaaattttcttaagtttgattgggtttgtaaaaa

SEQ ID NO: 51870 - DNA, 2704 bp, Zea Mays
cagcgtcgccatcccatcgtcgtcgtcttccatagctgagcttgtggtgtctccgcagtccgcacttggcaattccgtggccattatctactcctcggctcctctcctcgcagaagaattcgttcccccaatttggagttggaaaagcgtcgaccccagaaaacgggaggcctcgacctcgctagtctccgttccattcgaaaagccatcgcctggtgagcgagaaggggaaggtcgatggcgacgtgttctcgcccgctcttcgtctccgactcagcggcctccgcctcgccgtctcgggcgtcctttcgccgccttcgcacggtcgcagtcgtatcgatttgggaacccctgccccacccaccactgcgggctgcagcctgccgtttcgctcgaacgaagcaatgctccaggagatccaccgagtgtttggcgagtggaccgtccgtttccagattgacgcggccaataaggagaatgctgtcccgttactcttcactgatggtcactttgcacggcaacctcagccggtgctacaaggccatgagcgcgctgcggccagatggggtatccaggcacttcatgtccgctggtggtttcgaacgcgtcgttttaggggtggtgctcgtcatgtccatctcgggagcttcttatacagcaccgtcatcatcggcgctcacagaggaaaacttgcttttcctggaggcttggcgcgcggttgatcgagcatactatgacaaatcttttaatgggcaaagttggtttagataccgtgaaaatgcccttcgcaatgaaccgatgaacacaagggaagagacatgtatgattcttgcatattgccccaactttgtctttcataactagaactagaaccttgcctttcatacatcacaatcacacttctatcacggtcagaataattacattaggcattcaacagtcatttaatacagtgttttcaaatacatttatcatacaccaaggacagatttagttgtttaaaggaaaccaccatcgcatttgccccaagcttttctgtcacagacagatattacagtgtgtctccggtaggagctaaatttccaaactgcagtgttagtatatcactaattaactatggggaattctataatccagaactcaaatgcattatagatttgtgctgaagtaaaccatcacactgtacagtgttgattccatattatcattttgtttaatcaatactgaatttcagatgcggcaatcaagaaaatgctttcaacattggatgacccttttactcgtttcttagaacctgagaaattgaagagcttgcgggaagtctggtacgcaaggcgcactcacgggtgtaggtttatcgattggttacccaatggcaattaatggatcaccttcaggagttgctgtcatgacagccacccctggtggtcctgcagaaaaggctggcattcttcctggagacaccattttggcaattgacaacagaagcactgaagatatggatatatatgatgccgcagaacgcttacagggccctgaaggaagttcagtagatttgtctattcgtagtgggaccaataccaggcatgtcgttctaaagagacaaacagtcaatttaaaccccgtgaggtcaaggatgtgtgagattccaggttcaaaagatagctcaaagatcggttacatcaaattgacaacatttaaccaaaatgctgcaggtttgccgccttgagaaagcatcatgatgtttttcggatgctgtaagtcctgctgattatgtcaattcattatcctcctacagaatctgttaaggaagccattaagacattgagggacaacaatgttaaatcctttgtgctggatctgcggaataacagtggtggcctttttcctgaaggaattcaaattgcaaagatttggatggacaagggtgttattgtatatatatgcgatagccaaggtgttcgtgacatttatgaggctgatggcgctgatacaattgctgcatcagaaccgttggttgtgctggtaaacaaaggaactgcaagtgcaagtgagatccttgctggagcgctgaaagacaataagagggcagtcgtatatggggaaccaacatatggaaaagggaagattcagtcggttttcggattatctgatggatctggcttggctgttaccgtagcacgctatgaaactcctgcacataccgacattgacaaggttggtgtgattccagaccgaccactgccagcttcatttcctaccgatgaagatgccttctgcagctgccttagggattcaacggctgcttgcaatctgaatgctgctcagctgtttgcaaaatcatgaccaggcccttcattcaacattttgggtcttgggcgttgtacagataaccgtggtgtttcgtaggagctgcttgtgcgtggtgtgtgggtagtccgtaattcttttcattagcattgatttttgtcccagttttatcgcctgtgaaatgaaagcattgtttctgcgtgaaatcacggtcgtgttgaacatgcacttgatgcaacaattttgaatggaagcactaagaaaacctgcaaattgtctttcattttcagtcattttatgcatcagcgttactgaatactcctgtccgcaaaagagtgtcgctatagggtttgtgctggtcaaattttcttaagtttgattgggtttgtaaaaa

SEQ ID NO: 51871 - DNA, 2105 bp, Zea Mays
cagcgtcgccatcccatcgtcgtcgtcttccatagctgagcttgtggtgtctccgcagtccgcacttggcaattccgtggccattatctactcctcggctcctctcctcgcagaagaattcgttcccccaatttggagttggaaaagcgtcgaccccagaaaacgggaggcctcgacctcgctagtctccgttccattcgaaaagccatcgcctggtgagcgagaaggggaaggtcgatggcgacgtgttctcgcccgctcttcgtctccgactcagcggcctccgcctcgccgtctcgggcgtcctttcgccgccttcgcacggtcgcagtcgtatcgatttgggaacccctgccccacccaccactgcgggctgcagcctgccgtttcgctcgaacgaagcaatgctccaggagatccaccgagtgtttggcgagtggaccgtccgtttccagattgacgcggccaataaggagaatgctgtcccgttactcttcactgatggtcactttgcacggcaacctcagccggtgctacaaggccatgagcgcgctgcggccagatggggtatccaggcacttcatgtccgctggtggtttcgaacgcgtcgttttaggggtggtgctcgtcatgtccatctcgggagcttcttatacagcaccgtcatcatcggcgctcacagaggaaaacttgcttttcctggaggcttggcgcgcggttgatcgagcatactatgacaaatcttttaatgggcaaagttggtttagataccgtgaaaatgcccttcgcaatgaaccgatgaacacaagggaagagacatatgcggcaatcaagaaaatgctttcaacattggatgacccttttactcgtttcttagaacctgagaaattgaagagcttgcgggaagtctggtacgcaaggcgcactcacgggtgtaggtttatcgattggttacccaatggcaattaatggatcaccttcaggagttgctgtcatgacagccacccctggtggtcctgcagaaaaggctggcattcttcctggagacaccattttggcaattgacaacagaagcactgaagatatggatatatatgatgccgcagaacgcttacagtttgccgccttgagaaagcatcatgatgtttttcggatgctgtaagtcctgctgattatgtcaattcattatcctcctacagaatctgttaaggaagccattaagacattgagggacaacaatgttaaatcctttgtgctggatctgcggaataacagtggtggcctttttcctgaaggaattcaaattgcaaagatttggatggacaagggtgttattgtatatatatgcgatagccaaggtgttcgtgacatttatgaggctgatggcgctgatacaattgctgcatcagaaccgttggttgtgctggtaaacaaaggaactgcaagtgcaagtgagatccttgctggagcgctgaaagacaataagagggcagtcgtatatggggaaccaacatatggaaaagggaagattcagtcggttttcggattatctgatggatctggcttggctgttaccgtagcacgctatgaaactcctgcacataccgacattgacaaggttggtgtgattccagaccgaccactgccagcttcatttcctaccgatgaagatgccttctgcagctgccttagggattcaacggctgcttgcaatctgaatgctgctcagctgtttgcaaaatcatgaccaggcccttcattcaacattttgggtcttgggcgttgtacagataaccgtggtgtttcgtaggagctgcttgtgcgtggtgtgtgggtagtccgtaattcttttcattagcattgatttttgtcccagttttatcgcctgtgaaatgaaagcattgtttctgcgtgaaatcacggtcgtgttgaacatgcacttgatgcaacaattttgaatggaagcactaagaaaacctgcaaattgtctttcattttcagtcattttatgcatcagcgttactgaatactcctgtccgcaaaagagtgtcgctatagggtttgtgctggtcaaattttcttaagtttgattgggtttgtaaaaa

SEQ ID NO: 51872 - DNA, 2203 bp, Zea Mays
cagcgtcgccatcccatcgtcgtcgtcttccatagctgagcttgtggtgtctccgcagtccgcacttggcaattccgtggccattatctactcctcggctcctctcctcgcagaagaattcgttcccccaatttggagttggaaaagcgtcgaccccagaaaacgggaggcctcgacctcgctagtctccgttccattcgaaaagccatcgcctggtgagcgagaaggggaaggtcgatggcgacgtgttctcgcccgctcttcgtctccgactcagcggcctccgcctcgccgtctcgggcgtcctttcgccgccttcgcacggtcgcagtcgtatcgatttgggaacccctgccccacccaccactgcgggctgcagcctgccgtttcgctcgaacgaagcaatgctccaggagatccaccgagtgtttggcgagtggaccgtccgtttccagattgacgcggccaataaggagaatgctgtcccgttactcttcactgatggtcactttgcacggcaacctcagccggtgctacaaggccatgagcgcgctgcggccagatggggtatccaggcacttcatgtccgctggtggtttcgaacgcgtcgttttaggggtggtgctcgtcatgtccatctcgggagcttcttatacagcaccgtcatcatcggcgctcacagaggaaaacttgcttttcctggaggcttggcgcgcggttgatcgagcatactatgacaaatcttttaatgggcaaagttggtttagataccgtgaaaatgcccttcgcaatgaaccgatgaacacaagggaagagacatatgcggcaatcaagaaaatgctttcaacattggatgacccttttactcgtttcttagaacctgagaaattgaagagcttgcggtctggtacgcaaggcgcactcacgggtgtaggtttatcgattggttacccaatggcaattaatggatcaccttcaggagttgctgtcatgacagccacccctggtggtcctgcagaaaaggctggcattcttcctggagacaccattttggcaattgacaacagaagcactgaagatatggatatatatgatgccgcagaacgcttacagggccctgaaggaagttcagtagatttgtctattcgtagtgggaccaataccaggcatgtcgttctaaagagacaaacagtcaatttaaaccccgtgaggtcaaggatgtgtgagattccaggttcaaaagatagctcaaagatcggttacatcaaattgacaacatttaaccaaaatgctgcagaatctgttaaggaagccattaagacattgagggacaacaatgttaaatcctttgtgctggatctgcggaataacagtggtggcctttttcctgaaggaattcaaattgcaaagatttggatggacaagggtgttattgtatatatatgcgatagccaaggtgttcgtgacatttatgaggctgatggcgctgatacaattgctgcatcagaaccgttggttgtgctggtaaacaaaggaactgcaagtgcaagtgagatccttgctggagcgctgaaagacaataagagggcagtcgtatatggggaaccaacatatggaaaagggaagattcagtcggttttcggattatctgatggatctggcttggctgttaccgtagcacgctatgaaactcctgcacataccgacattgacaaggttggtgtgattccagaccgaccactgccagcttcatttcctaccgatgaagatgccttctgcagctgccttagggattcaacggctgcttgcaatctgaatgctgctcagctgtttgcaaaatcatgaccaggcccttcattcaacattttgggtcttgggcgttgtacagataaccgtggtgtttcgtaggagctgcttgtgcgtggtgtgtgggtagtccgtaattcttttcattagcattgatttttgtcccagttttatcgcctgtgaaatgaaagcattgtttctgcgtgaaatcacggtcgtgttgaacatgcacttgatgcaacaattttgaatggaagcactaagaaaacctgcaaattgtctttcattttcagtcattttatgcatcagcgttactgaatactcctgtccgcaaaagagtgtcgctatagggtttgtgctggtcaaattttcttaagtttgattgggtttgtaaaaa

SEQ ID NO: 51873 - DNA, 4858 bp, Zea Mays
cttcgatagactttctgctccacacgtacgctcgcataaatccttcgtgccggcgggggagatggcaatgccacccgccgcggtggcgcggctgcgggagctggtgccggcgccggggacggaggaggagctggagctcgacgtcgccggcgcggccgcgctcgtcgagtgctgctccggcctcctccgccctggcggcggcggtgacggcgacgccggggccgcgctcgaggcgctcgaggcactctgcgctgcgggcggagggggcgcgatgcgccgccatgccgatgggctcgctccgctggtcgtcgcgcgcctcggcgacggacacgcggccgtgcgggaggccgcgaggaggtacctcgtgctgctcatggagatgaaggagatgaatgcaagaacggaaaacacagagccaaactcaaacgtgccaaatgaccaacacgttcactatacgacaatcgaaatggaatcttctaataccagccaagcaagaaaaaattccaaagagaaggtcagcgcaagagacatctcgcttcttgcaggagaaggagatattacaaggaagttagtcgaacctataaaggttttctctgagaaggacctactaagggagataggaaaagtagtatctactttgcagccagataatgagtggtcaatccggataactgcaatgcaaagagtggagggtttagtgcttggaggtgctgcggactattcggccttccccatgctcctaaaacagctcatgactcctctaataactcagcttctggataggagatctagcgttgtaaaacaggcatgccatttattaaacttcctatcaaaagagctactacgtgactttgagccatacgcagagctgcttattccggtccttcttaagaatgtcgtgatcaccatccttgtaattgctgagtctgctgataactgtataaaagagatgttaaggaactgcaaggtggctcgtatactaccaaggattattgaatttgcaaagaatgatagaagtgctgttcttcgtgccaggtgttgtgaatatgcaacactaatgttagagtactgggttgatactccagaaatacagagatcagctgacctgtacgaagaccttataaaatgttgtatagcagatgcaactagtgaggtccgatcaagcgcaagggcatgctacaggatgttctcaaggatttggcctgaccgttcgcatcagctgtactcatcttttgaaccacccagacagaaaatgataaatgatgaagatactgagacacctcaagcgcatcttcctccagttaaaataagtcatcttcaacctagttctttcgttccagctgtaatagataaagttgttaaggtcgattctgggatatcattttcttccggagaccttcaaacatcagacatactatacctccagtgtgatgatataatcgcaaaaggcctagatgcgggcaataacgatgacacactgactattggaagttcttttgaggataagatcacactaagagaactagaaactagagacagagatactgagaaaaatgattcaggcaacagtacaggtgtcaattcatcggctcgtgaccaaccaactgccactcccattacaatagaagcaccttcagaaatgtcactggatgatgcaactgttgtaacaattgttcaagacaaggctgaatgcaagctgaatgttgaaccgataaatcagcaagttcaagcacaagaagatccttctgacttgacatgcctgtcacctgcagttaactcgaaaggtgcagggaacttactaaaggaaaatcctgttgaagtaagctctgatgctggatcaagtggaaaagtaggaactcataagaagagtgctgtttctaagaagccacgtggtagttacacccctaacttccggcgacctctcttgagtaagcagatgacaaattggttttatgccagtaccaaaagtgatatacatgagaagcaactcattctgggagaaatggtcaacaacatggatgtgccctcatctattacagaggcactttctttgggtcttaacccaagatcagattggatgatgaaggtatatgcattcagtttcttaagacagtgtttgctagaacgtggatcaaaaggcactcaggaagttgcacaaaattttgagaaggttatgaggcttgtttgtcgatatctagatgatccccatcacaaagtggcacatgctgctctctcttcactagctgatatcatgccagttttcaagaagccttttgaacattatctcgacaagacactgccccatattttctcccggttaaatgatccaaaggaatcaatcaagcagcagtgcttggcaattttgaaacatgcaaatgaaagttatcccattgattctctcttacccgccttacttcgttcgctagatgagcagaaatctcccaagtcaaaactggcagttcttgagtttgcaaatgcctcttttgtgaaatgcgaagtcaattctgaaagctattgtagcagcagcttcctcaagccatggtttggaaaacttgcccatttgtttaacgataaaaacaagaaactgaaggaggttacagtggttggtttctcatctatttattctcactatgatcctacatccatgttaagctttttggtcaccctgtcaatggaagaacaaaagcggctaaaacgggcaatgaagcaattaataccatcaatagaaagtgacatggaagagttcttgcaacagaagagacataagcaaaagactccatcttttgatatttttactgcaaaatcaccacttcatcctgcatttcaatctgcaaaatcaccactgcatcctgctcatcgatcttctaaatcaccactccatcctcgatttgctgagtcgcccggtcattccgcatataaatacgccaagtcaccgctgcatccctcgtatcaacctgctaactcaccgctgcatccctcgtatcaatctaactatgtcaaggctgatgattgtttcagttctgcactccagtgtctcccggatacatctttggaagtccaggaggaccgtactggaaggattgagatcgaatctcctaataaatcttatgggcacaaagctgaaatgatggacaagaagtcctgtaccgtgaggtcaaagaatgatctcccgagaagaagtgacttcagtgtgatatcaaataacatagttcagaatgcaagcagtagggacagtcggagtacaaagatacttgatgaaccaaacgacagtgaactgcacataaatacccgaaaaaacaaagttacgaggacgaggaatgatttgcaggatcatgagtactatttagtgtgttctctttctgcaacagttacatgctataagtgtcctatgagcttgtttttacaaatcttggcaacagattttacaaagctagacaccacctcatcttgcactcgttttcagaatttacaccagatgtcttcttcccttctcgagatgcttgatgacccagatatggccacaagagagcttgcactttctctgctggctgaaatccttgaaaagcaccagaaggcgatggagaactgcgttgagcttcttgtagttaaactgctgcatgcaaccaaagacggtgccttgaaggttgtaaatcaggcccatatctgcttgacaactgtggtcactcagttcgacccactcagatgccttggggccatcgcttctcagctggccagccaggatgagaaagttcttattgtaagcatcaatagtctgagcaagcttgtgatgcgattctcggaggacaacctgatggctcatctgccaacgtttcttccagcacttgtggatgcttccaaaaaccgcagtccgtatgtccgcaaggctgcgatggtgtgcgtggtggacgcgtacctgaagctggggccggcgctgctgccgtacctggagggcctggacagcgcgcagctgcagctgataaccacccacgccagccgtctgtcccaggcaagattgattgcgtcggacggctgacgcagcggggcacgccggacgggccggccggccgaggatgttccggggcagagcagcgtgcgtcgtcgtcgtcggcgtaccacccgctcctccttataacgcccgtgcgcgccccggaaggaggaggaggaggaggaggaggaggaggaggaagaagaagaacgatgccctgctgtgactactgcgctcccaatttatgagcatacagtagaccgcactgcgctgcggacggaagtgtactgcgagcagcaatggctgcgcctggtttttcttcttcttgtggcttgtatttagagatatatagagagagagagagcgtgtgctatgcgtgcggctgttgtcatttaagggcttgttcggttatttctatcccatgtggattggatgtgattggaaaaaaattgtgaaagattttgacttgtttgggattgaaatccatccattcccacccaatccacatggattgagagcaaaacgaacaagccctaaagtgggaagtaaagggtgaacagtcagtcggttatgaaatactgcagcgatggatttgaatcaaaaaagaagaaggttctgtgtgctggaacctggactggattggatgctactcctgtagatacaacaggttggtgatctggtctatggagatcgagagcagcagaggctgcatgtgcaccgcaatccctgccgtgccgtatggcgtcggctttggttggcttggctgcccagtgcccagtgcagtgcatgaatgaggaaggaagcggacgaacctgcgccggtgccgtgccctgtccacccggagactggacgatatagaaagagagatggaga

SEQ ID NO: 51874 - DNA, 4698 bp, Zea Mays
atggcaatgccacccgccgcggtggcgcggctgcgggagctggtgccggcgccggggacggaggaggagctggagctcgacgtcgccggcgcggccgcgctcgtcgagtgctgctccggcctcctccgccctggcggcggcggtgacggcgacgccggggccgcgctcgaggcgctcgaggcactctgcgctgcgggcggagggggcgcgatgcgccgccatgccgatgggctcgctccgctggtcgtcgcgcgcctcggcgacggacacgcggccgtgcgggaggccgcgaggaggtacctcgtgctgctcatggagatgaaggagatgaatgcaagaacggaaaacacagagccaaactcaaacgtgccaaatgaccaacacgttcactatacgacaatcgaaatggaatcttctaataccagccaagcaagaaaaaattccaaagagaaggtcagcgcaagagacatctcgcttcttgcaggagaaggagatattacaaggaagttagtcgaacctataaaggttttctctgagaaggacctactaagggagataggaaaagtagtatctactttgcagccagataatgagtggtcaatccggataactgcaatgcaaagagtggagggtttagtgcttggaggtgctgcggactattcggccttccccatgctcctaaaacagctcatgactcctctaataactcagcttctggataggagatctagcgttgtaaaacaggcatgccatttattaaacttcctatcaaaagagctactacgtgactttgagccatacgcagagctgcttattccggtccttcttaagaatgtcgtgatcaccatccttgtaattgctgagtctgctgataactgtataaaagagatgttaaggaactgcaaggtggctcgtatactaccaaggattattgaatttgcaaagaatgatagaagtgctgttcttcgtgccaggtgttgtgaatatgcaacactaatgttagagtactgggttgatactccagaaatacagagatcagctgacctgtacgaagaccttataaaatgttgtatagcagatgcaactagtgagatgataaatgatgaagatactgagacacctcaagcgcatcttcctccagttaaaataagtcatcttcaacctagttctttcgttccagctgtaatagataaagttgttaaggtcgattctgggatatcattttcttccggagaccttcaaacatcagacatactatacctccagtgtgatgatataatcgcaaaaggcctagatgcgggcaataacgatgacacactgactattggaagttcttttgaggataagatcacactaagagaactagaaactagagacagagatactgagaaaaatgattcaggcaacagtacaggtgtcaattcatcggctcgtgaccaaccaactgccactcccattacaatagaagcaccttcagaaatgtcactggatgatgcaactgttgtaacaattgttcaagacaaggctgaatgcaagctgaatgttgaaccgataaatcagcaagttcaagcacaagaagatccttctgacttgacatgcctgtcacctgcagttaactcgaaaggtgcagggaacttactaaaggaaaatcctgttgaagtaagctctgatgctggatcaagtggaaaagtaggaactcataagaagagtgctgtttctaagaagccacgtggtagttacacccctaacttccggcgacctctcttgagtaagcagatgacaaattggttttatgccagtaccaaaagtgatatacatgagaagcaactcattctgggagaaatggtcaacaacatggatgtgccctcatctattacagaggcactttctttgggtcttaacccaagatcagattggatgatgaaggtatatgcattcagtttcttaagacagtgtttgctagaacgtggatcaaaaggcactcaggaagttgcacaaaattttgagaaggttatgaggcttgtttgtcgatatctagatgatccccatcacaaagtggcacatgctgctctctcttcactagctgatatcatgccagttttcaagaagccttttgaacattatctcgacaagacactgccccatattttctcccggttaaatgatccaaaggaatcaatcaagcagcagtgcttggcaattttgaaacatgcaaatgaaagttatcccattgattctctcttacccgccttacttcgttcgctagatgagcagaaatctcccaagtcaaaactggcagttcttgagtttgcaaatgcctcttttgtgaaatgcgaagtcaattctgaaagctattgtagcagcagcttcctcaagccatggtttggaaaacttgcccatttgtttaacgataaaaacaagaaactgaaggaggttacagtggttggtttctcatctatttattctcactatgatcctacatccatgttaagctttttggtcaccctgtcaatggaagaacaaaagcggctaaaacgggcaatgaagcaattaataccatcaatagaaagtgacatggaagagttcttgcaacagaagagacataagcaaaagactccatcttttgatatttttactgcaaaatcaccacttcatcctgcatttcaatctgcaaaatcaccactgcatcctgctcatcgatcttctaaatcaccactccatcctcgatttgctgagtcgcccggtcattccgcatataaatacgccaagtcaccgctgcatccctcgtatcaacctgctaactcaccgctgcatccctcgtatcaatctaactatgtcaaggctgatgattgtttcagttctgcactccagtgtctcccggatacatctttggaagtccaggaggaccgtactggaaggattgagatcgaatctcctaataaatcttatgggcacaaagctgaaatgatggacaagaagtcctgtaccgtgaggtcaaagaatgatctcccgagaagaagtgacttcagtgtgatatcaaataacatagttcagaatgcaagcagtagggacagtcggagtacaaagatacttgatgaaccaaacgacagtgaactgcacataaatacccgaaaaaacaaagttacgaggacgaggaatgatttgcaggatcatgagtactatttagtgtgttctctttctgcaacagttacatgctataagtgtcctatgagcttgtttttacaaatcttggcaacagattttacaaagctagacaccacctcatcttgcactcgttttcagaatttacaccagatgtcttcttcccttctcgagatgcttgatgacccagatatggccacaagagagcttgcactttctctgctggctgaaatccttgaaaagcaccagaaggcgatggagaactgcgttgagcttcttgtagttaaactgctgcatgcaaccaaagacggtgccttgaaggttgtaaatcaggcccatatctgcttgacaactgtggtcactcagttcgacccactcagatgccttggggccatcgcttctcagctggccagccaggatgagaaagttcttattgtaagcatcaatagtctgagcaagcttgtgatgcgattctcggaggacaacctgatggctcatctgccaacgtttcttccagcacttgtggatgcttccaaaaaccgcagtccgtatgtccgcaaggctgcgatggtgtgcgtggtggacgcgtacctgaagctggggccggcgctgctgccgtacctggagggcctggacagcgcgcagctgcagctgataaccacccacgccagccgtctgtcccaggcaagattgattgcgtcggacggctgacgcagcggggcacgccggacgggccggccggccgaggatgttccggggcagagcagcgtgcgtcgtcgtcgtcggcgtaccacccgctcctccttataacgcccgtgcgcgccccggaaggaggaggaggaggaggaggaggaggaggaggaagaagaagaacgatgccctgctgtgactactgcgctcccaatttatgagcatacagtagaccgcactgcgctgcggacggaagtgtactgcgagcagcaatggctgcgcctggtttttcttcttcttgtggcttgtatttagagatatatagagagagagagagcgtgtgctatgcgtgcggctgttgtcatttaagggcttgttcggttatttctatcccatgtggattggatgtgattggaaaaaaattgtgaaagattttgacttgtttgggattgaaatccatccattcccacccaatccacatggattgagagcaaaacgaacaagccctaaagtgggaagtaaagggtgaacagtcagtcggttatgaaatactgcagcgatggatttgaatcaaaaaagaagaaggttctgtgtgctggaacctggactggattggatgctactcctgtagatacaacaggttggtgatctggtctatggagatcgagagcagcagaggctgcatgtgcaccgcaatccctgccgtgccgtatggcgtcggctttggttggcttggctgcccagtgcccagtgcagtgcatgaatgaggaaggaagcggacgaacctgcgccggtgccgtgccctgtccacccggagactggacgatatagaaagagagatggaga

SEQ ID NO: 51875 - DNA, 4910 bp, Zea Mays
atggcaatgccacccgccgcggtggcgcggctgcgggagctggtgccggcgccggggacggaggaggagctggagctcgacgtcgccggcgcggccgcgctcgtcgagtgctgctccggcctcctccgccctggcggcggcggtgacggcgacgccggggccgcgctcgaggcgctcgaggcactctgcgctgcgggcggagggggcgcgatgcgccgccatgccgatgggctcgctccgctggtcgtcgcgcgcctcggcgacggacacgcggccgtgcgggaggccgcgaggaggtacctcgtgctgctcatggagatgaaggagatgaatgcaagaacggaaaacacagagccaaactcaaacgtgccaaatgaccaacacgttcactatacgacaatcgaaatggaatcttctaataccagccaagcaagaaaaaattccaaagagaaggtcagcgcaagagacatctcgcttcttgcaggagaaggagatattacaaggaagttagtcgaacctataaaggttttctctgagaaggacctactaagggagataggaaaagtagtatctactttgcagccagataatgagtggtcaatccggataactgcaatgcaaagagtggagggtttagtgcttggaggtgctgcggactattcggccttccccatgctcctaaaacagctcatgactcctctaataactcagcttctggataggagatctagcgttgtaaaacaggcatgccatttattaaacttcctatcaaaagagctactacgtgactttgagccatacgcagagctgcttattccggtccttcttaagaatgtcgtgatcaccatccttgtaattgctgagtctgctgataactgtataaaagagatgttaaggaactgcaaggtggctcgtatactaccaaggattattgaatttgcaaagaatgatagaagtgctgttcttcgtgccaggtgttgtgaatatgcaacactaatgttagagtactgggttgatactccagaaatacagagatcagctgacctgtacgaagaccttataaaatgttgtatagcagatgcaactagtgagatgataaatgatgaagatactgagacacctcaagcgcatcttcctccagttaaaataagtcatcttcaacctagttctttcgttccagctgtaatagataaagttgttaaggtcgattctgggatatcattttcttccggagaccttcaaacatcagacatactatacctccagtgtgatgatataatcgcaaaaggcctagatgcgggcaataacgatgacacactgactattggaagttcttttgaggataagatcacactaagagaactagaaactagagacagagatactgagaaaaatgattcaggcaacagtacaggtgtcaattcatcggctcgtgaccaaccaactgccactcccattacaatagaagcaccttcagaaatgtcactggatgatgcaactgttgtaacaattgttcaagacaaggctgaatgcaagctgaatgttgaaccgataaatcagcaagttcaagcacaagaagatccttctgacttgacatgcctgtcacctgcagttaactcgaaaggtgcagggaacttactaaaggaaaatcctgttgaagtaagctctgatgctggatcaagtggaaaagtaggaactcataagaagagtgctgtttctaagaagccacgtggtagttacacccctaacttccggcgacctctcttgagtaagcagatgacaaattggttttatgccagtaccaaaagtgatatacatgagaagcaactcattctgggagaaatggtcaacaacatggatgtgccctcatctattacagaggcactttctttgggtcttaacccaagatcagattggatgatgaaggtatatgcattcagtttcttaagacagtgtttgctagaacgtggatcaaaaggcactcaggaagttgcacaaaattttgagaaggttatgaggcttgtttgtcgatatctagatgatccccatcacaaagtggcacatgctgctctctcttcactagctgatatcatgccagttttcaagaagccttttgaacattatctcgacaagacactgccccatattttctcccggttaaatgatccaaaggaatcaatcaagcagcagtgcttggcaattttgaaacatgcaaatgaaagttatcccattgattctctcttacccgccttacttcgttcgctagatgagcagaaatctcccaagtcaaaactggcagttcttgagtttgcaaatgcctcttttgtgaaatgcgaagtcaattctgaaagctattgtagcagcagcttcctcaagccatggtttggaaaacttgcccatttgtttaacgataaaaacaagaaactgaaggaggttacagtggttggtttctcatctatttattctcactatgatcctacatccatgttaagctttttggtcaccctgtcaatggaagaacaaaagcggctaaaacgggcaatgaagcaattaataccatcaatagaaagtgacatggaagagttcttgcaacagaagagacataagcaaaagactccatcttttgatatttttactgcaaaatcaccacttcatcctgcatttcaatctgcaaaatcaccactgcatcctgctcatcgatcttctaaatcaccactccatcctcgatttgctgagtcgcccggtcattccgcatataaatacgccaagtcaccgctgcatccctcgtatcaacctgctaactcaccgctgcatccctcgtatcaatctaactatgtcaaggctgatgattgtttcagttctgcactccagtgtctcccggatacatctttggaagtccaggaggaccgtactggaaggattgagatcgaatctcctaataaatcttatgggcacaaagctgaaatgatggacaagaagtcctgtaccgtgaggtcaaagaatgatctcccgagaagaagtgacttcagtgtgatatcaaataacatagttcagaatgcaagcagtagggacagtcggagtacaaagatacttgatgaaccaaacgacagtgaactgcacataaatacccgaaaaaacaaagttacgaggacgaggaatgatttgcaggatcatgagaatttacaccagatgtcttcttcccttctcgagatgcttgatgacccagatatggccacaagagagcttgcactttctctgctggctgaaatccttgaaaagcacgtaagcttttttttttctgagagtcgttagcagtgactactcgtctgtttacacgcgccaccattggataccgtttccccatgataacgaccctttgccttgcccttcccgtccagcagaaggcgatggagaactgcgttgagcttcttgtagttaaactgctgcatgcaaccaaagacggtgccttgaaggtaatgcacagttgcagtgcttggttcggctcgcatttgctggtgcaaccacaaagctggcatctgaagcctttatttatgtcactgtcgctgcaggttgtaaatcaggcccatatctgcttgacaactgtggtcactcagttcgacccactcagatgccttggggtaagcttgttttgcatcgtcgttaagtgttgctgtttaactacaagaaatcttgtgttgctgttttttttttttgtttgccgtcgtcactgcaagtaatcttgtgtttctcatgtaaacgtgcaggccatcgcttctcagctggccagccaggatgagaaagttcttattgtaagcatcaatagtctgagcaagcttgtgatgcgattctcggaggacaacctgatggctcatctgccaacgtttcttccagcacttgtggatgcttccaaaaaccgcagtccgtatgtccgcaaggctgcgatggtgtgcgtggtggacgcgtacctgaagctggggccggcgctgctgccgtacctggagggcctggacagcgcgcagctgcagctgataaccacccacgccagccgtctgtcccaggcaagattgattgcgtcggacggctgacgcagcggggcacgccggacgggccggccggccgaggatgttccggggcagagcagcgtgcgtcgtcgtcgtcggcgtaccacccgctcctccttataacgcccgtgcgcgccccggaaggaggaggaggaggaggaggaggaggaggaggaagaagaagaacgatgccctgctgtgactactgcgctcccaatttatgagcatacagtagaccgcactgcgctgcggacggaagtgtactgcgagcagcaatggctgcgcctggtttttcttcttcttgtggcttgtatttagagatatatagagagagagagagcgtgtgctatgcgtgcggctgttgtcatttaagggcttgttcggttatttctatcccatgtggattggatgtgattggaaaaaaattgtgaaagattttgacttgtttgggattgaaatccatccattcccacccaatccacatggattgagagcaaaacgaacaagccctaaagtgggaagtaaagggtgaacagtcagtcggttatgaaatactgcagcgatggatttgaatcaaaaaagaagaaggttctgtgtgctggaacctggactggattggatgctactcctgtagatacaacaggttggtgatctggtctatggagatcgagagcagcagaggctgcatgtgcaccgcaatccctgccgtgccgtatggcgtcggctttggttggcttggctgcccagtgcccagtgcagtgcatgaatgaggaaggaagcggacgaacctgcgccggtgccgtgccctgtccacccggagactggacgatatagaaagagagatggaga

SEQ ID NO: 51876 - DNA, 9608 bp, Zea Mays
atggcaatgccacccgccgcggtggcgcggctgcgggagctggtgccggcgccggggacggaggaggagctggagctcgacgtcgccggcgcggccgcgctcgtcgagtgctgctccggcctcctccgccctggcggcggcggtgacggcgacgccggggccgcgctcgaggcgctcgaggcactctgcgctgcgggcggagggggcgcgatgcgccgccatgccgatgggctcgctccgctggtcgtcgcgcgcctcggcgacggacacgcggccgtgcgggaggccgcgaggaggtacctcgtgctgctcatggagatgaaggagatgaatgcaagaacggaaaacacagagccaaactcaaacgtgccaaatgaccaacacgttcactatacgacaatcgaaatggaatcttctaataccagccaagcaagaaaaaattccaaagagaaggtcagcgcaagagacatctcgcttcttgcaggagaaggagatattacaaggaagttagtcgaacctataaaggttttctctgagaaggacctactaagggagataggaaaagtagtatctactttgcagccagataatgagtggtcaatccggataactgcaatgcaaagagtggagggtttagtgcttggaggtgctgcggactattcggccttccccatgctcctaaaacagctcatgactcctctaataactcagcttctggataggagatctagcgttgtaaaacaggcatgccatttattaaacttcctatcaaaagagctactacgtgactttgagccatacgcagagctgcttattccggtccttcttaagaatgtcgtgatcaccatccttgtaattgctgagtctgctgataactgtataaaagagatgttaaggaactgcaaggtggctcgtatactaccaaggattattgaatttgcaaagaatgatagaagtgctgttcttcgtgccaggtgttgtgaatatgcaacactaatgttagagtactgggttgatactccagaaatacagagatcagctgacctgtacgaagaccttataaaatgttgtatagcagatgcaactagtgagatgataaatgatgaagatactgagacacctcaagcgcatcttcctccagttaaaataagtcatcttcaacctagttctttcgttccagctgtaatagataaagttgttaaggtcgattctgggatatcattttcttccggagaccttcaaacatcagacatactatacctccagtgtgatgatataatcgcaaaaggcctagatgcgggcaataacgatgacacactgactattggaagttcttttgaggataagatcacactaagagaactagaaactagagacagagatactgagaaaaatgattcaggcaacagtacaggtgtcaattcatcggctcgtgaccaaccaactgccactcccattacaatagaagcaccttcagaaatgtcactggatgatgcaactgttgtaacaattgttcaagacaaggctgaatgcaagctgaatgttgaaccgataaatcagcaagttcaagcacaagaagatccttctgacttgacatgcctgtcacctgcagttaactcgaaaggtgcagggaacttactaaaggaaaatcctgttgaagtaagctctgatgctggatcaagtggaaaagtaggaactcataagaagagtgctgtttctaagaagccacgtggtagttacacccctaacttccggcgacctctcttgagtaagcagatgacaaattggttttatgccagtaccaaaagtgatatacatgagaagcaactcattctgggagaaatggtcaacaacatggatgtgccctcatctattacagaggcactttctttgggtcttaacccaagatcagattggatgatgaaggtatatgcattcagtttcttaagacagtgtttgctagaacgtggatcaaaaggcactcaggaagttgcacaaaattttgagaaggttatgaggcttgtttgtcgatatctagatgatccccatcacaaagtggcacatgctgctctctcttcactagctgatatcatgccagttttcaagaagccttttgaacattatctcgacaagacactgccccatattttctcccggttaaatgatccaaaggaatcaatcaagcagcagtgcttggcaattttgaaacatgcaaatgaaagttatcccattgattctctcttacccgccttacttcgttcgctagatgagcagaaatctcccaagtcaaaactggcagttcttgagtttgcaaatgcctcttttgtgaaatgcgaagtcaattctgaaagctattgtagcagcagcttcctcaagccatggtttggaaaacttgcccatttgtttaacgataaaaacaagaaactgaaggaggttacagtggttggtttctcatctatttattctcactatgatcctacatccatgttaagctttttggtcaccctgtcaatggaagaacaaaagcggctaaaacgggcaatgaagcaattaataccatcaatagaaagtgacatggaagagttcttgcaacagaagagacataagcaaaagactccatcttttgatatttttactgcaaaatcaccacttcatcctgcatttcaatctgcaaaatcaccactgcatcctgctcatcgatcttctaaatcaccactccatcctcgatttgctgagtcgcccggtcattccgcatataaatacgccaagtcaccgctgcatccctcgtatcaacctgctaactcaccgctgcatccctcgtatcaatctaactatgtcaaggctgatgattgtttcagttctgcactccagtgtctcccggatacatctttggaagtccaggaggaccgtactggaaggattgagatcgaatctcctaataaatcttatgggcacaaagctgaaatgatggacaagaagtcctgtaccgtgaggtcaaagaatgatctcccgagaagaagtgacttcagtgtgatatcaaataacatagttcagaatgcaagcagtagggacagtcggagtacaaagatacttgatgaaccaaacgacagtgaactgcacataaatacccgaaaaaacaaagttacgaggacgaggaatgatttgcaggatcatgagtactatttagtgtgttctctttctgcaacagttacatgctataagtgtcctatgagcttgtttttacaaatcttggcaacagattttacaaagctagacaccacctcatcttgcactcgttttcagaatttacaccagatgtcttcttcccttctcgagatgcttgatgacccagatatggccacaagagagcttgcactttctctgctggctgaaatccttgaaaagcaccagaaggcgatggagaactgcgttgagcttcttgtagttaaactgctgcatgcaaccaaagacggtgccttgaaggttgtaaatcaggcccatatctgcttgacaactgtggtcactcagttcgacccactcagatgccttggggccatcgcttctcagctggccagccaggatgagaaagttcttattgtaagcatcaatagtctgagcaagcttgtgatgcgattctcggaggacaacctgatggctcatctgccaacgtttcttccagcacttgtggatgcttccaaaaaccgcagtccgtatgtccgcaaggttagtccattccgggaaatctgttttttattttttttcacctcctccagattgctttatatggtaaaagactaaaaggtagtagggaattacttaggtaataaataaaaaccggagtattgatcatatatgccttgctgctgtgtagcatactgacattttttttaaaaaaaacgagtagcatactgacaataataccatgtacttgctctgaagtctgaaccatgcacacacatacagacaataatagcatgtactacgagtagtagtaattgtatttgctcgccccatcacaaaaaaggaggagaaaatgatggcattgtgttggtcattcatcggctgcaggctgcgatggtgtgcgtggtggacgcgtacctgaagctggggccggcgctgctgccgtacctggagggcctggacagcgcgcagctgcagctgataaccacccacgccagccgtctgtcccaggcaagattgattgcgtcggacggctgacgcagcggggcacgccggacgggccggccggccgaggatgttccggggcagagcagcgtgcgtcgtcgtcgtcggcgtaccacccgctcctccttataacgcccgtgcgcgccccggaaggaggaggaggaggaggaggaggaggaggaggaagaagaagaacgatgccctgctgtgactactgcgctcccaatttatgagcatacagtagaccgcactgcgctgcggacggaagtgtactgcgagcagcaatggctgcgcctggtttttcttcttcttgtggcttgtatttagagatatatagagagagagagagcgtgtgctatgcgtgcggctgttgtcatttaagggcttgttcggttatttctatcccatgtggattggatgtgattggaaaaaaattgtgaaagattttgacttgtttgggattgaaatccatccattcccacccaatccacatggattgagagcaaaacgaacaagccctaaagtgggaagtaaagggtgaacagtcagtcggttatgaaatactgcagcgatggatttgaatcaaaaaagaagaaggttctgtgtgctggaacctggactggattggatgctactcctgtagatacaacaggttggtgatctggtctatggagatcgagagcagcagaggctgcatgtgcaccgcaatccctgccgtgccgtatggcgtcggctttggttggcttggctgcccagtgcccagtgcagtgcatgaatgaggaaggaagcggacgaacctgcgccggtgccgtgccctgtccacccggagactggacgatatagaaagagagatggagagtgcaccgggggatggcatgatggggtggcagaagggcgaagagaaggccgccggcggcaatcatcgagcggagcggagtccatcaggtcggtcgaatccaagcccaagtccagttcagccagctggcacacgtgggcgatgaagcaacaccgtgactgtgagcgtcacgtcacgccaaatggccagttgcaggagaagaagattagtgcagtacgtagtatacgtaacgtaatcgaggagaacaacaccggtatagaaagaaagaggagaagcgggtgcctgcctaccgcggcccattaatggtgcttcacgtgacctgccacgcccccacctccggccccccctaccctactgtgcacggtggctacaccactactactactaggcagccgagctcctcgcctcgctctcgctctcgctcctccaccttccctcccttgggtccgtccgtttgccgtgcgccattgcccattgcccattgcgccctgcgccccctcccttggccaagttgccatttgccttccctttccctccgcatcggcccatcccagtatcctaccctccccctcccactcacggcagctgccattgtcgccctgtctgcccccctccacgctctccctatccaccacagcacagcacagcacagcgccacgcacgatctcgccggtgccaccgtgctcccccaccttcaaatgtcgggcctccttccaccggcgccccgcggcacggagcactgagcgcagtccggtccggcgctgccccactgcgacaaggaggacgggcaagcgccgccagccgcgcggggcctccgctctgctcaccctcgccgcgggggagacacacggggtaggtgcggagaggacgctagatccgcgcgcccgaccgtccccgccgcctcccaccggccaccgcaccgccgccgccggcggttccctcgtcgtcgcgcgccagcgcagctgctgcagtgcaggaagggacggtgtgaatgaaaggcgctcaggataaaaggcacagaaagaagcaggacctccaggttctcgggcccttcccgggatgcctggggaggatgatcaacatgttagacctcagcaatggcgtggttgctaccaagatgctcactgagaaggcgcatagagatgcatatgcctttgcagtttctccggccggaaaagaccggagtaatactttcaagatggcaattaatcccccagctcagactgaagataaacaaagggatagtcagacaagaaggaatttccctactaaaaggtcaaactcgcctactaaaaggactggtgcgatgcctgttaaaatgctgatggagcaggacatgtggaaagaaagacggcctgatgaggagccactgaatgttgttgcaagattaatgggcctacatgagcctccaggtcagcaatccaatttccctttaggaagacaattggataagaaatatcagtgtggtggttttgaagagaactactggaatctcaagtcaaagaaggaaagcaaatgccaccaaaaccaaaaggcagggccacgccatcagcacacttggaatggttctggtgaccaaccatcaagaatcagtagcagccagagcatgcaccaagaaaatgagacttgtgagaagaggatgtcaattgttcgcgagaagtttgctgaagcaaagcgactagccacagatgagaaacttcttcattcgaaggagttccaagatgcactgcagtttttaagctcaaatagagacctattcttggagttccttgacgagccaaatcctctattatcaagcaaccgttatgagttccaacctgttgcaccaccttctgaagtaaagcaaataaccatactgaagccatcagaaccagcaaagagaaaagacagcatctttgtggggagacaactgttttcagatggagatggaggtgaaagtgaacgaaacagatacaggcgccatcagagttcggatgtttccccagcaaattcaaatttgtctgagccaacaaaaattgtagtactaaaaccaggattccccagttctcatgactccaggattgcgaggtcttcattatcatcagcagaagacagtgaagatgaaagtatgatggcggttgatgaaaccatgtgctcaagaaggttggcaaaggagatcacttggcagatgaggatgcggctaaaagacaggcaagacgaagagagtatgctctcatgtgaataccctgacttttatatcggagatgactccttcagtaaatcagaagttgagattccaaaagagatgtgtggtgaaacaagtggggaattggagtttggcactccgacttctggccgctcttgggattttctgagtagaagtggaagtcctttctctgcgtcatgctctagtcaggcatcccatagaagggagccgtcagtagttagggaaggcaagaagaagattttagagagattgtctatggtatcatcaacagtcaatattgaggaagaaatggaaggtcgcagaagtacaggcacacttggtgacatgctcacaatatcgaaagtcaaggaccaggaagaaattggggctgaaacactggggagcccagcacctgagctggaacctgaggagcctttctcatgtttgccaagatctcgatcccttccactttctttgtcctatggagtcgctgagtcaaatggaataacctctggcactcatgaagctgaaaaggaaagaatcaggaagtcgtcatcgtttagggaaaaagtttctagcctgttctctaaaaataagaaatcaaccagggagaaggtagatccatctgtgagcaatagactcaaacatggaggggctgtgactactggtgatgtgaaggaaatctgcaaccatcttgccctagacaatcttcagaaacaacatacttgtctaaacacagatgagaagaacactgtgcaaggactcgtgactagttcttgtgagaccaatagtgcagctgatatccctgccaaggatatttcctccatttcaagtcttggtgtcccaggaatctttggtggccttcaggatgaacctagtcctgtatctgtactagatggaccgtttatatgtgataacaataggaggctactgtactcatctgaaaatttcatcacttcatccccacaagctttgtcaaggtctcccctgatcggatcattttcacggtcactgtcatgggaggatcccccgctggaagtcatgtcgccgaattcgttgagactctcaaggcttttctcgaaggctgatgaagatctagattcactgacgtttatccagaagctggtccactctcgaggcacgggtcgagaaagttgcatattagctgaccctttggacccgagtttgctcgagaagatttcggattacgaagaagatggaattaagtttgggaaaaggcggcccaaacagaggctccttttcgacgccgtaaacgaagcgctcatcgagcttgcttcgatggcggaactggctgcgtacccctggggtagatcatgctcttcggagcacggggattgcaagaacggttccagcagtaattctgcggctgaggaaatctggcgggtcattaggaactggtcgatacttgagaagtaccctcccggtgaagctattgaaagaaatctcttgctggagatgatactaaagagggaggtggcggaggcagccagcgctgacacgactcggttagagacgtttgatctcaacaccacggtctgcgccatggtcttggatggcctggttgaagagacagttgtagatctgactaactactgctagtgagttctcagaagaaggaaaagaagggtacagatgtaaacgaggagtgctgagaaagatgcatgcgtgctcttcttcatccttggtccgcctgcctttgctttgcagtgtctcttgctgctgccgtttgctgggtgttttgtagtgcagtgcttggccattgccatggaagtatggaagcccgtcttaaagactgaaggctagaagcagtataagtcggtatggattaaaaccaagtgaacgttcgagcagccgccaatttgctgtaggtcttctgcggaatgatctgacgaatggatgaatgattgccatgaaccgcttgcacgttttgctcttggtagtggtactgctaccctgtcctgtagttggctgtgtgttgttggttcttctcgttcagatccctgtacagtgactggctgacagttttgaattggggctgccatgccactgccaccttctacggcggatgcgtgctttctcaccgatccttgaagcatgaatgcgtacattaactaatttgatctggtgattgcttgtttgatctggcatgcaacgttaactaatttgaccaagtaaaagggtcctcgatcctcctcaaagcaagctactgccatggcaggaggggtgggccactgctaaactactatttaaaatagttacaatttttatttttaggaaaaaatatttatagaagtaaaataatgattcaggtttttttgttgttgttggtcgtctaccccagcaataatgattcagaaattt

SEQ ID NO: 51877 - DNA, 9593 bp, Zea Mays
atggcaatgccacccgccgcggtggcgcggctgcgggagctggtgccggcgccggggacggaggaggagctggagctcgacgtcgccggcgcggccgcgctcgtcgagtgctgctccggcctcctccgccctggcggcggcggtgacggcgacgccggggccgcgctcgaggcgctcgaggcactctgcgctgcgggcggagggggcgcgatgcgccgccatgccgatgggctcgctccgctggtcgtcgcgcgcctcggcgacggacacgcggccgtgcgggaggccgcgaggaggtacctcgtgctgctcatggagatgaaggagatgaatgcaagaacggaaaacacagagccaaactcaaacgtgccaaatgaccaacacgttcactatacgacaatcgaaatggaatcttctaataccagccaagcaagaaaaaattccaaagagaaggtcagcgcaagagacatctcgcttcttgcaggagaaggagatattacaaggaagttagtcgaacctataaaggttttctctgagaaggacctactaagggagataggaaaagtagtatctactttgcagccagataatgagtggtcaatccggataactgcaatgcaaagagtggagggtttagtgcttggaggtgctgcggactattcggccttccccatgctcctaaaacagctcatgactcctctaataactcagcttctggataggagatctagcgttgtaaaacaggcatgccatttattaaacttcctatcaaaagagctactacgtgactttgagccatacgcagagctgcttattccggtccttcttaagaatgtcgtgatcaccatccttgtaattgctgagtctgctgataactgtataaaagagatgttaaggaactgcaaggtggctcgtatactaccaaggattattgaatttgcaaagaatgatagaagtgctgttcttcgtgccaggtgttgtgaatatgcaacactaatgttagagtactgggttgatactccagaaatacagagatcagctgacctgtacgaagaccttataaaatgttgtatagcagatgcaactagtgagatgataaatgatgaagatactgagacacctcaagcgcatcttcctccagttaaaataagtcatcttcaacctagttctttcgttccagctgtaatagataaagttgttaaggtcgattctgggatatcattttcttccggagaccttcaaacatcagacatactatacctccagtgtgatgatataatcgcaaaaggcctagatgcgggcaataacgatgacacactgactattggaagttcttttgaggataagatcacactaagagaactagaaactagagacagagatactgagaaaaatgattcaggcaacagtacaggtgtcaattcatcggctcgtgaccaaccaactgccactcccattacaatagaagcaccttcagaaatgtcactggatgatgcaactgttgtaacaattgttcaagacaaggctgaatgcaagctgaatgttgaaccgataaatcagcaagttcaagcacaagaagatccttctgacttgacatgcctgtcacctgcagttaactcgaaaggtgcagggaacttactaaaggaaaatcctgttgaagtaagctctgatgctggatcaagtggaaaagtaggaactcataagaagagtgctgtttctaagaagccacgtggtagttacacccctaacttccggcgacctctcttgagtaagcagatgacaaattggttttatgccagtaccaaaagtgatatacatgagaagcaactcattctgggagaaatggtcaacaacatggatgtgccctcatctattacagaggcactttctttgggtcttaacccaagatcagattggatgatgaaggtatatgcattcagtttcttaagacagtgtttgctagaacgtggatcaaaaggcactcaggaagttgcacaaaattttgagaaggttatgaggcttgtttgtcgatatctagatgatccccatcacaaagtggcacatgctgctctctcttcactagctgatatcatgccagttttcaagaagccttttgaacattatctcgacaagacactgccccatattttctcccggttaaatgatccaaaggaatcaatcaagcagcagtgcttggcaattttgaaacatgcaaatgaaagttatcccattgattctctcttacccgccttacttcgttcgctagatgagcagaaatctcccaagtcaaaactggcagttcttgagtttgcaaatgcctcttttgtgaaatgcgaagtcaattctgaaagctattgtagcagcagcttcctcaagccatggtttggaaaacttgcccatttgtttaacgataaaaacaagaaactgaaggaggttacagtggttggtttctcatctatttattctcactatgatcctacatccatgttaagctttttggtcaccctgtcaatggaagaacaaaagcggctaaaacgggcaatgaagcaattaataccatcaatagaaagtgacatggaagagttcttgcaacagaagagacataagcaaaagactccatcttttgatatttttactgcaaaatcaccacttcatcctgcatttcaatctgcaaaatcaccactgcatcctgctcatcgatcttctaaatcaccactccatcctcgatttgctgagtcgcccggtcattccgcatataaatacgccaagtcaccgctgcatccctcgtatcaacctgctaactcaccgctgcatccctcgtatcaatctaactatgtcaaggctgatgattgtttcagttctgcactccagtgtctcccggatacatctttggaagtccaggaggaccgtactggaaggattgagatcgaatctcctaataaatcttatgggcacaaagctgaaatgatggacaagaagtcctgtaccgtgaggtcaaagaatgatctcccgagaagaagtgacttcagtgtgatatcaaataacatagttcagaatgcaagcagtagggacagtcggagtacaaagatacttgatgaaccaaacgacagtgaactgcacataaatacccgaaaaaacaaagttacgaggacgaggaatgatttgcaggatcatgagtactatttagtgtgttctctttctgcaacagttacatgctataagtgtcctatgagcttgtttttacaaatcttggcaacagattttacaaagctagacaccacctcatcttgcactcgttttcagaatttacaccagatgtcttcttcccttctcgagatgcttgatgacccagatatggccacaagagagcttgcactttctctgctggctgaaatccttgaaaagcaccagaaggcgatggagaactgcgttgagcttcttgtagttaaactgctgcatgcaaccaaagacggtgccttgaaggttgtaaatcaggcccatatctgcttgacaactgtggtcactcagttcgacccactcagatgccttggggccatcgcttctcagctggccagccaggatgagaaagttcttattgtaagcatcaatagtctgagcaagcttgtgatgcgattctcggaggacaacctgatggctcatctgccaacgtttcttccagcacttgtggatgcttccaaaaaccgcagtccgtatgtccgcaaggttagtccattccgggaaatctgttttttattttttttcacctcctccagattgctttatatggtaaaagactaaaaggtagtagggaattacttaggtaataaataaaaaccggagtattgatcatatatgccttgctgctgtgtagcatactgacattttttttaaaaaaaacgagtagcatactgacaataataccatgtacttgctctgaagtctgaaccatgcacacacatacagacaataatagcatgtactacgagtagtagtaattgtatttgctcgccccatcacaaaaaaggaggagaaaatgatggcattgtgttggtcattcatcggctgcaggctgcgatggtgtgcgtggtggacgcgtacctgaagctggggccggcgctgctgccgtacctggagggcctggacagcgcgcagctgcagctgataaccacccacgccagccgtctgtcccaggcaagattgattgcgtcggacggctgacgcagcggggcacgccggacgggccggccggccgaggatgttccggggcagagcagcgtgcgtcgtcgtcgtcggcgtaccacccgctcctccttataacgcccgtgcgcgccccggaaggaggaggaggaggaggaggaggaggaggaggaagaagaagaacgatgccctgctgtgactactgcgctcccaatttatgagcatacagtagaccgcactgcgctgcggacggaagtgtactgcgagcagcaatggctgcgcctggtttttcttcttcttgtggcttgtatttagagatatatagagagagagagagcgtgtgctatgcgtgcggctgttgtcatttaagggcttgttcggttatttctatcccatgtggattggatgtgattggaaaaaaattgtgaaagattttgacttgtttgggattgaaatccatccattcccacccaatccacatggattgagagcaaaacgaacaagccctaaagtgggaagtaaagggtgaacagtcagtcggttatgaaatactgcagcgatggatttgaatcaaaaaagaagaaggttctgtgtgctggaacctggactggattggatgctactcctgtagatacaacaggttggtgatctggtctatggagatcgagagcagcagaggctgcatgtgcaccgcaatccctgccgtgccgtatggcgtcggctttggttggcttggctgcccagtgcccagtgcagtgcatgaatgaggaaggaagcggacgaacctgcgccggtgccgtgccctgtccacccggagactggacgatatagaaagagagatggagagtgcaccgggggatggcatgatggggtggcagaagggcgaagagaaggccgccggcggcaatcatcgagcggagcggagtccatcaggtcggtcgaatccaagcccaagtccagttcagccagctggcacacgtgggcgatgaagcaacaccgtgactgtgagcgtcacgtcacgccaaatggccagttgcaggagaagaagattagtgcagtacgtagtatacgtaacgtaatcgaggagaacaacaccggtatagaaagaaagaggagaagcgggtgcctgcctaccgcggcccattaatggtgcttcacgtgacctgccacgcccccacctccggccccccctaccctactgtgcacggtggctacaccactactactactaggcagccgagctcctcgcctcgctctcgctctcgctcctccaccttccctcccttgggtccgtccgtttgccgtgcgccattgcccattgcccattgcgccctgcgccccctcccttggccaagttgccatttgccttccctttccctccgcatcggcccatcccagtatcctaccctccccctcccactcacggcagctgccattgtcgccctgtctgcccccctccacgctctccctatccaccacagcacagcacagcacagcgccacgcacgatctcgccggtgccaccgtgctcccccaccttcaaatgtcgggcctccttccaccggcgccccgcggcacggagcactgagcgcagtccggtccggcgctgccccactgcgacaaggaggacgggcaagcgccgccagccgcgcggggcctccgctctgctcaccctcgccgcgggggagacacacggggtaggtgcggagaggacgctagatccgcgcgcccgaccgtccccgccgcctcccaccggccaccgcaccgccgccgccggcggttccctcgtcgtcgcgcgccagcgcagctgctgcagtgcaggaagggacggtgtgaatgaaaggcgctcaggataaaaggcacagaaagaagcaggacctccaggttctcgggcccttcccgggatgcctggggaggatgatcaacatgttagacctcagcaatggcgtggttgctaccaagatgctcactgagaaggcgcatagagatgtttctccggccggaaaagaccggagtaatactttcaagatggcaattaatcccccagctcagactgaagataaacaaagggatagtcagacaagaaggaatttccctactaaaaggtcaaactcgcctactaaaaggactggtgcgatgcctgttaaaatgctgatggagcaggacatgtggaaagaaagacggcctgatgaggagccactgaatgttgttgcaagattaatgggcctacatgagcctccaggtcagcaatccaatttccctttaggaagacaattggataagaaatatcagtgtggtggttttgaagagaactactggaatctcaagtcaaagaaggaaagcaaatgccaccaaaaccaaaaggcagggccacgccatcagcacacttggaatggttctggtgaccaaccatcaagaatcagtagcagccagagcatgcaccaagaaaatgagacttgtgagaagaggatgtcaattgttcgcgagaagtttgctgaagcaaagcgactagccacagatgagaaacttcttcattcgaaggagttccaagatgcactgcagtttttaagctcaaatagagacctattcttggagttccttgacgagccaaatcctctattatcaagcaaccgttatgagttccaacctgttgcaccaccttctgaagtaaagcaaataaccatactgaagccatcagaaccagcaaagagaaaagacagcatctttgtggggagacaactgttttcagatggagatggaggtgaaagtgaacgaaacagatacaggcgccatcagagttcggatgtttccccagcaaattcaaatttgtctgagccaacaaaaattgtagtactaaaaccaggattccccagttctcatgactccaggattgcgaggtcttcattatcatcagcagaagacagtgaagatgaaagtatgatggcggttgatgaaaccatgtgctcaagaaggttggcaaaggagatcacttggcagatgaggatgcggctaaaagacaggcaagacgaagagagtatgctctcatgtgaataccctgacttttatatcggagatgactccttcagtaaatcagaagttgagattccaaaagagatgtgtggtgaaacaagtggggaattggagtttggcactccgacttctggccgctcttgggattttctgagtagaagtggaagtcctttctctgcgtcatgctctagtcaggcatcccatagaagggagccgtcagtagttagggaaggcaagaagaagattttagagagattgtctatggtatcatcaacagtcaatattgaggaagaaatggaaggtcgcagaagtacaggcacacttggtgacatgctcacaatatcgaaagtcaaggaccaggaagaaattggggctgaaacactggggagcccagcacctgagctggaacctgaggagcctttctcatgtttgccaagatctcgatcccttccactttctttgtcctatggagtcgctgagtcaaatggaataacctctggcactcatgaagctgaaaaggaaagaatcaggaagtcgtcatcgtttagggaaaaagtttctagcctgttctctaaaaataagaaatcaaccagggagaaggtagatccatctgtgagcaatagactcaaacatggaggggctgtgactactggtgatgtgaaggaaatctgcaaccatcttgccctagacaatcttcagaaacaacatacttgtctaaacacagatgagaagaacactgtgcaaggactcgtgactagttcttgtgagaccaatagtgcagctgatatccctgccaaggatatttcctccatttcaagtcttggtgtcccaggaatctttggtggccttcaggatgaacctagtcctgtatctgtactagatggaccgtttatatgtgataacaataggaggctactgtactcatctgaaaatttcatcacttcatccccacaagctttgtcaaggtctcccctgatcggatcattttcacggtcactgtcatgggaggatcccccgctggaagtcatgtcgccgaattcgttgagactctcaaggcttttctcgaaggctgatgaagatctagattcactgacgtttatccagaagctggtccactctcgaggcacgggtcgagaaagttgcatattagctgaccctttggacccgagtttgctcgagaagatttcggattacgaagaagatggaattaagtttgggaaaaggcggcccaaacagaggctccttttcgacgccgtaaacgaagcgctcatcgagcttgcttcgatggcggaactggctgcgtacccctggggtagatcatgctcttcggagcacggggattgcaagaacggttccagcagtaattctgcggctgaggaaatctggcgggtcattaggaactggtcgatacttgagaagtaccctcccggtgaagctattgaaagaaatctcttgctggagatgatactaaagagggaggtggcggaggcagccagcgctgacacgactcggttagagacgtttgatctcaacaccacggtctgcgccatggtcttggatggcctggttgaagagacagttgtagatctgactaactactgctagtgagttctcagaagaaggaaaagaagggtacagatgtaaacgaggagtgctgagaaagatgcatgcgtgctcttcttcatccttggtccgcctgcctttgctttgcagtgtctcttgctgctgccgtttgctgggtgttttgtagtgcagtgcttggccattgccatggaagtatggaagcccgtcttaaagactgaaggctagaagcagtataagtcggtatggattaaaaccaagtgaacgttcgagcagccgccaatttgctgtaggtcttctgcggaatgatctgacgaatggatgaatgattgccatgaaccgcttgcacgttttgctcttggtagtggtactgctaccctgtcctgtagttggctgtgtgttgttggttcttctcgttcagatccctgtacagtgactggctgacagttttgaattggggctgccatgccactgccaccttctacggcggatgcgtgctttctcaccgatccttgaagcatgaatgcgtacattaactaatttgatctggtgattgcttgtttgatctggcatgcaacgttaactaatttgaccaagtaaaagggtcctcgatcctcctcaaagcaagctactgccatggcaggaggggtgggccactgctaaactactatttaaaatagttacaatttttatttttaggaaaaaatatttatagaagtaaaataatgattcaggtttttttgttgttgttggtcgtctaccccagcaataatgattcagaaattt

SEQ ID NO: 51878 - DNA, 9198 bp, Zea Mays
atggcaatgccacccgccgcggtggcgcggctgcgggagctggtgccggcgccggggacggaggaggagctggagctcgacgtcgccggcgcggccgcgctcgtcgagtgctgctccggcctcctccgccctggcggcggcggtgacggcgacgccggggccgcgctcgaggcgctcgaggcactctgcgctgcgggcggagggggcgcgatgcgccgccatgccgatgggctcgctccgctggtcgtcgcgcgcctcggcgacggacacgcggccgtgcgggaggccgcgaggaggtacctcgtgctgctcatggagatgaaggagatgaatgcaagaacggaaaacacagagccaaactcaaacgtgccaaatgaccaacacgttcactatacgacaatcgaaatggaatcttctaataccagccaagcaagaaaaaattccaaagagaaggtcagcgcaagagacatctcgcttcttgcaggagaaggagatattacaaggaagttagtcgaacctataaaggttttctctgagaaggacctactaagggagataggaaaagtagtatctactttgcagccagataatgagtggtcaatccggataactgcaatgcaaagagtggagggtttagtgcttggaggtgctgcggactattcggccttccccatgctcctaaaacagctcatgactcctctaataactcagcttctggataggagatctagcgttgtaaaacaggcatgccatttattaaacttcctatcaaaagagctactacgtgactttgagccatacgcagagctgcttattccggtccttcttaagaatgtcgtgatcaccatccttgtaattgctgagtctgctgataactgtataaaagagatgttaaggaactgcaaggtggctcgtatactaccaaggattattgaatttgcaaagaatgatagaagtgctgttcttcgtgccaggtgttgtgaatatgcaacactaatgttagagtactgggttgatactccagaaatacagagatcagctgacctgtacgaagaccttataaaatgttgtatagcagatgcaactagtgagatgataaatgatgaagatactgagacacctcaagcgcatcttcctccagttaaaataagtcatcttcaacctagttctttcgttccagctgtaatagataaagttgttaaggtcgattctgggatatcattttcttccggagaccttcaaacatcagacatactatacctccagtgtgatgatataatcgcaaaaggcctagatgcgggcaataacgatgacacactgactattggaagttcttttgaggataagatcacactaagagaactagaaactagagacagagatactgagaaaaatgattcaggcaacagtacaggtgtcaattcatcggctcgtgaccaaccaactgccactcccattacaatagaagcaccttcagaaatgtcactggatgatgcaactgttgtaacaattgttcaagacaaggctgaatgcaagctgaatgttgaaccgataaatcagcaagttcaagcacaagaagatccttctgacttgacatgcctgtcacctgcagttaactcgaaaggtgcagggaacttactaaaggaaaatcctgttgaagtaagctctgatgctggatcaagtggaaaagtaggaactcataagaagagtgctgtttctaagaagccacgtggtagttacacccctaacttccggcgacctctcttgagtaagcagatgacaaattggttttatgccagtaccaaaagtgatatacatgagaagcaactcattctgggagaaatggtcaacaacatggatgtgccctcatctattacagaggcactttctttgggtcttaacccaagatcagattggatgatgaaggtatatgcattcagtttcttaagacagtgtttgctagaacgtggatcaaaaggcactcaggaagttgcacaaaattttgagaaggttatgaggcttgtttgtcgatatctagatgatccccatcacaaagtggcacatgctgctctctcttcactagctgatatcatgccagttttcaagaagccttttgaacattatctcgacaagacactgccccatattttctcccggttaaatgatccaaaggaatcaatcaagcagcagtgcttggcaattttgaaacatgcaaatgaaagttatcccattgattctctcttacccgccttacttcgttcgctagatgagcagaaatctcccaagtcaaaactggcagttcttgagtttgcaaatgcctcttttgtgaaatgcgaagtcaattctgaaagctattgtagcagcagcttcctcaagccatggtttggaaaacttgcccatttgtttaacgataaaaacaagaaactgaaggaggttacagtggttggtttctcatctatttattctcactatgatcctacatccatgttaagctttttggtcaccctgtcaatggaagaacaaaagcggctaaaacgggcaatgaagcaattaataccatcaatagaaagtgacatggaagagttcttgcaacagaagagacataagcaaaagactccatcttttgatatttttactgcaaaatcaccacttcatcctgcatttcaatctgcaaaatcaccactgcatcctgctcatcgatcttctaaatcaccactccatcctcgatttgctgagtcgcccggtcattccgcatataaatacgccaagtcaccgctgcatccctcgtatcaacctgctaactcaccgctgcatccctcgtatcaatctaactatgtcaaggctgatgattgtttcagttctgcactccagtgtctcccggatacatctttggaagtccaggaggaccgtactggaaggattgagatcgaatctcctaataaatcttatgggcacaaagctgaaatgatggacaagaagtcctgtaccgtgaggtcaaagaatgatctcccgagaagaagtgacttcagtgtgatatcaaataacatagttcagaatgcaagcagtagggacagtcggagtacaaagatacttgatgaaccaaacgacagtgaactgcacataaatacccgaaaaaacaaagttacgaggacgaggaatgatttgcaggatcatgagaatttacaccagatgtcttcttcccttctcgagatgcttgatgacccagatatggccacaagagagcttgcactttctctgctggctgaaatccttgaaaagcaccagaaggcgatggagaactgcgttgagcttcttgtagttaaactgctgcatgcaaccaaagacggtgccttgaaggttgtaaatcaggcccatatctgcttgacaactgtggtcactcagttcgacccactcagatgccttggggccatcgcttctcagctggccagccaggatgagaaagttcttattgtaagcatcaatagtctgagcaagcttgtgatgcgattctcggaggacaacctgatggctcatctgccaacgtttcttccagcacttgtggatgcttccaaaaaccgcagtccgtatgtccgcaaggttagtccattccgggaaatctgttttttattttttttcacctcctccagattgctttatatggtaaaagactaaaaggtagtagggaattacttaggtaataaataaaaaccggagtattgatcatatatgccttgctgctgtgtagcatactgacattttttttaaaaaaaacgagtagcatactgacaataataccatgtacttgctctgaagtctgaaccatgcacacacatacagacaataatagcatgtactacgagtagtagtaattgtatttgctcgccccatcacaaaaaaggaggagaaaatgatggcattgtgttggtcattcatcggctgcaggctgcgatggtgtgcgtggtggacgcgtacctgaagctggggccggcgctgctgccgtacctggagggcctggacagcgcgcagctgcagctgataaccacccacgccagccgtctgtcccaggcaagattgattgcgtcggacggctgacgcagcggggcacgccggacgggccggccggccgaggatgttccggggcagagcagcgtgcgtcgtcgtcgtcggcgtaccacccgctcctccttataacgcccgtgcgcgccccggaaggaggaggaggaggaggaggaggaggaggaggaagaagaagaacgatgccctgctgtgactactgcgctcccaatttatgagcatacagtagaccgcactgcgctgcggacggaagtgtactgcgagcagcaatggctgcgcctggtttttcttcttcttgtggcttgtatttagagatatatagagagagagagagcgtgtgctatgcgtgcggctgttgtcatttaagggcttgttcggttatttctatcccatgtggattggatgtgattggaaaaaaattgtgaaagattttgacttgtttgggattgaaatccatccattcccacccaatccacatggattgagagcaaaacgaacaagccctaaagtgggaagtaaagggtgaacagtcagtcggttatgaaatactgcagcgatggatttgaatcaaaaaagaagaaggttctgtgtgctggaacctggactggattggatgctactcctgtagatacaacaggttggtgatctggtctatggagatcgagagcagcagaggctgcatgtgcaccgcaatccctgccgtgccgtatggcgtcggctttggttggcttggctgcccagtgcccagtgcagtgcatgaatgaggaaggaagcggacgaacctgcgccggtgccgtgccctgtccacccggagactggacgatatagaaagagagatggagagtgcaccgggggatggcatgatggggtggcagaagggcgaagagaaggccgccggcggcaatcatcgagcggagcggagtccatcaggtcggtcgaatccaagcccaagtccagttcagccagctggcacacgtgggcgatgaagcaacaccgtgactgtgagcgtcacgtcacgccaaatggccagttgcaggagaagaagattagtgcagtacgtagtatacgtaacgtaatcgaggagaacaacaccggtatagaaagaaagaggagaagcgggtgcctgcctaccgcggcccattaatggtgcttcacgtgacctgccacgcccccacctccggccccccctaccctactgtgcacggtggctacaccactactactactaggcagccgagctcctcgcctcgctctcgctctcgctcctccaccttccctcccttgggtccgtccgtttgccgtgcgccattgcccattgcccattgcgccctgcgccccctcccttggccaagttgccatttgccttccctttccctccgcatcggcccatcccagtatcctaccctccccctcccactcacggcagctgccattgtcgccctgtctgcccccctccacgctctccctatccaccacagcacagcacagcacagcgccacgcacgatctcgccggtgccaccgtgctcccccaccttcaaatgtcgggcctccttccaccggcgccccgcggcacggagcactgagcgcagtccggtccggcgctgccccactgcgacaaggaggacgggcaagcgccgccagccgcgcggggcctccgctctgctcaccctcgccgcgggggagacacacggggtaggtgcggagaggacgctagatccgcgcgcccgaccgtccccgccgcctcccaccggccaccgcaccgccgccgccggcggttccctcgtcgtcgcgcgccagcgcagctgctgcagtgcaggaagggacggtgtgaatgaaaggcgctcaggataaaaggcacagaaagaagcaggacctccaggttctcgggcccttcccgggatgcctggggaggatgatcaacatgttagacctcagcaatggcgtggttgctaccaagatgctcactgagaaggcgcatagagatgtttctccggccggaaaagaccggagtaatactttcaagatggcaattaatcccccagctcagactgaagataaacaaagggatagtcagacaagaaggaatttccctactaaaaggtcaaactcgcctactaaaaggactggtgcgatgcctgttaaaatgctgatggagcaggacatgtggaaagaaagacggcctgatgaggagccactgaatgttgttgcaagattaatgggcctacatgagcctccaggtcagcaatccaatttccctttaggaagacaattggataagaaatatcagtgtggtggttttgaagagaactactggaatctcaagtcaaagaaggaaagcaaatgccaccaaaaccaaaaggcagggccacgccatcagcacacttggaatggttctggtgaccaaccatcaagaatcagtagcagccagagcatgcaccaagaaaatgagacttgtgagaagaggatgtcaattgttcgcgagaagtttgctgaagcaaagcgactagccacagatgagaaacttcttcattcgaaggagttccaagatgcactgcagtttttaagctcaaatagagacctattcttggagttccttgacgagccaaatcctctattatcaagcaaccgttatgagttccaacctgttgcaccaccttctgaagtaaagcaaataaccatactgaagccatcagaaccagcaaagagaaaagacagcatctttgtggggagacaactgttttcagatggagatggaggtgaaagtgaacgaaacagatacaggcgccatcagagttcggatgtttccccagcaaattcaaatttgtctgagccaacaaaaattgtagtactaaaaccaggattccccagttctcatgactccaggattgcgaggtcttcattatcatcagcagaagacagtgaagatgaaagtatgatggcggttgatgaaaccatgtgctcaagaaggttggcaaaggagatcacttggcaagaagaagattttagagagattgtctatggtatcatcaacagtcaatattgaggaagaaatggaaggtcgcagaagtacaggcacacttggtgacatgctcacaatatcgaaagtcaaggaccaggaagaaattggggctgaaacactggggagcccagcacctgagctggaacctgaggagcctttctcatgtttgccaagatctcgatcccttccactttctttgtcctatggagtcgctgagtcaaatggaataacctctggcactcatgaagctgaaaaggaaagaatcaggaagtcgtcatcgtttagggaaaaagtttctagcctgttctctaaaaataagaaatcaaccagggagaaggtagatccatctgtgagcaatagactcaaacatggaggggctgtgactactggtgatgtgaaggaaatctgcaaccatcttgccctagacaatcttcagaaacaacatacttgtctaaacacagatgagaagaacactgtgcaaggactcgtgactagttcttgtgagaccaatagtgcagctgatatccctgccaaggatatttcctccatttcaagtcttggtgtcccaggaatctttggtggccttcaggatgaacctagtcctgtatctgtactagatggaccgtttatatgtgataacaataggaggctactgtactcatctgaaaatttcatcacttcatccccacaagctttgtcaaggtctcccctgatcggatcattttcacggtcactgtcatgggaggatcccccgctggaagtcatgtcgccgaattcgttgagactctcaaggcttttctcgaaggctgatgaagatctagattcactgacgtttatccagaagctggtccactctcgaggcacgggtcgagaaagttgcatattagctgaccctttggacccgagtttgctcgagaagatttcggattacgaagaagatggaattaagtttgggaaaaggcggcccaaacagaggctccttttcgacgccgtaaacgaagcgctcatcgagcttgcttcgatggcggaactggctgcgtacccctggggtagatcatgctcttcggagcacggggattgcaagaacggttccagcagtaattctgcggctgaggaaatctggcgggtcattaggaactggtcgatacttgagaagtaccctcccggtgaagctattgaaagaaatctcttgctggagatgatactaaagagggaggtggcggaggcagccagcgctgacacgactcggttagagacgtttgatctcaacaccacggtctgcgccatggtcttggatggcctggttgaagagacagttgtagatctgactaactactgctagtgagttctcagaagaaggaaaagaagggtacagatgtaaacgaggagtgctgagaaagatgcatgcgtgctcttcttcatccttggtccgcctgcctttgctttgcagtgtctcttgctgctgccgtttgctgggtgttttgtagtgcagtgcttggccattgccatggaagtatggaagcccgtcttaaagactgaaggctagaagcagtataagtcggtatggattaaaaccaagtgaacgttcgagcagccgccaatttgctgtaggtcttctgcggaatgatctgacgaatggatgaatgattgccatgaaccgcttgcacgttttgctcttggtagtggtactgctaccctgtcctgtagttggctgtgtgttgttggttcttctcgttcagatccctgtacagtgactggctgacagttttgaattggggctgccatgccactgccaccttctacggcggatgcgtgctttctcaccgatccttgaagcatgaatgcgtacattaactaatttgatctggtgattgcttgtttgatctggcatgcaacgttaactaatttgaccaagtaaaagggtcctcgatcctcctcaaagcaagctactgccatggcaggaggggtgggccactgctaaactactatttaaaatagttacaatttttatttttaggaaaaaatatttatagaagtaaaataatgattcaggtttttttgttgttgttggtcgtctaccccagcaataatgattcagaaattt

SEQ ID NO: 51879 - DNA, 3176 bp, Zea Mays
cccccccccccccccggggtgccggcggccgaaatgtgatgatgagttcttgtggcgtccgcccatcatcatagttccctgtcgtccttggcccatttgttcctgtcctcgggggagcgaggcgtcggggctcgcgcgcttcacgtgttgattcctcgctcccgcacactgcctcctcgtcggatttcgtggaagggacggtgtgaatgaaaggcgctcaggataaaaggcacagaaagaagcaggacctccaggttctcgggcccttcccgggatgcctggggaggatgatcaacatgttagacctcagcaatggcgtggttgctaccaagatgctcactgagaaggcgcatagagatgtttctccggccggaaaagaccggagtaatactttcaagatggcaattaatcccccagctcagactgaagataaacaaagggatagtcagacaagaaggaatttccctactaaaaggtcaaactcgcctactaaaaggactggtgcgatgcctgttaaaatgctgatggagcaggacatgtggaaagaaagacggcctgatgaggagccactgaatgttgttgcaagattaatgggcctacatgagcctccaggtcagcaatccaatttccctttaggaagacaattggataagaaatatcagtgtggtggttttgaagagaactactggaatctcaagtcaaagaaggaaagcaaatgccaccaaaaccaaaaggcagggccacgccatcagcacacttggaatggttctggtgaccaaccatcaagaatcagtagcagccagagcatgcaccaagaaaatgagacttgtgagaagaggatgtcaattgttcgcgagaagtttgctgaagcaaagcgactagccacagatgagaaacttcttcattcgaaggagttccaagatgcactgcagtttttaagctcaaatagagacctattcttggagttccttgacgagccaaatcctctattatcaagcaaccgttatgagttccaacctgttgcaccaccttctgaagtaaagcaaataaccatactgaagccatcagaaccagcaaagagaaaagacagcatctttgtggggagacaactgttttcagatggagatggaggtgaaagtgaacgaaacagatacaggcgccatcagagttcggatgtttccccagcaaattcaaatttgtctgagccaacaaaaattgtagtactaaaaccaggattccccagttctcatgactccaggattgcgaggtcttcattatcatcagcagaagacagtgaagatgaaagtatgatggcggttgatgaaaccatgtgctcaagaaggttggcaaaggagatcacttggcagatgaggatgcggctaaaagacaggcaagacgaagagagtatgctctcatgtgaataccctgacttttatatcggagatgactccttcagtaaatcagaagttgagattccaaaagagatgtgtggtgaaacaagtggggaattggagtttggcactccgacttctggccgctcttgggattttctgagtagaagtggaagtcctttctctgcgtcatgctctagtcaggcatcccatagaagggagccgtcagtagttagggaaggcaagaagaagattttagagagattgtctatggtatcatcaacagtcaatattgaggaagaaatggaaggtcgcagaagtacaggcacacttggtgacatgctcacaatatcgaaagtcaaggaccaggaagaaattggggctgaaacactggggagcccagcacctgagctggaacctgaggagcctttctcatgtttgccaagatctcgatcccttccactttctttgtcctatggagtcgctgagtcaaatggaataacctctggcactcatgaagctgaaaaggaaagaatcaggaagtcgtcatcgtttagggaaaaagtttctagcctgttctctaaaaataagaaatcaaccagggagaaggtagatccatctgtgagcaatagactcaaacatggaggggctgtgactactggtgatgtgaaggaaatctgcaaccatcttgccctagacaatcttcagaaacaacatacttgtctaaacacagatgagaagaacactgtgcaaggactcgtgactagttcttgtgagaccaatagtgcagctgatatccctgccaaggatatttcctccatttcaagtcttggtgtcccaggaatctttggtggccttcaggatgaacctagtcctgtatctgtactagatggaccgtttatatgtgataacaataggaggctactgtactcatctgaaaatttcatcacttcatccccacctttgtcaaggtctcccctgatcggatcattttcacggtcactgtcatgggaggatcccccgctggaagtcatgtcgccgaattcgttgagactctcaaggcttttctcgaaggctgatgaagatctagattcactgacgtttatccagaagctggtccactctcgaggcacgggtcgagaaagttgcatattagctgaccctttggacccgagtttgctcgagaagatttcggattacgaagaagatggaattaagtttgggaaaaggcggcccaaacagaggctccttttcgacgccgtaaacgaagcgctcatcgagcttgcttcgatggcggaactggctgcgtacccctggggtagatcatgctcttcggagcacggggattgcaagaacggttccagcagtaattctgcggctgaggaaatctggcgggtcattaggaactggtcgatacttgagaagtaccctcccggtgaagctattgaaagaaatctcttgctggagatgatactaaagagggaggtggcggaggcagccagcgctgacacgactcggttagagacgtttgatctcaacaccacggtctgcgccatggtcttggatggcctggttgaagagacagttgtagatctgactaactactgctagtgaggtacctctgccctctaactaataatctcgcgctctgctccctagtgttggtgtttggtgtgatacttgctgccgtaacactgctccatgctattactcgctcaaatgtgatgccaaataaatgggtctctacgttgtttacgtttctgttttgatctcttctaccgtggt

SEQ ID NO: 51880 - DNA, 3252 bp, Zea Mays
cccccccccccccccggggtgccggcggccgaaatgtgatgatgagttcttgtggcgtccgcccatcatcatagttccctgtcgtccttggcccatttgttcctgtcctcgggggagcgaggcgtcggggctcgcgcgcttcacgtgttgattcctcgctcccgcacactgcctcctcgtcggatttcgtggtgcggatgccgctttttggacgcagctgatcagttgttgctttttgttccgttctagcgctcctgccttgtcccggaagggacggtgtgaatgaaaggcgctcaggataaaaggcacagaaagaagcaggacctccaggttctcgggcccttcccgggatgcctggggaggatgatcaacatgttagacctcagcaatggcgtggttgctaccaagatgctcactgagaaggcgcatagagatgtttctccggccggaaaagaccggagtaatactttcaagatggcaattaatcccccagctcagactgaagataaacaaagggatagtcagacaagaaggaatttccctactaaaaggtcaaactcgcctactaaaaggactggtgcgatgcctgttaaaatgctgatggagcaggacatgtggaaagaaagacggcctgatgaggagccactgaatgttgttgcaagattaatgggcctacatgagcctccaggtcagcaatccaatttccctttaggaagacaattggataagaaatatcagtgtggtggttttgaagagaactactggaatctcaagtcaaagaaggaaagcaaatgccaccaaaaccaaaaggcagggccacgccatcagcacacttggaatggttctggtgaccaaccatcaagaatcagtagcagccagagcatgcaccaagaaaatgagacttgtgagaagaggatgtcaattgttcgcgagaagtttgctgaagcaaagcgactagccacagatgagaaacttcttcattcgaaggagttccaagatgcactgcagtttttaagctcaaatagagacctattcttggagttccttgacgagccaaatcctctattatcaagcaaccgttatgagttccaacctgttgcaccaccttctgaagtaaagcaaataaccatactgaagccatcagaaccagcaaagagaaaagacagcatctttgtggggagacaactgttttcagatggagatggaggtgaaagtgaacgaaacagatacaggcgccatcagagttcggatgtttccccagcaaattcaaatttgtctgagccaacaaaaattgtagtactaaaaccaggattccccagttctcatgactccaggattgcgaggtcttcattatcatcagcagaagacagtgaagatgaaagtatgatggcggttgatgaaaccatgtgctcaagaaggttggcaaaggagatcacttggcagatgaggatgcggctaaaagacaggcaagacgaagagagtatgctctcatgtgaataccctgacttttatatcggagatgactccttcagtaaatcagaagttgagattccaaaagagatgtgtggtgaaacaagtggggaattggagtttggcactccgacttctggccgctcttgggattttctgagtagaagtggaagtcctttctctgcgtcatgctctagtcaggcatcccatagaagggagccgtcagtagttagggaaggcaagaagaagattttagagagattgtctatggtatcatcaacagtcaatattgaggaagaaatggaaggtcgcagaagtacaggcacacttggtgacatgctcacaatatcgaaagtcaaggaccaggaagaaattggggctgaaacactggggagcccagcacctgagctggaacctgaggagcctttctcatgtttgccaagatctcgatcccttccactttctttgtcctatggagtcgctgagtcaaatggaataacctctggcactcatgaagctgaaaaggaaagaatcaggaagtcgtcatcgtttagggaaaaagtttctagcctgttctctaaaaataagaaatcaaccagggagaaggtagatccatctgtgagcaatagactcaaacatggaggggctgtgactactggtgatgtgaaggaaatctgcaaccatcttgccctagacaatcttcagaaacaacatacttgtctaaacacagatgagaagaacactgtgcaaggactcgtgactagttcttgtgagaccaatagtgcagctgatatccctgccaaggatatttcctccatttcaagtcttggtgtcccaggaatctttggtggccttcaggatgaacctagtcctgtatctgtactagatggaccgtttatatgtgataacaataggaggctactgtactcatctgaaaatttcatcacttcatccccacctttgtcaaggtctcccctgatcggatcattttcacggtcactgtcatgggaggatcccccgctggaagtcatgtcgccgaattcgttgagactctcaaggcttttctcgaaggctgatgaagatctagattcactgacgtttatccagaagctggtccactctcgaggcacgggtcgagaaagttgcatattagctgaccctttggacccgagtttgctcgagaagatttcggattacgaagaagatggaattaagtttgggaaaaggcggcccaaacagaggctccttttcgacgccgtaaacgaagcgctcatcgagcttgcttcgatggcggaactggctgcgtacccctggggtagatcatgctcttcggagcacggggattgcaagaacggttccagcagtaattctgcggctgaggaaatctggcgggtcattaggaactggtcgatacttgagaagtaccctcccggtgaagctattgaaagaaatctcttgctggagatgatactaaagagggaggtggcggaggcagccagcgctgacacgactcggttagagacgtttgatctcaacaccacggtctgcgccatggtcttggatggcctggttgaagagacagttgtagatctgactaactactgctagtgaggtacctctgccctctaactaataatctcgcgctctgctccctagtgttggtgtttggtgtgatacttgctgccgtaacactgctccatgctattactcgctcaaatgtgatgccaaataaatgggtctctacgttgtttacgtttctgttttgatctcttctaccgtggt

SEQ ID NO: 51881 - DNA, 3767 bp, Zea Mays
cccccccccccccccggggtgccggcggccgaaatgtgatgatgagttcttgtggcgtccgcccatcatcatagttccctgtcgtccttggcccatttgttcctgtcctcgggggagcgaggcgtcggggctcgcgcgcttcacgtgttgattcctcgctcccgcacactgcctcctcgtcggatttcgtggaagggacggtgtgaatgaaaggcgctcaggataaaaggcacagaaagaagcaggacctccaggttctcgggcccttcccgggatgcctggggaggatgatcaacatgttagacctcagcaatggcgtggttgctaccaagatgctcactgagaaggcgcatagagatgtttctccggccggaaaagaccggagtaatactttcaagatggcaattaatcccccagctcagactgaagataaacaaagggatagtcagacaagaaggaatttccctactaaaaggtcaaactcgcctactaaaaggactggtgcgatgcctgttaaaatgctgatggagcaggacatgtggaaagaaagacggcctgatgaggagccactgaatgttgttgcaagattaatgggcctacatgagcctccaggtcagcaatccaatttccctttaggaagacaattggataagaaatatcagtgtggtggttttgaagagaactactggaatctcaagtcaaagaaggaaagcaaatgccaccaaaaccaaaaggcagggccacgccatcagcacacttggaatggttctggtgaccaaccatcaagaatcagtagcagccagagcatgcaccaagaaaatgagacttgtgagaagaggatgtcaattgttcgcgagaagtttgctgaagcaaagcgactagccacagatgagaaacttcttcattcgaaggagttccaagatgcactgcagtttttaagctcaaatagagacctattcttggagttccttgacgagccaaatcctctattatcaagcaaccgttatgagttccaacctgttgcaccaccttctgaagtaaagcaaataaccatactgaagccatcagaaccagcaaagagaaaagacagcatctttgtggggagacaactgttttcagatggagatggaggtgaaagtgaacgaaacagatacaggcgccatcagagttcggatgtttccccagcaaattcaaatttgtctgagccaacaaaaattgtagtactaaaaccaggattccccagttctcatgactccaggattgcgaggtcttcattatcatcagcagaagacagtgaagatgaaagtatgatggcggttgatgaaaccatgtgctcaagaaggttggcaaaggagatcacttggcagatgaggatgcggctaaaagacaggcaagacgaagagagtatgctctcatgtgaataccctgacttttatatcggagatgactccttcagtaaatcagaagttgagattccaaaagagatgtgtggtgaaacaagtggggaattggagtttggcactccgacttctggccgctcttgggattttctgagtagaagtggaagtcctttctctgcgtcatgctctagtcaggcatcccatagaagggagccgtcagtagttagggaaggcaagaagaagattttagagagattgtctatggtatcatcaacagtcaatattgaggaagaaatggaaggtcgcagaagtacaggcacacttggtgacatgctcacaatatcgaaagtcaaggaccaggaagaaattggggctgaaacactggggagcccagcacctgagctggaacctgaggagcctttctcatgtttgccaagatctcgatcccttccactttctttgtcctatggagtcgctgagtcaaatggaataacctctggcactcatgaagctgaaaaggaaagaatcaggaagtcgtcatcgtttagggaaaaagtttctagcctgttctctaaaaataagaaatcaaccagggagaaggtagatccatctgtgagcaatagactcaaacatggaggggctgtgactactggtgatgtgaaggaaatctgcaaccatcttgccctagacaatcttcagaaacaacatacttgtctaaacacagatgagaagaacactgtgcaaggactcgtgactagttcttgtgagaccaatagtgcagctgatatccctgccaaggatatttcctccatttcaagtcttggtgtcccaggaatctttggtggccttcaggatgaacctagtcctgtatctgtactagatggaccgtttatatgtgataacaataggaggctactgtactcatctgaaaatttcatcacttcatccccacaagctttgtcaaggtctcccctgatcggatcattttcacggtcactgtcatgggaggatcccccgctggaagtcatgtcgccgaattcgttgagactctcaaggcttttctcgaaggctgatgaagatctagattcactgacgtttatccagaagctggtccactctcgaggcacgggtcgagaaagttgcatattagctgaccctttggacccgagtttgctcgagaagatttcggattacgaagaagatggaattaagtttgggaaaaggcggcccaaacagaggctccttttcgacgccgtaaacgaagcgctcatcgagcttgcttcgatggcggaactggctgcgtacccctggggtagatcatgctcttcggagcacggggattgcaagaacggttccagcagtaattctgcggctgaggaaatctggcgggtcattaggaactggtcgatacttgagaagtaccctcccggtgaagctattgaaagaaatctcttgctggagatgatactaaagagggaggtggcggaggcagccagcgctgacacgactcggttagagacgtttgatctcaacaccacggtctgcgccatggtcttggatggcctggttgaagagacagttgtagatctgactaactactgctagtgagttctcagaagaaggaaaagaagggtacagatgtaaacgaggagtgctgagaaagatgcatgcgtgctcttcttcatccttggtccgcctgcctttgctttgcagtgtctcttgctgctgccgtttgctgggtgttttgtagtgcagtgcttggccattgccatggaagtatggaagcccgtcttaaagactgaaggctagaagcagtataagtcggtatggattaaaaccaagtgaacgttcgagcagccgccaatttgctgtaggtcttctgcggaatgatctgacgaatggatgaatgattgccatgaaccgcttgcacgttttgctcttggtagtggtactgctaccctgtcctgtagttggctgtgtgttgttggttcttctcgttcagatccctgtacagtgactggctgacagttttgaattggggctgccatgccactgccaccttctacggcggatgcgtgctttctcaccgatccttgaagcatgaatgcgtacattaactaatttgatctggtgattgcttgtttgatctggcatgcaacgttaactaatttgaccaagtaaaagggtcctcgatcctcctcaaagcaagctactgccatggcaggaggggtgggccactgctaaactactatttaaaatagttacaatttttatttttaggaaaaaatatttatagaagtaaaataatgattcaggtttttttgttgttgttggtcgtctaccccagcaataatgattcagaaattt

SEQ ID NO: 51882 - DNA, 937 bp, Zea Mays
ctcgctcctcgcaagttgccactgtttgtggtctgatgtctgaagaaaacacagcagtgggtctcggctctcttgttctctagctaggggccctcttgcctctccagttaaacaattcaacggtagctgtagttgttgcgagcacgggggactgaactgactgtgtgggtgacagcaggttctcagaagaaggaaaagaagggtacagatgtaaacgaggagtgctgagaaagatgcatgcgtgctcttcttcatccttggtccgcctgcctttgctttgcagtgtctcttgctgctgccgtttgctgggtgttttgtagtgcagtgcttggccattgccatggaagtatggaagcccgtcttaaagactgaaggctagaagcagtataagtcggtatggattaaaaccaagtgaacgttcgagcagccgccaatttgctgtaggtcttctgcggaatgatctgacgaatggatgaatgattgccatgaaccgcttgcacgttttgctcttggtagtggtactgctaccctgtcctgtagttggctgtgtgttgttggttcttctcgttcagatccctgtacagtgactggctgacagttttgaattggggctgccatgccactgccaccttctacggcggatgcgtgctttctcaccgatccttgaagcatgaatgcgtacattaactaatttgatctggtgattgcttgtttgatctggcatgcaacgttaactaatttgaccaagtaaaagggtcctcgatcctcctcaaagcaagctactgccatggcaggaggggtgggccactgctaaactactatttaaaatagttacaatttttatttttaggaaaaaatatttatagaagtaaaataatgattcaggtttttttgttgttgttggtcgtctaccccagcaataatgattcagaaattt

SEQ ID NO: 51883 - DNA, 1921 bp, Zea Mays
gacggctgcaagtgggcctaggcccagtaacgtgtgtgactgggatgggccacggcccacagaccggcagatccggacgcccccaaggccctcccaaccctaccattcctttctctccctctcgccgtcgtcgccacctccacttggccccgctcatcgcctcctccgacgaccaccgtccaccggcgacaaggacagcgacgatgcagtcggcggcgtggaggcgtcacctcctcgaccaccacctctccccttcaacctcggctgccatcgccgccttcagatccgcctcccagcccgggctcgctccccaagggttgtttggagcggatggcgcaagatgcatgtctgcgagggcgccggcggtcaaggggtccgggcatctcgtccgcaagggcaccggagggaggtcttctgtgagtggaattgtagccacggtgtttggagctactgggtttcttgggcgctatcttgtgcaacaacttgccaagatggggtctcaagtgcttgtcccattcagaggttgtgaggattctcctcgccacctgaagattatgggtgacttgggtcagattgtgcccatgaaataccatccgagagatgttgattcaattaaggctgttatggccaagtcaaatgtggttattaacctcataggacgagagtatgaaacaaggaactacagcttcgaagaagtaaaccaccatatgcctgaacagcttgcaacaattgctaaggagcatgggggtatcataagatttatccaggtttcttgcctaggggcgtcaccgtcttctgaatctagaatgttgaggacaaaagctgcaggagagcaatcagtcttcaaagaattccctgaggctacaatcatgaggcctgctaccatgattggcacagaagatcgaatcctgaacagatgggcacaatttgcaaagaattggggtttcctcccgcttgttggtggtggatctactaagattcagcctgtgtatgtaatcgatgttgctgctgctattgtgaactccctgaaggatgacggcactagcatgggaaagatatatgaacttgggggccctgaaatttacactgtccatgagctggctgagctgatgtacgagacaatccgcgaatggccaagatatgtcaatgtccctcttcctgttgcaagggctattgcttccccaagggagatgctgctcaataaagtgccgttcccgcttccaacaccatccattttcaacctagaccaaatcaacgcatttgctgtggacaacctcgtctcggaagatgctctgactttcgaagacctcagcatcatgcctcagaagctgaaagggtacccggtggagtacctggtgtcttacaggaagggcgggccgtcgttcggctcgaccgtgagcgagaagatgaggagctcggagatctgcttccgctctgctctgcgccggaccgaacagaaacgggaagcttgcaagctgctctggactgtctcccaacaaccaagctgactgtctgacgaaatctgatgtggcctctctggttttacgcaaggatcaaggccaacctgaagtggacttggcagcgtgcgtgtttttttttaaccagcaaagatcagcagtggcgccatcacgggagaaggatgtgccaccacctcccggagtaccggtagagtggcgaagaaaatagaccagcagagccgcaatcacgcagtgatcacatccgtctctgctgatgtgctgctatggttctggttaccggagccatcagtcacgcagctgtcctgccgctgaatctgatgtgatgcgtcaacagaagcaggtaccacggcggtgttggtatccattttcagtttccgttccgggcacgtttgtctgtttgtttgatctactaccatcgcattgaatgaaaattctgtctgagt

SEQ ID NO: 51884 - DNA, 2193 bp, Zea Mays
gacggctgcaagtgggcctaggcccagtaacgtgtgtgactgggatgggccacggcccacagaccggcagatccggacgcccccaaggccctcccaaccctaccattcctttctctccctctcgccgtcgtcgccacctccacttggccccgctcatcgcctcctccgacgaccaccgtccaccggcgacaaggacagcgacgatgcagtcggcggcgtggaggcgtcacctcctcgaccaccacctctccccttcaacctcggctgccatcgccgccttcagatccgcctcccagcccgggctcgctccccaagggttgtttggagcggatggcgcaagatgcatgtctgcgagggcgccggcggtcaaggggtccgggcatctcgtccgcaagggcaccggagggaggtcttctgtgagtggaattgtagccacggtgtttggagctactgggtttcttgggcgctatcttgtgcaacaacttgccaagatggggtctcaagtgcttgtcccattcagaggttgtgaggattctcctcgccacctgaagattatgggtgacttgggtcagattgtgcccatgaaataccatccgagagatgttgattcaattaaggctgttatggccaagtcaaatgtggttattaacctcataggacgagagtatgaaacaaggaactacagcttcgaagaagtaaaccaccatatgcctgaacagcttgcaacagtttcttgcctaggggcgtcaccgtcttctgaatctagaatgttgaggacaaaagctgcaggagagcaatcagtcttcaaagaattccctgaggctacaatcatgaggcctgctaccatgattggcacagaagatcgaatcctgaacagatgggcacaatttgcaaagaattggggtttcctcccgcttgttggtggtggatctactaagattcagcctgtgtatgtaatcgatgttgctgctgctattgtgaactccctgaaggatgacggcactagcatgggaaagatatatgaacttgggggccctgaaatttacactgtccatgagctggctgagctgatgtacgagacaatccgcgaatggccaagatatgtcaatgtccctcttcctgttgcaagggctattgcttccccaagggagatgctgctcaataaagtgccgttcccgcttccaacaccatccattttcaacctagaccaaatcaacgcatttgctgtggacaacctcgtctcggaagatgctctgactttcgaagacctcagcatcatgcctcagaagctgaaagggtacccggtggagtacctggtgtcttacaggaagggcgggccgtcgttcggctcgaccgtgagcgagaagatgaggagctcggagatgtagggagcctcgtaccacctccgaagatactgtagattcctatgatcatttggctgcattgttccggccacctgacgccgtctcgccggttggagcagcaggaccaaattcccttgcgtggctcctgctctttgccttgtttgtttgtacgccaataaggacccaaatttccgtgcatgtgaagagaagaaagaatcgttccacagttttacactgaggggtttttttcgtacacagcatgatacaatataacccttgtttctggattcatacattgttcgttctgcccaaatgtctctgcatgttgcagctgcttccgctctgctctgcgccggaccgaacagaaacgggaagcttgcaagctgctctggactgtctcccaacaaccaagctgactgtctgacgaaatctgatgtggcctctctggttttacgcaaggatcaaggccaacctgaagtggacttggcagcgtgcgtgtttttttttaaccagcaaagatcagcagtggcgccatcacgggagaaggatgtgccaccacctcccggagtaccggtagagtggcgaagaaaatagaccagcagagccgcaatcacgcagtgatcacatccgtctctgctgatgtgctgctatggttctggttaccggagccatcagtcacgcagctgtcctgccgctgaatctgatgtgatgcgtcaacagaagcaggtaccacggcggtgttggtatccattttcagtttccgttccgggcacgtttgtctgtttgtttgatctactaccatcgcattgaatgaaaattctgtctgagt

SEQ ID NO: 51885 - DNA, 2210 bp, Zea Mays
gacggctgcaagtgggcctaggcccagtaacgtgtgtgactgggatgggccacggcccacagaccggcagatccggacgcccccaaggccctcccaaccctaccattcctttctctccctctcgccgtcgtcgccacctccacttggccccgctcatcgcctcctccgacgaccaccgtccaccggcgacaaggacagcgacgatgcagtcggcggcgtggaggcgtcacctcctcgaccaccacctctccccttcaacctcggctgccatcgccgccttcagatccgcctcccagcccgggctcgctccccaagggttgtttggagcggatggcgcaagatgcatgtctgcgagggcgccggcggtcaaggggtccgggcatctcgtccgcaagggcaccggagggaggtcttctgtgagtggaattgtagccacggtgtttggagctactgggtttcttgggcgctatcttgtgcaacaacttgccaagatggggtctcaagtgcttgtcccattcagaggttgtgaggattctcctcgccacctgaagattatgggtgacttgggtcagattgtgcccatgaaataccatccgagagatgttgattcaattaaggctgttatggccaagtcaaatgtggttattaacctcataggacgagagtatgaaacaaggaactacagcttcgaagaagtaaaccaccatatgcctgaacagcttgcaacaattgctaaggagcatgggggtatcataagatttatccaggtttcttgcctaggggcgtcaccgtcttctgaatctagaatgttgaggacaaaagctgcaggagagcaatcagtcttcaaagaattccctgaggctacaatcatgaggcctgctaccatgattggcacagaagatcgaatcctgaacagatgggcacaatttgcaaagaattggggtttcctcccgcttgttggtggtggatctactaagattcagcctgtgtatgtaatcgatgttgctgctgctattgtgaactccctgaaggatgacggcactagcatgggaaagatatatgaacttgggggccctgaaatttacactgtccatgagctggctgagctgatgtacgagacaatccgcgaatggccaagatatgtcaatgtccctcttcctgttgcaagggctattgcttccccaagggagatgctgctcaataaagtgccgttcccgcttccaacaccatccattttcaacctagaccaaatcaacgcatttgctgtggacaacctcgtctcggaagatgcatcatgcctcagaagctgaaagggtacccggtggagtacctggtgtcttacaggaagggcgggccgtcgttcggctcgaccgtgagcgagaagatgaggagctcggagatgtagggagcctcgtaccacctccgaagatactgtagattcctatgatcatttggctgcattgttccggccacctgacgccgtctcgccggttggagcagcaggaccaaattcccttgcgtggctcctgctctttgccttgtttgtttgtacgccaataaggacccaaatttccgtgcatgtgaagagaagaaagaatcgttccacagttttacactgaggggtttttttcgtacacagcatgatacaatataacccttgtttctggattcatacattgttcgttctgcccaaatgtctctgcatgttgcagctgcttccgctctgctctgcgccggaccgaacagaaacgggaagcttgcaagctgctctggactgtctcccaacaaccaagctgactgtctgacgaaatctgatgtggcctctctggttttacgcaaggatcaaggccaacctgaagtggacttggcagcgtgcgtgtttttttttaaccagcaaagatcagcagtggcgccatcacgggagaaggatgtgccaccacctcccggagtaccggtagagtggcgaagaaaatagaccagcagagccgcaatcacgcagtgatcacatccgtctctgctgatgtgctgctatggttctggttaccggagccatcagtcacgcagctgtcctgccgctgaatctgatgtgatgcgtcaacagaagcaggtaccacggcggtgttggtatccattttcagtttccgttccgggcacgtttgtctgtttgtttgatctactaccatcgcattgaatgaaaattctgtctgagt

SEQ ID NO: 51886 - DNA, 1520 bp, Zea Mays
cacgtaggacgccggctgaaatgggggaaggggagaaagggaaaaccccaaaagacccgggcgaaacggcgcagtagcgaggaagtaaacgcggcggagcggaggaagcaaaaggagacgggaggaaagaagaaaagaaagcgtctccttcgacgcagctgtgttcccttcccttctccccctacctcgtctccgcccgagtggaaggaaaccaaaccatcgtggtcgtggagtggaagtggaacaaacaaacgcacgggcgcgcgccccctccctcctccatcttgcgcatcgccgctacctcggaggcgtgaagcctctcctccactctccggcgcagcagccgtcgccgcctccgtcccctgccgcgggccgccgagatccgcccgggcttgggctgttctgctgtgatggcggcgcaagcttccattgcggcgggatcccaagtttgggtcgaggaccccggtgtcgcttggatcgacggggaggttgtaaaagtcaatggagacacggttacggtcagatgttccaatgataagacggttacggtgaaagcgtctaatgttcatgctaaggatcccgaggaagcgccatgcggagtcgatgacatgacaaagcttgcctatctgcacgaacccggggttcttcagaatctgaaagctagatatgacatgaatgaaatttatacatatactgggaatattttgattgctgtaaatcccttccgaagactgccccatctgtatgatactcagatgatgcagcaatataaaggggcagaatttggtgaattaagccctcatccttttgccgttgcggatgttgcatatagattgatgcgcaatgaaggtataagccagtcgattcttgttagtggagaaagtggtgctggtaaaacggaaagcaccaagatgatcatgcgatatcttgcttacatgggtgggaaggctgcttccgaagggcgaactgtggagaagcaagtccttcagtccaatcctgttcttgaagcatttggaaatgcaaagactgtcaggaacaataactcaagtcgtttcggtaaatttgttgagatccagtttgatcagaaagggaaaatatcaggagctgctgtaagaacttatcttcttgagagatcccgtgtctgtcaaatatctgacccagaaagaaattaccattgtttctacatgatatgtgctgcccctcctgaggagcgtgagagatacaaactcggagatcccagcacatttcactaccttaatcagtccaactgcattaagcttgaaggcctcgatgaatctaaagagtaccttgaaaccaggaaggctatggacattatcggaattagttctgaagagcaggaagcaatctttcgggttgttgcggctattctccacttggggaatgtcgagtttgcagaaggggatgatggtgattcatcaaaacccaaagatgaaaaatctctttctcatttgagaacagctgctgagctcttcatgtgtgatgagaaagcttaaaagatc

SEQ ID NO: 51887 - DNA, 4064 bp, Zea Mays
ctgtgtactcacggttgtttgattggcttgtgaataaaatcaacaactctattggccaagaccccaactcgaaatgcttaattggagtgctggatatatatgggtttgaaagcttcaagacaaacagttttgagcagttttgtatcaacctgacaaacgaaaagctccagcaacacttcaatcagcatgtgtttaagatggaacaagaagagtacaccaaagaagaaattaattggagttacattgagttcattgataaccaggatgttcttgatctcattgagaagaaacctggtggaattattgcccttctggatgaagcttgtatgttgccgagatcgacacatgaaacatttgctcagaaattgtatcaaacttacaaaaatcacaagcgctttgctaagccaaaattatctcggtcagacttcaccatatgccattacgctggagatgtcacctatcaaacggaattatttctggacaagaacaaagattatgttgttgctgagcatcaggctttgttgagtgcttcaaaatgtgcatttgtttcaggccttttcccttttctatctgaggattcctcaaaatcttcaaagttttcatccattggttctaggttcaagcaacaattgcaatctctgttggaaactctgagtgcaactgagccacactacatccgctgtgtaaaacccaataatttgttgaagcctgcaatttttgagaaccagaacgttcttcagcaactcagatgtggaggagttatggaggcgattaggatcagttgtgctggatatccgaccagaagaacattctatgaatttatagaccgttttggtattcttgcgcctgatgttttgagtggaagttctgatgaggtcagtgctgtaaggaggttgttggacaagatagatcttcaaggttaccagattggcaagacaaaagtattccttcgtgctggtcagatggctgaacttgatgctcgtagaaatgaagtgctagggcgttcagctagcatgattcagaggaaagtgcgttcattcttggcacagaagaatttcattgcattgcgaagatcagctttacaaatccagacagtttgtcgcggtgaacttgcaagaagagtttatcacaacctccagagagaagctgcttcactcaagatccagactttgtaccgtatgtatactgccagaaaagcgtacaacgaactttctgcttcagcagttaccattcaatcaggattgcgcggcatgtgcgcgcgtaaagagctccacttcagaagacaaacaagagctgcaatcatcatccagagtcgctgccgtcaattcttggcgagattgcattattcaagaacaaagaaagctgcaattactacacagtgtgcgtggagagggaaggctgctagaaaggagctccgcaagctcaaaatggctgcccgggaaactggtgcattgcaagctgccaaaaataaacttgagaaacaagttgaggagctcacgtggcggctacagttggagaagcgcatgcgagctgatctcgaggaaactaaatcacaagaaaatgcaaagttgcaagctgcattgcaggaggtgcaacaacagtacaaagaaacaaaagaaatactagtacaggagagggaagcagccaaaaaggctgcagagatagctccagttattaaagaggtccctgttatagatacagagctaatgaataagcttagagatgaaaatgacaaactgaagactatggtcagttcgcttgaaaagaagatcgatgatactgaaaagaaatatcaagaaacaagcaaaatcagtgaggataggctcaaacaggcaatggatgctgagactaaaatcgttgacttgaacatggcaatgctaaggcttcaagagaaaatatccaccatggaatctgaggagaaagtgcaaagacaagcgcttctaagcacgccagtcaagagcatgtctgaacatttgtcaattccaattgctccaaaggcacatcatttggagaacggctttcatgaggttgaaggacttaaggaaccccaaagtgcacctcctgctattaaggaatatgggaacggtgatcctaagatgaaaaaatctattgttgacagacaacttgaaaacgtggatgcactcattgagtgtgtagggacaaaccttggatactgtgcagggaagccagttgctgctattaccatatacaaatgtcttcttcattggaaatcattcgaggcagataagactagtgtttttgaccgtctcattcagttaataggatctgctatcgaggtaatctggcactggagattttagtcatgacactgaaacttgaaagtaccaaaattgaccattaagaaaataaacaagccatccttttgccctttccgcctttgttgatgaagataagatttactctccgcatggaacaatgcagatgtgtgaaaaatgggcatattataatgtagagatatttttttcccacaccgggaacagtcatcaggggataaattatactgtagatatttaaatcacctatattgtttctccaacctaacacattcatgttactgaagagataagccatgacacgcttaaactgttggtaagcatgtttgtttttaaatttaggctgctgctatttttttatgattttggaagccagtcacagtgcttttgagttttacaagtggcaagtttatttttctgttctttctgcgacactcactttgtccagtgtttgatgcagaacgaggatgacaatgacaaccttgcttactggctctccaatacatctagcttattgttcctactgcagagaagtctcaaggctgctggtgctcctggtagcgtttcacgaaagaaacctcctcaaccaacatcattatttggaagaatggcccaaggcttgcgttctgcatcttttgccaacatgcatgttgaagcgacagatgttgtgcgccaagttgaggccaaatatcctgccttgcttttcaagcagcagctaactgcttatgtggagaagatatatggaatcgtccgagacaatattaaaaaggaattatcatctttgatttcgctatgtatccaggctccaagaacaatgaaagctagcatgctgcgagtttctggacgattatccagtcaatctcagagtcagagcaaccactggcagaaaatcattgagagcttggataagctcttgaagatactgcaagataaccatgtgcctccggttttagctcagaaaatatttacccagatattttcatacattaatgtccagctattcaacagtctattgcttcgtcgtgagtgttgctccttcagcaacggagagtatgttaaggctggtctagctgagttggagctgtggtgtgcaaaggcaacaactgagtatgcagcatcttcatgggatgagctcaagcatatcaggcaggctgttggatttttggttatattccagaagttcagaatatcttatgatgagatagtcaatgacctatgtccgatcttgagtgttcaacaactgtacagaatatgtacacaatactgggatgacaagtataatacccaaagtgtttcatcagacgttcttagtaacatgcgggtgctaatgacagaggattctaacagtgatgaaagcggttcgttcttgttagatgataattcgagcatcccgttctccgtggatgatatcttgtcagatcatttattgatttgttgtatattttttggatcctttctaccacatgtgcctttttttagttatcttatccttttgagctagcttttgtaaaaattcatataggtatttgttagggttgggatgggattccgcccttacagttagaaaaggccttatcttttaaagcggggcaaatgattctttgtagggcaacatgaaatcaatctttttacccaagggtgtggtgagaaggggtagatgcaatgtttgtagcctcccagttatagattgtgtaaattatatactgtaaatcaacagtgcaatggaaaagaaaggaaagctatatagcaagtgcagttatgttgtcatct

SEQ ID NO: 51888 - DNA, 4098 bp, Zea Mays
ctgtgtactcacggttgtttgattggcttgtgaataaaatcaacaactctattggccaagaccccaactcgaaatgcttaattggagtgctggatatatatgggtttgaaagcttcaagacaaacagttttgagcagttttgtatcaacctgacaaacgaaaagctccagcaacacttcaatcagcatgtgtttaagatggaacaagaagagtacaccaaagaagaaattaattggagttacattgagttcattgataaccaggatgttcttgatctcattgagaagaaacctggtggaattattgcccttctggatgaagcttgtatgttgccgagatcgacacatgaaacatttgctcagaaattgtatcaaacttacaaaaatcacaagcgctttgctaagccaaaattatctcggtcagacttcaccatatgccattacgctggagatgtcacctatcaaacggaattatttctggacaagaacaaagattatgttgttgctgagcatcaggctttgttgagtgcttcaaaatgtgcatttgtttcaggccttttcccttttctatctgaggattcctcaaaatcttcaaagttttcatccattggttctaggttcaagcaacaattgcaatctctgttggaaactctgagtgcaactgagccacactacatccgctgtgtaaaacccaataatttgttgaagcctgcaatttttgagaaccagaacgttcttcagcaactcagatgtggaggagttatggaggcgattaggatcagttgtgctggatatccgaccagaagaacattctatgaatttatagaccgttttggtattcttgcgcctgatgttttgagtggaagttctgatgaggtcagtgctgtaaggaggttgttggacaagatagatcttcaaggttaccagattggcaagacaaaagtattccttcgtgctggtcagatggctgaacttgatgctcgtagaaatgaagtgctagggcgttcagctagcatgattcagaggaaagtgcgttcattcttggcacagaagaatttcattgcattgcgaagatcagctttacaaatccagacagtttgtcgcggtgaacttgcaagaagagtttatcacaacctccagagagaagctgcttcactcaagatccagactttgtaccgtatgtatactgccagaaaagcgtacaacgaactttctgcttcagcagttaccattcaatcaggattgcgcggcatgtgcgcgcgtaaagagctccacttcagaagacaaacaagagctgcaatcatcatccagagtcgctgccgtcaattcttggcgagattgcattattcaagaacaaagaaagctgcaattactacacagtgtgcgtggagagggaaggctgctagaaaggagctccgcaagctcaaaatggctgcccgggaaactggtgcattgcaagctgccaaaaataaacttgagaaacaagttgaggagctcacgtggcggctacagttggagaagcgcatgcgagctgatctcgaggaaactaaatcacaagaaaatgcaaagttgcaagctgcattgcaggaggtgcaacaacagtacaaagaaacaaaagaaatactagtacaggagagggaagcagccaaaaaggctgcagagatagctccagttattaaagaggtccctgttatagatacagagctaatgaataagcttagagatgaaaatgacaaactgaagactatggtcagttcgcttgaaaagaagatcgatgatactgaaaagaaatatcaagaaacaagcaaaatcagtgaggataggctcaaacaggcaatggatgctgagactaaaatcgttgacttgaacatggcaatgctaaggcttcaagagaaaatatccaccatggaatctgaggagaaagtgcaaagacaagcgcttctaagcacgccagtcaagagcatgtctgaacatttgtcaattccaattgctccaaaggcacatcatttggagaacggctttcatgaggttgaaggacttaaggaaccccaaagtgcacctcctgctattaaggaatatgggaacggtgatcctaagatgaaaaaatctattgttgacagacaacttgaaaacgtggatgcactcattgagtgtgtagggacaaaccttggatactgtgcagggaagccagttgctgctattaccatatacaaatgtcttcttcattggaaatcattcgaggcagataagactagtgtttttgaccgtctcattcagttaataggatctgctatcgaggtaatctggcactggagattttagtcatgacactgaaacttgaaagtaccaaaattgaccattaagaaaataaacaagccatccttttgccctttccgcctttgttgatgaagataagatttactctccgcatggaacaatgcagatgtgtgaaaaatgggcatattataatgtagagatatttttttcccacaccggtaaaaaactaattttcgttacggtagtaacgaatttacagagttcaaaacataacattcagaccaaatgaagcaaagctgatcaccctgatactgaacacccagggaacagtcatcaggggataaattatactgtagatatttaaatcacctatattgtttctccaacctaacacattcatgttactgaagagataagccatgacacgcttaaactgttggtaagcatgtttgtttttaaatttaggctgctgctatttttttatgattttggaagccagtcacagtgcttttgagttttacaagtggcaagtttatttttctgttctttctgcgacactcactttgtccagtgtttgatgcagaacgaggatgacaatgacaaccttgcttactggctctccaatacatctagcttattgttcctactgcagagaagtctcaaggctgctggtgctcctggtagcgtttcacgaaagaaacctcctcaaccaacatcattatttggaagaatggcccaaggcttgcgttctgcatcttttgccaacatgcatgttgaagcgacagatgttgtgcgccaagttgaggccaaatatcctgccttgcttttcaagcagcagctaactgcttatgtggagaagatatatggaatcgtccgagacaatattaaaaaggaattatcatctttgatttcgctatgtatccaggctccaagaacaatgaaagctagcatgctgcgagtttctggacgattatccagtcaatctcagagtcagagcaaccactggcagaaaatcattgagagcttggataagctcttgaagatactgcaagataaccattctattgcttcgtcgtgagtgttgctccttcagcaacggagagtatgttaaggctggtctagctgagttggagctgtggtgtgcaaaggcaacaactgagtatgcagcatcttcatgggatgagctcaagcatatcaggcaggctgttggatttttggttatattccagaagttcagaatatcttatgatgagatagtcaatgacctatgtccgatcttgagtgttcaacaactgtacagaatatgtacacaatactgggatgacaagtataatacccaaagtgtttcatcagacgttcttagtaacatgcgggtgctaatgacagaggattctaacagtgatgaaagcggttcgttcttgttagatgataattcgagcatcccgttctccgtggatgatatcttgtcagatcatttattgatttgttgtatattttttggatcctttctaccacatgtgcctttttttagttatcttatccttttgagctagcttttgtaaaaattcatataggtatttgttagggttgggatgggattccgcccttacagttagaaaaggccttatcttttaaagcggggcaaatgattctttgtagggcaacatgaaatcaatctttttacccaagggtgtggtgagaaggggtagatgcaatgtttgtagcctcccagttatagattgtgtaaattatatactgtaaatcaacagtgcaatggaaaagaaaggaaagctatatagcaagtgcagttatgttgtcatct

SEQ ID NO: 51889 - DNA, 4180 bp, Zea Mays
ctgtgtactcacggttgtttgattggcttgtgaataaaatcaacaactctattggccaagaccccaactcgaaatgcttaattggagtgctggatatatatgggtttgaaagcttcaagacaaacaggtgcttaattgttttgagcagttttgtatcaacctgacaaacgaaaagctccagcaacacttcaatcagcatgtgtttaagatggaacaagaagagtacaccaaagaagaaattaattggagttacattgagttcattgataaccaggatgttcttgatctcattgagaagaaacctggtggaattattgcccttctggatgaagcttgtatgttgccgagatcgacacatgaaacatttgctcagaaattgtatcaaacttacaaaaatcacaagcgctttgctaagccaaaattatctcggtcagacttcaccatatgccattacgctggagatgtcacctatcaaacggaattatttctggacaagaacaaagattatgttgttgctgagcatcaggctttgttgagtgcttcaaaatgtgcatttgtttcaggccttttcccttttctatctgaggattcctcaaaatcttcaaagttttcatccattggttctaggttcaagcaacaattgcaatctctgttggaaactctgagtgcaactgagccacactacatccgctgtgtaaaacccaataatttgttgaagcctgcaatttttgagaaccagaacgttcttcagcaactcagatgtggaggagttatggaggcgattaggatcagttgtgctggatatccgaccagaagaacattctatgaatttatagaccgttttggtattcttgcgcctgatgttttgagtggaagttctgatgaggtcagtgctgtaaggaggttgttggacaagatagatcttcaaggttaccagattggcaagacaaaagtattccttcgtgctggtcagatggctgaacttgatgctcgtagaaatgaagtgctagggcgttcagctagcatgattcagaggaaagtgcgttcattcttggcacagaagaatttcattgcattgcgaagatcagctttacaaatccagacagtttgtcgcggtgaacttgcaagaagagtttatcacaacctccagagagaagctgcttcactcaagatccagactttgtaccgtatgtatactgccagaaaagcgtacaacgaactttctgcttcagcagttaccattcaatcaggattgcgcggcatgtgcgcgcgtaaagagctccacttcagaagacaaacaagagctgcaatcatcatccagagtcgctgccgtcaattcttggcgagattgcattattcaagaacaaagaaagctgcaattactacacagtgtgcgtggagagggaaggctgctagaaaggagctccgcaagctcaaaatggctgcccgggaaactggtgcattgcaagctgccaaaaataaacttgagaaacaagttgaggagctcacgtggcggctacagttggagaagcgcatgcgagctgatctcgaggaaactaaatcacaagaaaatgcaaagttgcaagctgcattgcaggaggtgcaacaacagtacaaagaaacaaaagaaatactagtacaggagagggaagcagccaaaaaggctgcagagatagctccagttattaaagaggtccctgttatagatacagagctaatgaataagcttagagatgaaaatgacaaactgaagactatggtcagttcgcttgaaaagaagatcgatgatactgaaaagaaatatcaagaaacaagcaaaatcagtgaggataggctcaaacaggcaatggatgctgagactaaaatcgttgacttgaacatggcaatgctaaggcttcaagagaaaatatccaccatggaatctgaggagaaagtgcaaagacaagcgcttctaagcacgccagtcaagagcatgtctgaacatttgtcaattccaattgctccaaaggcacatcatttggagaacggctttcatgaggttgaaggacttaaggaaccccaaagtgcacctcctgctattaaggaatatgggaacggtgatcctaagatgaaaaaatctattgttgacagacaacttgaaaacgtggatgcactcattgagtgtgtagggacaaaccttggatactgtgcagggaagccagttgctgctattaccatatacaaatgtcttcttcattggaaatcattcgaggcagataagactagtgtttttgaccgtctcattcagttaataggatctgctatcgaggtaatctggcactggagattttagtcatgacactgaaacttgaaagtaccaaaattgaccattaagaaaataaacaagccatccttttgccctttccgcctttgttgatgaagataagatttactctccgcatggaacaatgcagatgtgtgaaaaatgggcatattataatgtagagatatttttttcccacaccggtaaaaaactaattttcgttacggtagtaacgaatttacagagttcaaaacataacattcagaccaaatgaagcaaagctgatcaccctgatactgaacacccagggaacagtcatcaggggataaattatactgtagatatttaaatcacctatattgtttctccaacctaacacattcatgttactgaagagataagccatgacacgcttaaactgttggtaagcatgtttgtttttaaatttaggctgctgctatttttttatgattttggaagccagtcacagtgcttttgagttttacaagtggcaagtttatttttctgttctttctgcgacactcactttgtccagtgtttgatgcagaacgaggatgacaatgacaaccttgcttactggctctccaatacatctagcttattgttcctactgcagagaagtctcaaggctgctggtgctcctggtagcgtttcacgaaagaaacctcctcaaccaacatcattatttggaagaatggcccaaggcttgcgttctgcatcttttgccaacatgcatgttgaagcgacagatgttgtgcgccaagttgaggccaaatatcctgccttgcttttcaagcagcagctaactgcttatgtggagaagatatatggaatcgtccgagacaatattaaaaaggaattatcatctttgatttcgctatgtatccaggctccaagaacaatgaaagctagcatgctgcgagtttctggacgattatccagtcaatctcagagtcagagcaaccactggcagaaaatcattgagagcttggataagctcttgaagatactgcaagataaccatgtgcctccggttttagctcagaaaatatttacccagatattttcatacattaatgtccagctattcaacagtctattgcttcgtcgtgagtgttgctccttcagcaacggagagtatgttaaggctggtctagctgagttggagctgtggtgtgcaaaggcaacaactgagtatgcagcatcttcatgggatgagctcaagcatatcaggcaggctgttggatttttggttatattccagaagttcagaatatcttatgatgagatagtcaatgacctatgtccgatcttgagtgttcaacaactgtacagaatatgtacacaatactgggatgacaagtataatacccaaagtgtttcatcagacgttcttagtaacatgcgggtgctaatgacagaggattctaacagtgatgaaagcggttcgttcttgttagatgataattcgagcatcccgttctccgtggatgatatcttgtcagatcatttattgatttgttgtatattttttggatcctttctaccacatgtgcctttttttagttatcttatccttttgagctagcttttgtaaaaattcatataggtatttgttagggttgggatgggattccgcccttacagttagaaaaggccttatcttttaaagcggggcaaatgattctttgtagggcaacatgaaatcaatctttttacccaagggtgtggtgagaaggggtagatgcaatgtttgtagcctcccagttatagattgtgtaaattatatactgtaaatcaacagtgcaatggaaaagaaaggaaagctatatagcaagtgcagttatgttgtcatct

SEQ ID NO: 51890 - DNA, 4115 bp, Zea Mays
ctgtgtactcacggttgtttgattggcttgtgaataaaatcaacaactctattggccaagaccccaactcgaaatgcttaattggagtgctggatatatatgggtttgaaagcttcaagacaaacagttttgagcagttttgtatcaacctgacaaacgaaaagctccagcaacacttcaatcagcatgtgtttaagatggaacaagaagagtacaccaaagaagaaattaattggagttacattgagttcattgataaccaggatgttcttgatctcattgagaagaaacctggtggaattattgcccttctggatgaagcttgtatgttgccgagatcgacacatgaaacatttgctcagaaattgtatcaaacttacaaaaatcacaagcgctttgctaagccaaaattatctcggtcagacttcaccatatgccattacgctggagatgtcacctatcaaacggaattatttctggacaagaacaaagattatgttgttgctgagcatcaggctttgttgagtgcttcaaaatgtgcatttgtttcaggccttttcccttttctatctgaggattcctcaaaatcttcaaagttttcatccattggttctaggttcaagcaacaattgcaatctctgttggaaactctgagtgcaactgagccacactacatccgctgtgtaaaacccaataatttgttgaagcctgcaatttttgagaaccagaacgttcttcagcaactcagatgtggaggagttatggaggcgattaggatcagttgtgctggatatccgaccagaagaacattctatgaatttatagaccgttttggtattcttgcgcctgatgttttgagtggaagttctgatgaggtcagtgctgtaaggaggttgttggacaagatagatcttcaaggttaccagattggcaagacaaaagtattccttcgtgctggtcagatggctgaacttgatgctcgtagaaatgaagtgctagggcgttcagctagcatgattcagaggaaagtgcgttcattcttggcacagaagaatttcattgcattgcgaagatcagctttacaaatccagacagtttgtcgcggtgaacttgcaagaagagtttatcacaacctccagagagaagctgcttcactcaagatccagactttgtaccgtatgtatactgccagaaaagcgtacaacgaactttctgcttcagcagttaccattcaatcaggattgcgcggcatgtgcgcgcgtaaagagctccacttcagaagacaaacaagagctgcaatcatcatccagagtcgctgccgtcaattcttggcgagattgcattattcaagaacaaagaaagctgcaattactacacagtgtgcgtggagagggaaggctgctagaaaggagctccgcaagctcaaaatggctgcccgggaaactggtgcattgcaagctgccaaaaataaacttgagaaacaagttgaggagctcacgtggcggctacagttggagaagcgcatgcgagctgatctcgaggaaactaaatcacaagaaaatgcaaagttgcaagctgcattgcaggaggtgcaacaacagtacaaagaaacaaaagaaatactagtacaggagagggaagcagccaaaaaggctgcagagatagctccagttattaaagaggtccctgttatagatacagagctaatgaataagcttagagatgaaaatgacaaactgaagactatggtcagttcgcttgaaaagaagatcgatgatactgaaaagaaatatcaagaaacaagcaaaatcagtgaggataggctcaaacaggcaatggatgctgagactaaaatcgttgacttgaacatggcaatgctaaggcttcaagagaaaatatccaccatggaatctgaggagaaagtgcaaagacaagcgcttctaagcacgccagtcaagagcatgtctgaacatttgtcaattccaattgctccaaaggcacatcatttggagaacggctttcatgaggttgaaggacttaaggaaccccaaagtgcacctcctgctattaaggaatatgggaacggtgatcctaagatgaaaaaatctattgttgacagacaacttgaaaacgtggatgcactcattgagtgtgtagggacaaaccttggatactgtgcagggaagccagttgctgctattaccatatacaaatgtcttcttcattggaaatcattcgaggcagataagactagtgtttttgaccgtctcattcagttaataggatctgctatcgaggtaatctggcactggagattttagtcatgacactgaaacttgaaagtaccaaaattgaccattaagaaaataaacaagccatccttttgccctttccgcctttgttgatgaagataagatttactctccgcatggaacaatgcagatgtgtgaaaaatgggcatattataatgtagagatatttttttcccacaccggtaaaaaactaattttcgttacggtagtaacgaatttacagagttcaaaacataacattcagaccaaatgaagcaaagctgatcaccctgatactgaacacccagggaacagtcatcaggggataaattatactgtagatatttaaatcacctatattgtttctccaacctaacacattcatgttactgaagagataagccatgacacgcttaaactgttgaacgaggatgacaatgacaaccttgcttactggctctccaatacatctagcttattgttcctactgcagagaagtctcaaggctgctggtgctcctggtagcgtttcacgaaagaaacctcctcaaccaacatcattatttggaagaatggcccaaggcttgcgttctgcatcttttgccaacatgcatgttgaagcgacagatgttgtgcgccaagttgaggccaaatatcctgccttgcttttcaagcagcagctaactgcttatgtggagaagatatatggaatcgtccgagacaatattaaaaaggaattatcatctttgatttcgctatgtatccaggctccaagaacaatgaaagctagcatgctgcgagtttctggacgattatccagtcaatctcagagtcagagcaaccactggcagaaaatcattgagagcttggataagctcttgaagatactgcaagataaccatgtgcctccggttttagctcagaaaatatttacccagatattttcatacattaatgtccagctattcaacagtctattgcttcgtcgtgagtgttgctccttcagcaacggagagtatgttaaggctggtctagctgagttggagctgtggtgtgcaaaggcaacaactgagtatgcagcatcttcatgggatgagctcaagcatatcaggcaggctgttggatttttggttatattccagaagttcagaatatcttatgatgagatagtcaatgacctatgtccgatcttgagtgttcaacaactgtacagaatatgtacacaatactgggatgacaagtataatacccaaagtgtttcatcagacgttcttagtaacatgcgggtgctaatgacagaggattctaacagtgatgaaagcggttcgttcttgttagatgataattcgaggagaaggacttcacggatatcaaaccggctgatgagctactcgagaaccctgccttccagtttttacaggattagcgctagtgaagtcctcgagcattttatgctgctagatatcttgtcagatcatttattgatttgttgtatattttttggatcctttctaccacatgtgcctttttttagttatcttatccttttgagctagcttttgtaaaaattcatataggtatttgttagggttgggatgggattccgcccttacagttagaaaaggccttatcttttaaagcggggcaaatgattctttgtagggcaacatgaaatcaatctttttacccaagggtgtggtgagaaggggtagatgcaatgtttgtagcctcccagttatagattgtgtaaattatatactgtaaatcaacagtgcaatggaaaagaaaggaaagctatatagcaagtgcagttatgttgtcatct

SEQ ID NO: 51891 - DNA, 3600 bp, Zea Mays
ctgtgtactcacggttgtttgattggcttgtgaataaaatcaacaactctattggccaagaccccaactcgaaatgcttaattggagtgctggatatatatgggtttgaaagcttcaagacaaacagttttgagcagttttgtatcaacctgacaaacgaaaagctccagcaacacttcaatcagcatgtgtttaagatggaacaagaagagtacaccaaagaagaaattaattggagttacattgagttcattgataaccaggatgttcttgatctcattgagaagaaacctggtggaattattgcccttctggatgaagcttgtatgttgccgagatcgacacatgaaacatttgctcagaaattgtatcaaacttacaaaaatcacaagcgctttgctaagccaaaattatctcggtcagacttcaccatatgccattacgctggagatgtcacctatcaaacggaattatttctggacaagaacaaagattatgttgttgctgagcatcaggctttgttgagtgcttcaaaatgtgcatttgtttcaggccttttcccttttctatctgaggattcctcaaaatcttcaaagttttcatccattggttctaggttcaagcaacaattgcaatctctgttggaaactctgagtgcaactgagccacactacatccgctgtgtaaaacccaataatttgttgaagcctgcaatttttgagaaccagaacgttcttcagcaactcagatgtggaggagttatggaggcgattaggatcagttgtgctggatatccgaccagaagaacattctatgaatttatagaccgttttggtattcttgcgcctgatgttttgagtggaagttctgatgaggtcagtgctgtaaggaggttgttggacaagatagatcttcaaggttaccagattggcaagacaaaagtattccttcgtgctggtcagatggctgaacttgatgctcgtagaaatgaagtgctagggcgttcagctagcatgattcagaggaaagtgcgttcattcttggcacagaagaatttcattgcattgcgaagatcagctttacaaatccagacagtttgtcgcggtgaacttgcaagaagagtttatcacaacctccagagagaagctgcttcactcaagatccagactttgtaccgtatgtatactgccagaaaagcgtacaacgaactttctgcttcagcagttaccattcaatcaggattgcgcggcatgtgcgcgcgtaaagagctccacttcagaagacaaacaagagctgcaatcatcatccagagtcgctgccgtcaattcttggcgagattgcattattcaagaacaaagaaagctgcaattactacacagtgtgcgtggagagggaaggctgctagaaaggagctccgcaagctcaaaatggctgcccgggaaactggtgcattgcaagctgccaaaaataaacttgagaaacaagttgaggagctcacgtggcggctacagttggagaagcgcatgcgagctgatctcgaggaaactaaatcacaagaaaatgcaaagttgcaagctgcattgcaggaggtgcaacaacagtacaaagaaacaaaagaaatactagtacaggagagggaagcagccaaaaaggctgcagagatagctccagttattaaagaggtccctgttatagatacagagctaatgaataagcttagagatgaaaatgacaaactgaagactatggtcagttcgcttgaaaagaagatcgatgatactgaaaagaaatatcaagaaacaagcaaaatcagtgaggataggctcaaacaggcaatggatgctgagactaaaatcgttgacttgaacatggcaatgctaaggcttcaagagaaaatatccaccatggaatctgaggagaaagtgcaaagacaagcgcttctaagcacgccagtcaagagcatgtctgaacatttgtcaattccaattgctccaaaggcacatcatttggagaacggctttcatgaggttgaaggacttaaggaaccccaaagtgcacctcctgctattaaggaatatgggaacggtgatcctaagatgaaaaaatctattgttgacagacaacttgaaaacgtggatgcactcattgagtgtgtagggacaaaccttggatactgtgcagggaagccagttgctgctattaccatatacaaatgtcttcttcattggaaatcattcgaggcagataagactagtgtttttgaccgtctcattcagttaataggatctgctatcgagaacgaggatgacaatgacaaccttgcttactggctctccaatacatctagcttattgttcctactgcagagaagtctcaaggctgctggtgctcctggtagcgtttcacgaaagaaacctcctcaaccaacatcattatttggaagaatggcccaaggcttgcgttctgcatcttttgccaacatgcatgttgaagcgacagatgttgtgcgccaagttgaggccaaatatcctgccttgcttttcaagcagcagctaactgcttatgtggagaagatatatggaatcgtccgagacaatattaaaaaggaattatcatctttgatttcgctatgtatccaggctccaagaacaatgaaagctagcatgctgcgagtttctggacgattatccagtcaatctcagagtcagagcaaccactggcagaaaatcattgagagcttggataagctcttgaagatactgcaagataaccatgtgcctccggttttagctcagaaaatatttacccagatattttcatacattaatgtccagctattcaacagtctattgcttcgtcgtgagtgttgctccttcagcaacggagagtatgttaaggctggtctagctgagttggagctgtggtgtgcaaaggcaacaactgagcatcttcatgggatgagctcaagcatatcaggcaggctgttggatttttggttatattccagaagttcagaatatcttatgatgagatagtcaatgacctatgtccgatcttgagtgttcaacaactgtacagaatatgtacacaatactgggatgacaagtataatacccaaagtgtttcatcagacgttcttagtaacatgcgggtgctaatgacagaggattctaacagtgatgaaagcggttcgttcttgttagatgataattcgagcatcccgttctccgtggatgatatcttgtcagatcatttattgatttgttgtatattttttggatcctttctaccacatgtgcctttttttagttatcttatccttttgagctagcttttgtaaaaattcatataggtatttgttagggttgggatgggattccgcccttacagttagaaaaggccttatcttttaaagcggggcaaatgattctttgtagggcaacatgaaatcaatctttttacccaagggtgtggtgagaaggggtagatgcaatgtttgtagcctcccagttatagattgtgtaaattatatactgtaaatcaacagtgcaatggaaaagaaaggaaagctatatagcaagtgcagttatgttgtcatct

SEQ ID NO: 51892 - DNA, 3141 bp, Zea Mays
aaacagttttaccattttatagaaatgaataaaaaagctgagaagtttgacaatctgcaacagttttttatggcgagaagacgaaaaaaaggccaaataaacagggcccagtgggtggcccgtggctgaacccgccatcggatttcgaaggttcgaggcaaccccaaaatccaaacaaaggaacattccccgggaagcggaaacgaaccactccgggcctccagcttttctatttttcataactacccttatcctccaccggtgtttgcgcggagcgactaggggcacttccgtccgtttcgcacccccgaataaacaaggcgcaggagcagcagcagcagcaggttcttgtccccttccatccgtcccagtcccaccgccaccgtcgcaccgcatcccttctccccagctcgccgccgccgcgcccacgatcgacatggcgaagctggggcggatgagcaccgccaaggtcatgataacatacaagaggaagcgtgctgccacacatgcccatacagaagacgacacagttcttgactcatctcctgctgcctcaagcaatgtggctgtcagcagtctacaacttaagcctgagggccctgctgagactgccgtgataaatgaatataatcatattactcctaaaatgcagcagtctttctccacgtttcaacaaaacatcaaagaagaacgtgaaccagagaaaggacatgatcagctatatgaatcatcaccgtggaaagaacaacctgagatttgttctgccactattgcctcaaccgcagaggcgcatagcaataaatcacaatgcattgatggcacaaatagtcaaacccctgtttcaagttctctgtgtggcaacatgcttgctgataggatgattaaccagacaaaagattcaaatatctctgcccctgtggaaataaattctcctacggggatggaaaatgctgtcgcccctggccaatgtaagagcaggtttagtcctctgctcacctttcgcaggcgagttaagaagaaaacaaatttggatgaaccagcagaagaaatttgttcacttgacaacgacaaacagtgttcaacactgacatgcagcccaccacgctcatcacaggatgctacatcattactaaaacatactgctccaaaccctttggatattgaggataaggtaggtagattgaaaaatactggaccttctacagaagctgaacactcacctgaacaagaaagattgctctagatgtaaaccaaaacataattctggaagatgatgttacaccaatgtcgaaccaaaagatgtccttggaagatgatgttacaccaatgtcgaagttcactggtgtgcaagaggtcagtgggcaagatacgccagtggaggacttcaacagaacatcaccaaatactattgaagtgccaaaagttattgatttgcaggggaagggacattgtactggggaaactacttctctgcagtctccaagacaaaaagttgatgccagttggttgaaacggaccaataaatctgtggcagaagatgttccagaatctcaaggttcaacaaaaaatattccaataattctcttggatgatgataatgatgataggggcaaggagctcgaaaattcagaggccctcgatcaagggctccatagtcaaaacaaaagaacttttgggaagattgacctgaactgtactgaattaagacaacagggacttctctgtttagatgactcaacaattcaaaggctgccagatctggatctagctgtcaatgctcgaaagcaaatgtctcgaccgattgaaaggctgtttttcacagaggagaaagataccatccgtggcaaacaagagcatcatgaagaaagctcaaccatgcacgccccatactcaaatttctttgatctgggtccaccgtggaacaccgggagtttgaagggaccaaaaggcttgccttcagaagtaaagtttggaataatggacagggctcctgagttcagtctagacctcaggctggatagtttcacagacaacaacagtgtggctgccctgaggagcgacaagttgtttctcggaagcacctccagcacatctcgtaagttaacagaaaagcttggcatgtactcctacaagaggcagtcggctccgtggtcagaagaagagctggactttctttggatcggggttaggaggtacggcgtgaataactggaatgcaatgctgagggacagtcggctgcggttttcaatctcaaggatgcccgaggaccttgctaagcaatgggacaaggagcagaagaaacttgtgggtcctgcgcaagggcccaagcccaaacggacctttcattgggcgaatattaccttggtagagcttcgtgctctggatgctccaagtcttcatttctcggggcccagacggacctttcattgggcgacgtctaccttcgcagtggccgtgctccagagagaggccaccagcatcatttaccaacaagcctgggcgtgggcggcttccctggggcttcttcatcgtatggaagaagtggcggcaggcgcagaagggcgtccaagtcgtactactacgagaacaagtcggcttggttccaggagccaccatcggacagggtgccccagcaacccggcggccgaatgggccctgagatgtggccgagcatcatggtggtgccaccgccaacggcagatccaccgagggacgacgacgtgaagccccatgtcctcctccctgatgctaccctgaagcgcgcgataaggaggagtgcggactgggggtcgttcagcaggaggctgttcctgtccggcgatctcaacgggggggctgcaggcgccccagtaccaagcgacaccggcgcgtcatccgaagagacagtgtctgacagctgagcttcagtttatttgacatgtcccattcccattcccattcttattggatgttgatgaagctgctggcatgttctctgtaatgtcatggttgcctagtactcactagtattgcatcttgtataaagtctctctctctctctctctctctctctgtcctctataacaggctacgagtccactcatgcatggtggttagatcgaacaaatactccgtaacaacatagcataccctaaacccccc

SEQ ID NO: 51893 - DNA, 3144 bp, Zea Mays
aaacagttttaccattttatagaaatgaataaaaaagctgagaagtttgacaatctgcaacagttttttatggcgagaagacgaaaaaaaggccaaataaacagggcccagtgggtggcccgtggctgaacccgccatcggatttcgaaggttcgaggcaaccccaaaatccaaacaaaggaacattccccgggaagcggaaacgaaccactccgggcctccagcttttctatttttcataactacccttatcctccaccggtgtttgcgcggagcgactaggggcacttccgtccgtttcgcacccccgaataaacaaggcgcaggagcagcagcagcagcagttaaagcagttgaaaacatttccgatacagctggcaagctttacttccgataacatttgtgcttatcaggatgagcaccgccaaggtcatgataacatacaagaggaagcgtgctgccacacatgcccatacagaagacgacacagttcttgactcatctcctgctgcctcaagcaatgtggctgtcagcagtctacaacttaagcctgagggccctgctgagactgccgtgataaatgaatataatcatattactcctaaaatgcagcagtctttctccacgtttcaacaaaacatcaaagaagaacgtgaaccagagaaaggacatgatcagctatatgaatcatcaccgtggaaagaacaacctgagatttgttctgccactattgcctcaaccgcagaggcgcatagcaataaatcacaatgcattgatggcacaaatagtcaaacccctgtttcaagttctctgtgtggcaacatgcttgctgataggatgattaaccagacaaaagattcaaatatctctgcccctgtggaaataaattctcctacggggatggaaaatgctgtcgcccctggccaatgtaagagcaggtttagtcctctgctcacctttcgcaggcgagttaagaagaaaacaaatttggatgaaccagcagaagaaatttgttcacttgacaacgacaaacagtgttcaacactgacatgcagcccaccacgctcatcacaggatgctacatcattactaaaacatactgctccaaaccctttggatattgaggataaggtaggtagattgaaaaatactggaccttctacagaagctgaacactcacctgaacaagaaagttcccacgtcgtaaaatcctcagttcaacatgtggttccacagattgctctagatgtaaaccaaaacataattctggaagatgatgttacaccaatgtcgaaccaaaagatgtccttggaagatgatgttacaccaatgtcgaagttcactggtgtgcaagaggtcagtgggcaagatacgccagtggaggacttcaacagaacatcaccaaatactattgaagtgccaaaagttattgatttgcaggggaagggacattgtactggggaaactacttctctgcagtctccaagacaaaaagttgatgccagttggttgaaacggaccaataaatctgtggcagaagatgttccagaatctcaaggttcaacaaaaaatattccaataattctcttggatgatgataatgatgataggggcaaggagctcgaaaattcagaggccctcgatcaagggctccatagtcaaaacaaaagaacttttgggaagattgacctgaactgtactgaattaagacaacagggacttctctgtttagatgactcaacaattcaaaggctgccagatctggatctagctgtcaatgctcgaaagcaaatgtctcgaccgattgaaaggctgtttttcacagaggagaaagataccatccgtggcaaacaagagcatcatgaagaaagctcaaccatgcacgccccatactcaaatttctttgatctgggtccaccgtggaacaccgggagtttgaagggaccaaaaggcttgccttcagaagtaaagtttggaataatggacagggctcctgagttcagtctagacctcaggctggatagtttcacagacaacaacagtgtggctgccctgaggagcgacaagttgtttctcggaagcacctccagcacatctcgtaagttaacagaaaagcttggcatgtactcctacaagaggcagtcggctccgtggtcagaagaagagctggactttctttggatcggggttaggaggtacggcgtgaataactggaatgcaatgctgagggacagtcggctgcggttttcaatctcaaggatgcccgaggaccttgctaagcaatgggacaaggagcagaagaaacttgtgggtcctgcgcaagggcccaagcccaaacggacctttcattgggcgaatattaccttggtagagcttcgtgctctggatgctccaagtcttcatttctcggggcccagacggacctttcattgggcgacgtctaccttcgcagtggccgtgctccagagagaggccaccagcatcatttaccaacaagcctgggcgtgggcggcttccctggggcttcttcatcgtatggaagaagtggcggcaggcgcagaagggcgtccaagtcgtactactacgagaacaagtcggcttggttccaggagccaccatcggacagggtgccccagcaacccggcggccgaatgggccctgagatgtggccgagcatcatggtggtgccaccgccaacggcagatccaccgagggacgacgacgtgaagccccatgtcctcctccctgatgctaccctgaagcgcgcgataaggaggagtgcggactgggggtcgttcagcaggaggctgttcctgtccggcgatctcaacgggggggctgcaggcgccccagtaccaagcgacaccggcgcgtcatccgaagagacagtgtctgacagctgagcttcagtttatttgacatgtcccattcccattcccattcttattggatgttgatgaagctgctggcatgttctctgtaatgtcatggttgcctagtactcactagtattgcatcttgtataaagtctctctctctctctctctctctctctgtcctctataacaggctacgagtccactcatgcatggtggttagatcgaacaaatactccgtaacaacatagcataccctaaacccccc

SEQ ID NO: 51894 - DNA, 2888 bp, Zea Mays
cttcctggaacttttgcttttttgctgtgaaaaaaaggaggggcgcggccgtcttcttcttcctcctccacctcccatccacgtccgaaaatcccgtcctcctccggtttctcccggcataccaagcccaaattcccggcacaccgtcatcgtcgcccggcggcgggagaagttaaagcagttgaaaacatttccgatacagctggcaagctttacttccgataacatttgtgcttatcaggatgagcaccgccaaggtcatgataacatacaagaggaagcgtgctgccacacatgcccatacagaagacgacacagttcttgactcatctcctgctgcctcaagcaatgtggctgtcagcagtctacaacttaagcctgagggccctgctgagactgccgtgataaatgaatataatcatattactcctaaaatgcagcagtctttctccacgtttcaacaaaacatcaaagaagaacgtgaaccagagaaaggacatgatcagctatatgaatcatcaccgtggaaagaacaacctgagatttgttctgccactattgcctcaaccgcagaggcgcatagcaataaatcacaatgcattgatggcacaaatagtcaaacccctgtttcaagttctctgtgtggcaacatgcttgctgataggatgattaaccagacaaaagattcaaatatctctgcccctgtggaaataaattctcctacggggatggaaaatgctgtcgcccctggccaatgtaagagcaggtttagtcctctgctcacctttcgcaggcgagttaagaagaaaacaaatttggatgaaccagcagaagaaatttgttcacttgacaacgacaaacagtgttcaacactgacatgcagcccaccacgctcatcacaggatgctacatcattactaaaacatactgctccaaaccctttggatattgaggataaggtaggtagattgaaaaatactggaccttctacagaagctgaacactcacctgaacaagaaagttcccacgtcgtaaaatcctcagttcaacatgtggttccacagattgctctagatgtaaaccaaaacataattctggaagatgatgttacaccaatgtcgaaccaaaagatgtccttggaagatgatgttacaccaatgtcgaagttcactggtgtgcaagaggggaagggacattgtactggggaaactacttctctgcagtctccaagacaaaaagttgatgccagttggttgaaacggaccaataaatctgtggcagaagatgttccagaatctcaaggttcaacaaaaaatattccaataattctcttggatgatgataatgatgataggggcaaggagctcgaaaattcagaggccctcgatcaagggctccatagtcaaaacaaaagaacttttgggaagattgacctgaactgtactgaattaagacaacagggacttctctgtttagatgactcaacaattcaaaggctgccagatctggatctagctgtcaatgctcgaaagcaaatgtctcgaccgattgaaaggctgtttttcacagaggagaaagataccatccgtggcaaacaagagcatcatgaagaaagctcaaccatgcacgccccatactcaaatttctttgatctgggtccaccgtggaacaccgggagtttgaagggaccaaaaggcttgccttcagaagtaaagtttggaataatggacagggctcctgagttcagtctagacctcaggctggatagtttcacagacaacaacagtgtggctgccctgaggagcgacaagttgtttctcggaagcacctccagcacatctcgtaagttaacagaaaagcttggcatgtactcctacaagaggcagtcggctccgtggtcagaagaagagctggactttctttggatcggggttaggaggtacggcgtgaataactggaatgcaatgctgagggacagtcggctgcggttttcaatctcaaggatgcccgaggaccttgctaagcaatgggacaaggagcagaagaaacttgtgggtcctgcgcaagggcccaagcccaaacggacctttcattgggcgaatattaccttggtagagcttcgtgctctggatgctccaagtcttcatttctcggggcccagacggacctttcattgggcgacgtctaccttcgcagtggccgtgctccagagagaggccaccagcatcatttaccaacaagcctgggcgtgggcggcttccctggggcttcttcatcgtatggaagaagtggcggcaggcgcagaagggcgtccaagtcgtactactacgagaacaagtcggcttggttccaggagccaccatcggacagggtgccccagcaacccggcggccgaatgggccctgagatgtggccgagcatcatggtggtgccaccgccaacggcagatccaccgagggacgacgacgtgaagccccatgtcctcctccctgatgctaccctgaagcgcgcgataaggaggagtgcggactgggggtcgttcagcaggaggctgttcctgtccggcgatctcaacgggggggctgcaggcgccccagtaccaagcgacaccggcgcgtcatccgaagagacagtgtctgacagctgagcttcagtttatttgacatgtcccattcccattcccattcttattggatgttgatgaagctgctggcatgttctctgtaatgtcatggttgcctagtactcactagtattgcatcttgtataaagtctctctctctctctctctctctctctgtcctctataacaggctacgagtccactcatgcatggtggttagatcgaacaaatactccgtaacaacatagcataccctaaacccccc

SEQ ID NO: 51895 - DNA, 2703 bp, Zea Mays
ctgggtcctcgagacgggcgatgagagctcttaaagcagttgaaaacatttccgatacagctggcaagctttacttccgataacatttgtgcttatcaggatgagcaccgccaaggtcatgataacatacaagaggaagcgtgctgccacacatgcccatacagaagacgacacagttcttgactcatctcctgctgcctcaagcaatgtggctgtcagcagtctacaacttaagcctgagggccctgctgagactgccgtgataaatgaatataatcatattactcctaaaatgcagcagtctttctccacgtttcaacaaaacatcaaagaagaacgtgaaccagagaaaggacatgatcagctatatgaatcatcaccgtggaaagaacaacctgagatttgttctgccactattgcctcaaccgcagaggcgcatagcaataaatcacaatgcattgatggcacaaatagtcaaacccctgtttcaagttctctgtgtggcaacatgcttgctgataggatgattaaccagacaaaagattcaaatatctctgcccctgtggaaataaattctcctacggggatggaaaatgctgtcgcccctggccaatgtaagagcaggtttagtcctctgctcacctttcgcaggcgagttaagaagaaaacaaatttggatgaaccagcagaagaaatttgttcacttgacaacgacaaacagtgttcaacactgacatgcagcccaccacgctcatcacaggatgctacatcattactaaaacatactgctccaaaccctttggatattgaggataaggtaggtagattgaaaaatactggaccttctacagaagctgaacactcacctgaacaagaaagattgctctagatgtaaaccaaaacataattctggaagatgatgttacaccaatgtcgaaccaaaagatgtccttggaagatgatgttacaccaatgtcgaagttcactggtgtgcaagaggggaagggacattgtactggggaaactacttctctgcagtctccaagacaaaaagttgatgccagttggttgaaacggaccaataaatctgtggcagaagatgttccagaatctcaaggttcaacaaaaaatattccaataattctcttggatgatgataatgatgataggggcaaggagctcgaaaattcagaggccctcgatcaagggctccatagtcaaaacaaaagaacttttgggaagattgacctgaactgtactgaattaagacaacagggacttctctgtttagatgactcaacaattcaaaggctgccagatctggatctagctgtcaatgctcgaaagcaaatgtctcgaccgattgaaaggctgtttttcacagaggagaaagataccatccgtggcaaacaagagcatcatgaagaaagctcaaccatgcacgccccatactcaaatttctttgatctgggtccaccgtggaacaccgggagtttgaagggaccaaaaggcttgccttcagaagtaaagtttggaataatggacagggctcctgagttcagtctagacctcaggctggatagtttcacagacaacaacagtgtggctgccctgaggagcgacaagttgtttctcggaagcacctccagcacatctcgtaagttaacagaaaagcttggcatgtactcctacaagaggcagtcggctccgtggtcagaagaagagctggactttctttggatcggggttaggaggtacggcgtgaataactggaatgcaatgctgagggacagtcggctgcggttttcaatctcaaggatgcccgaggaccttgctaagcaatgggacaaggagcagaagaaacttgtgggtcctgcgcaagggcccaagcccaaacggacctttcattgggcgaatattaccttggtagagcttcgtgctctggatgctccaagtcttcatttctcggggcccagacggacctttcattgggcgacgtctaccttcgcagtggccgtgctccagagagaggccaccagcatcatttaccaacaagcctgggcgtgggcggcttccctggggcttcttcatcgtatggaagaagtggcggcaggcgcagaagggcgtccaagtcgtactactacgagaacaagtcggcttggttccaggagccaccatcggacagggtgccccagcaacccggcggccgaatgggccctgagatgtggccgagcatcatggtggtgccaccgccaacggcagatccaccgagggacgacgacgtgaagccccatgtcctcctccctgatgctaccctgaagcgcgcgataaggaggagtgcggactgggggtcgttcagcaggaggctgttcctgtccggcgatctcaacgggggggctgcaggcgccccagtaccaagcgacaccggcgcgtcatccgaagagacagtgtctgacagctgagcttcagtttatttgacatgtcccattcccattcccattcttattggatgttgatgaagctgctggcatgttctctgtaatgtcatggttgcctagtactcactagtattgcatcttgtataaagtctctctctctctctctctctctctctgtcctctataacaggctacgagtccactcatgcatggtggttagatcgaacaaatactccgtaacaacatagcataccctaaacccccc

SEQ ID NO: 51896 - DNA, 2830 bp, Zea Mays
ctgggtcctcgagacgggcgatgagagctcttaaagcagttgaaaacatttccgatacagctggcaagctttacttccgataacatttgtgcttatcaggatgagcaccgccaaggtcatgataacatacaagaggaagcgtgctgccacacatgcccatacagaagacgacacagttcttgactcatctcctgctgcctcaagcaatgtggctgtcagcagtctacaacttaagcctgagggccctgctgagactgccgtgataaatgaatataatcatattactcctaaaatgcagcagtctttctccacgtttcaacaaaacatcaaagaagaacgtgaaccagagaaaggacatgatcagctatatgaatcatcaccgtggaaagaacaacctgagatttgttctgccactattgcctcaaccgcagaggcgcatagcaataaatcacaatgcattgatggcacaaatagtcaaacccctgtttcaagttctctgtgtggcaacatgcttgctgataggatgattaaccagacaaaagattcaaatatctctgcccctgtggaaataaattctcctacggggatggaaaatgctgtcgcccctggccaatgtaagagcaggtttagtcctctgctcacctttcgcaggcgagttaagaagaaaacaaatttggatgaaccagcagaagaaatttgttcacttgacaacgacaaacagtgttcaacactgacatgcagcccaccacgctcatcacaggatgctacatcattactaaaacatactgctccaaaccctttggatattgaggataaggtaggtagattgaaaaatactggaccttctacagaagctgaacactcacctgaacaagaaagttcccacgtcgtaaaatcctcagttcaacatgtggttccacagattgctctagatgtaaaccaaaacataattctggaagatgatgttacaccaatgtcgaaccaaaagatgtccttggaagatgatgttacaccaatgtcgaagttcactggtgtgcaagaggtcagtgggcaagatacgccagtggaggacttcaacagaacatcaccaaatactattgaagtgccaaaagttattgatttgcaggggaagggacattgtactggggaaactacttctctgcagtctccaagacaaaaagttgatgccagttggttgaaacggaccaataaatctgtggcagaagatgttccagaatctcaaggttcaacaaaaaatattccaataattctcttggatgatgataatgatgataggggcaaggagctcgaaaattcagaggccctcgatcaagggctccatagtcaaaacaaaagaacttttgggaagattgacctgaactgtactgaattaagacaacagggacttctctgtttagatgactcaacaattcaaaggctgccagatctggatctagctgtcaatgctcgaaagcaaatgtctcgaccgattgaaaggctgtttttcacagaggagaaagataccatccgtggcaaacaagagcatcatgaagaaagctcaaccatgcacgccccatactcaaatttctttgatctgggtccaccgtggaacaccgggagtttgaagggaccaaaaggcttgccttcagaagtaaagtttggaataatggacagggctcctgagttcagtctagacctcaggctggatagtttcacagacaacaacagtgtggctgccctgaggagcgacaagttgtttctcggaagcacctccagcacatctcgtaagttaacagaaaagcttggcatgtactcctacaagaggcagtcggctccgtggtcagaagaagagctggactttctttggatcggggttaggaggtacggcgtgaataactggaatgcaatgctgagggacagtcggctgcggttttcaatctcaaggatgcccgaggaccttgctaagcaatgggacaaggagcagaagaaacttgtgggtcctgcgcaagggcccaagcccaaacggacctttcattgggcgaatattaccttggtagagcttcgtgctctggatgctccaagtcttcatttctcggggcccagacggacctttcattgggcgacgtctaccttcgcagtggccgtgctccagagagaggccaccagcatcatttaccaacaagcctgggcgtgggcggcttccctggggcttcttcatcgtatggaagaagtggcggcaggcgcagaagggcgtccaagtcgtactactacgagaacaagtcggcttggttccaggagccaccatcggacagggtgccccagcaacccggcggccgaatgggccctgagatgtggccgagcatcatggtggtgccaccgccaacggcagatccaccgagggacgacgacgtgaagccccatgtcctcctccctgatgctaccctgaagcgcgcgataaggaggagtgcggactgggggtcgttcagcaggaggctgttcctgtccggcgatctcaacgggggggctgcaggcgccccagtaccaagcgacaccggcgcgtcatccgaagagacagtgtctgacagctgagcttcagtttatttgacatgtcccattcccattcccattcttattggatgttgatgaagctgctggcatgttctctgtaatgtcatggttgcctagtactcactagtattgcatcttgtataaagtctctctctctctctctctctctctctgtcctctataacaggctacgagtccactcatgcatggtggttagatcgaacaaatactccgtaacaacatagcataccctaaacccccc

SEQ ID NO: 51897 - DNA, 2537 bp, Zea Mays
aatcttgactctgttactcatatcaattttattactcctaaaatgcagcagtctttctccacgtttcaacaaaacatcaaagaagaacgtgaaccagagaaaggacatgatcagctatatgaatcatcaccgtggaaagaacaacctgagatttgttctgccactattgcctcaaccgcagaggcgcatagcaataaatcacaatgcattgatggcacaaatagtcaaacccctgtttcaagttctctgtgtggcaacatgcttgctgataggatgattaaccagacaaaagattcaaatatctctgcccctgtggaaataaattctcctacggggatggaaaatgctgtcgcccctggccaatgtaagagcaggtttagtcctctgctcacctttcgcaggcgagttaagaagaaaacaaatttggatgaaccagcagaagaaatttgttcacttgacaacgacaaacagtgttcaacactgacatgcagcccaccacgctcatcacaggatgctacatcattactaaaacatactgctccaaaccctttggatattgaggataaggtaggtagattgaaaaatactggaccttctacagaagctgaacactcacctgaacaagaaagattgctctagatgtaaaccaaaacataattctggaagatgatgttacaccaatgtcgaaccaaaagatgtccttggaagatgatgttacaccaatgtcgaagttcactggtgtgcaagaggtcagtgggcaagatacgccagtggaggacttcaacagaacatcaccaaatactattgaagtgccaaaagttattgatttgcaggggaagggacattgtactggggaaactacttctctgcagtctccaagacaaaaagttgatgccagttggttgaaacggaccaataaatctgtggcagaagatgttccagaatctcaaggttcaacaaaaaatattccaataattctcttggatgatgataatgatgataggggcaaggagctcgaaaattcagaggccctcgatcaagggctccatagtcaaaacaaaagaacttttgggaagattgacctgaactgtactgaattaagacaacagggacttctctgtttagatgactcaacaattcaaaggctgccagatctggatctagctgtcaatgctcgaaagcaaatgtctcgaccgattgaaaggctgtttttcacagaggagaaagataccatccgtggcaaacaagagcatcatgaagaaagctcaaccatgcacgccccatactcaaatttctttgatctgggtccaccgtggaacaccgggagtttgaagggaccaaaaggcttgccttcagaagtaaagtttggaataatggacagggctcctgagttcagtctagacctcaggctggatagtttcacagacaacaacagtgtggctgccctgaggagcgacaagttgtttctcggaagcacctccagcacatctcgtaagttaacagaaaagcttggcatgtactcctacaagaggcagtcggctccgtggtcagaagaagagctggactttctttggatcggggttaggaggtacggcgtgaataactggaatgcaatgctgagggacagtcggctgcggttttcaatctcaaggatgcccgaggaccttgctaagcaatgggacaaggagcagaagaaacttgtgggtcctgcgcaagggcccaagcccaaacggacctttcattgggcgaatattaccttggtagagcttcgtgctctggatgctccaagtcttcatttctcggggcccagacggacctttcattgggcgacgtctaccttcgcagtggccgtgctccagagagaggccaccagcatcatttaccaacaagcctgggcgtgggcggcttccctggggcttcttcatcgtatggaagaagtggcggcaggcgcagaagggcgtccaagtcgtactactacgagaacaagtcggcttggttccaggagccaccatcggacagggtgccccagcaacccggcggccgaatgggccctgagatgtggccgagcatcatggtggtgccaccgccaacggcagatccaccgagggacgacgacgtgaagccccatgtcctcctccctgatgctaccctgaagcgcgcgataaggaggagtgcggactgggggtcgttcagcaggaggctgttcctgtccggcgatctcaacgggggggctgcaggcgccccagtaccaagcgacaccggcgcgtcatccgaagagacagtgtctgacagctgagcttcagtttatttgacatgtcccattcccattcccattcttattggatgttgatgaagctgctggcatgttctctgtaatgtcatggttgcctagtactcactagtattgcatcttgtataaagtctctctctctctctctctctctctctgtcctctataacaggctacgagtccactcatgcatggtggttagatcgaacaaatactccgtaacaacatagcataccctaaacccccc

SEQ ID NO: 51898 - DNA, 2577 bp, Zea Mays
cttgactctgttactcatatcaattttattactcctaaaatgcagcagtctttctccacgtttcaacaaaacatcaaagaagaacgtgaaccagagaaaggacatgatcagctatatgaatcatcaccgtggaaagaacaacctgagatttgttctgccactattgcctcaaccgcagaggcgcatagcaataaatcacaatgcattgatggcacaaatagtcaaacccctgtttcaagttctctgtgtggcaacatgcttgctgataggatgattaaccagacaaaagattcaaatatctctgcccctgtggaaataaattctcctacggggatggaaaatgctgtcgcccctggccaatgtaagagcaggtttagtcctctgctcacctttcgcaggcgagttaagaagaaaacaaatttggatgaaccagcagaagaaatttgttcacttgacaacgacaaacagtgttcaacactgacatgcagcccaccacgctcatcacaggatgctacatcattactaaaacatactgctccaaaccctttggatattgaggataaggtaggtagattgaaaaatactggaccttctacagaagctgaacactcacctgaacaagaaagttcccacgtcgtaaaatcctcagttcaacatgtggttccacagattgctctagatgtaaaccaaaacataattctggaagatgatgttacaccaatgtcgaaccaaaagatgtccttggaagatgatgttacaccaatgtcgaagttcactggtgtgcaagaggtcagtgggcaagatacgccagtggaggacttcaacagaacatcaccaaatactattgaagtgccaaaagttattgatttgcaggggaagggacattgtactggggaaactacttctctgcagtctccaagacaaaaagttgatgccagttggttgaaacggaccaataaatctgtggcagaagatgttccagaatctcaaggttcaacaaaaaatattccaataattctcttggatgatgataatgatgataggggcaaggagctcgaaaattcagaggccctcgatcaagggctccatagtcaaaacaaaagaacttttgggaagattgacctgaactgtactgaattaagacaacagggacttctctgtttagatgactcaacaattcaaaggctgccagatctggatctagctgtcaatgctcgaaagcaaatgtctcgaccgattgaaaggctgtttttcacagaggagaaagataccatccgtggcaaacaagagcatcatgaagaaagctcaaccatgcacgccccatactcaaatttctttgatctgggtccaccgtggaacaccgggagtttgaagggaccaaaaggcttgccttcagaagtaaagtttggaataatggacagggctcctgagttcagtctagacctcaggctggatagtttcacagacaacaacagtgtggctgccctgaggagcgacaagttgtttctcggaagcacctccagcacatctcgtaagttaacagaaaagcttggcatgtactcctacaagaggcagtcggctccgtggtcagaagaagagctggactttctttggatcggggttaggaggtacggcgtgaataactggaatgcaatgctgagggacagtcggctgcggttttcaatctcaaggatgcccgaggaccttgctaagcaatgggacaaggagcagaagaaacttgtgggtcctgcgcaagggcccaagcccaaacggacctttcattgggcgaatattaccttggtagagcttcgtgctctggatgctccaagtcttcatttctcggggcccagacggacctttcattgggcgacgtctaccttcgcagtggccgtgctccagagagaggccaccagcatcatttaccaacaagcctgggcgtgggcggcttccctggggcttcttcatcgtatggaagaagtggcggcaggcgcagaagggcgtccaagtcgtactactacgagaacaagtcggcttggttccaggagccaccatcggacagggtgccccagcaacccggcggccgaatgggccctgagatgtggccgagcatcatggtggtgccaccgccaacggcagatccaccgagggacgacgacgtgaagccccatgtcctcctccctgatgctaccctgaagcgcgcgataaggaggagtgcggactgggggtcgttcagcaggaggctgttcctgtccggcgatctcaacgggggggctgcaggcgccccagtaccaagcgacaccggcgcgtcatccgaagagacagtgtctgacagctgagcttcagtttatttgacatgtcccattcccattcccattcttattggatgttgatgaagctgctggcatgttctctgtaatgtcatggttgcctagtactcactagtattgcatcttgtataaagtctctctctctctctctctctctctctgtcctctataacaggctacgagtccactcatgcatggtggttagatcgaacaaatactccgtaacaacatagcataccctaaacccccc

SEQ ID NO: 51899 - DNA, 2622 bp, Zea Mays
gtcatttctataacacgctgctgtgagtttccatgttctattactgctgatagctgcatgttttcatgaatcgtccctgtgtgccttgaaaattatcctctgaaaaagatccttgattactcctaaaatgcagcagtctttctccacgtttcaacaaaacatcaaagaagaacgtgaaccagagaaaggacatgatcagctatatgaatcatcaccgtggaaagaacaacctgagatttgttctgccactattgcctcaaccgcagaggcgcatagcaataaatcacaatgcattgatggcacaaatagtcaaacccctgtttcaagttctctgtgtggcaacatgcttgctgataggatgattaaccagacaaaagattcaaatatctctgcccctgtggaaataaattctcctacggggatggaaaatgctgtcgcccctggccaatgtaagagcaggtttagtcctctgctcacctttcgcaggcgagttaagaagaaaacaaatttggatgaaccagcagaagaaatttgttcacttgacaacgacaaacagtgttcaacactgacatgcagcccaccacgctcatcacaggatgctacatcattactaaaacatactgctccaaaccctttggatattgaggataaggtaggtagattgaaaaatactggaccttctacagaagctgaacactcacctgaacaagaaagattgctctagatgtaaaccaaaacataattctggaagatgatgttacaccaatgtcgaaccaaaagatgtccttggaagatgatgttacaccaatgtcgaagttcactggtgtgcaagaggtcagtgggcaagatacgccagtggaggacttcaacagaacatcaccaaatactattgaagtgccaaaagttattgatttgcaggggaagggacattgtactggggaaactacttctctgcagtctccaagacaaaaagttgatgccagttggttgaaacggaccaataaatctgtggcagaagatgttccagaatctcaaggttcaacaaaaaatattccaataattctcttggatgatgataatgatgataggggcaaggagctcgaaaattcagaggccctcgatcaagggctccatagtcaaaacaaaagaacttttgggaagattgacctgaactgtactgaattaagacaacagggacttctctgtttagatgactcaacaattcaaaggctgccagatctggatctagctgtcaatgctcgaaagcaaatgtctcgaccgattgaaaggctgtttttcacagaggagaaagataccatccgtggcaaacaagagcatcatgaagaaagctcaaccatgcacgccccatactcaaatttctttgatctgggtccaccgtggaacaccgggagtttgaagggaccaaaaggcttgccttcagaagtaaagtttggaataatggacagggctcctgagttcagtctagacctcaggctggatagtttcacagacaacaacagtgtggctgccctgaggagcgacaagttgtttctcggaagcacctccagcacatctcgtaagttaacagaaaagcttggcatgtactcctacaagaggcagtcggctccgtggtcagaagaagagctggactttctttggatcggggttaggaggtacggcgtgaataactggaatgcaatgctgagggacagtcggctgcggttttcaatctcaaggatgcccgaggaccttgctaagcaatgggacaaggagcagaagaaacttgtgggtcctgcgcaagggcccaagcccaaacggacctttcattgggcgaatattaccttggtagagcttcgtgctctggatgctccaagtcttcatttctcggggcccagacggacctttcattgggcgacgtctaccttcgcagtggccgtgctccagagagaggccaccagcatcatttaccaacaagcctgggcgtgggcggcttccctggggcttcttcatcgtatggaagaagtggcggcaggcgcagaagggcgtccaagtcgtactactacgagaacaagtcggcttggttccaggagccaccatcggacagggtgccccagcaacccggcggccgaatgggccctgagatgtggccgagcatcatggtggtgccaccgccaacggcagatccaccgagggacgacgacgtgaagccccatgtcctcctccctgatgctaccctgaagcgcgcgataaggaggagtgcggactgggggtcgttcagcaggaggctgttcctgtccggcgatctcaacgggggggctgcaggcgccccagtaccaagcgacaccggcgcgtcatccgaagagacagtgtctgacagctgagcttcagtttatttgacatgtcccattcccattcccattcttattggatgttgatgaagctgctggcatgttctctgtaatgtcatggttgcctagtactcactagtattgcatcttgtataaagtctctctctctctctctctctctctctgtcctctataacaggctacgagtccactcatgcatggtggttagatcgaacaaatactccgtaacaacatagcataccctaaacccccc

SEQ ID NO: 51900 - DNA, 2644 bp, Zea Mays
tgtgagtttccatgttctattactgctgatagctgcatgttttcatgaatcgtccctgtgtgccttgaaaattatcctctgaaaaagatccttgattactcctaaaatgcagcagtctttctccacgtttcaacaaaacatcaaagaagaacgtgaaccagagaaaggacatgatcagctatatgaatcatcaccgtggaaagaacaacctgagatttgttctgccactattgcctcaaccgcagaggcgcatagcaataaatcacaatgcattgatggcacaaatagtcaaacccctgtttcaagttctctgtgtggcaacatgcttgctgataggatgattaaccagacaaaagattcaaatatctctgcccctgtggaaataaattctcctacggggatggaaaatgctgtcgcccctggccaatgtaagagcaggtttagtcctctgctcacctttcgcaggcgagttaagaagaaaacaaatttggatgaaccagcagaagaaatttgttcacttgacaacgacaaacagtgttcaacactgacatgcagcccaccacgctcatcacaggatgctacatcattactaaaacatactgctccaaaccctttggatattgaggataaggtaggtagattgaaaaatactggaccttctacagaagctgaacactcacctgaacaagaaagttcccacgtcgtaaaatcctcagttcaacatgtggttccacagattgctctagatgtaaaccaaaacataattctggaagatgatgttacaccaatgtcgaaccaaaagatgtccttggaagatgatgttacaccaatgtcgaagttcactggtgtgcaagaggtcagtgggcaagatacgccagtggaggacttcaacagaacatcaccaaatactattgaagtgccaaaagttattgatttgcaggggaagggacattgtactggggaaactacttctctgcagtctccaagacaaaaagttgatgccagttggttgaaacggaccaataaatctgtggcagaagatgttccagaatctcaaggttcaacaaaaaatattccaataattctcttggatgatgataatgatgataggggcaaggagctcgaaaattcagaggccctcgatcaagggctccatagtcaaaacaaaagaacttttgggaagattgacctgaactgtactgaattaagacaacagggacttctctgtttagatgactcaacaattcaaaggctgccagatctggatctagctgtcaatgctcgaaagcaaatgtctcgaccgattgaaaggctgtttttcacagaggagaaagataccatccgtggcaaacaagagcatcatgaagaaagctcaaccatgcacgccccatactcaaatttctttgatctgggtccaccgtggaacaccgggagtttgaagggaccaaaaggcttgccttcagaagtaaagtttggaataatggacagggctcctgagttcagtctagacctcaggctggatagtttcacagacaacaacagtgtggctgccctgaggagcgacaagttgtttctcggaagcacctccagcacatctcgtaagttaacagaaaagcttggcatgtactcctacaagaggcagtcggctccgtggtcagaagaagagctggactttctttggatcggggttaggaggtacggcgtgaataactggaatgcaatgctgagggacagtcggctgcggttttcaatctcaaggatgcccgaggaccttgctaagcaatgggacaaggagcagaagaaacttgtgggtcctgcgcaagggcccaagcccaaacggacctttcattgggcgaatattaccttggtagagcttcgtgctctggatgctccaagtcttcatttctcggggcccagacggacctttcattgggcgacgtctaccttcgcagtggccgtgctccagagagaggccaccagcatcatttaccaacaagcctgggcgtgggcggcttccctggggcttcttcatcgtatggaagaagtggcggcaggcgcagaagggcgtccaagtcgtactactacgagaacaagtcggcttggttccaggagccaccatcggacagggtgccccagcaacccggcggccgaatgggccctgagatgtggccgagcatcatggtggtgccaccgccaacggcagatccaccgagggacgacgacgtgaagccccatgtcctcctccctgatgctaccctgaagcgcgcgataaggaggagtgcggactgggggtcgttcagcaggaggctgttcctgtccggcgatctcaacgggggggctgcaggcgccccagtaccaagcgacaccggcgcgtcatccgaagagacagtgtctgacagctgagcttcagtttatttgacatgtcccattcccattcccattcttattggatgttgatgaagctgctggcatgttctctgtaatgtcatggttgcctagtactcactagtattgcatcttgtataaagtctctctctctctctctctctctctctgtcctctataacaggctacgagtccactcatgcatggtggttagatcgaacaaatactccgtaacaacatagcataccctaaacccccc

SEQ ID NO: 51901 - DNA, 1493 bp, Zea Mays
tgccgtccaggtccgttgcagcacatatacgaggaaccagggaggctaagtgcaggaaggcaggatgcagtacaagaacctgggccggtcggggctccgcgtcagccagctctcgtacggcgcgtgggtgaccttcgggaaccagctggacgtgaaggaggccaaggcgctgctgcaggcgtgccgggacgcgggcgtcaacttcttcgacaacgccgaggtgtacgccaacggccgcgccgaggagatcatgggccaggccatccgggacctgggctggcgccgctccgacgtcgtcatctccaccaagctcttctggggcggccagggccccaacgacaagggcctctcccgcaagcacgtcgtcgagggcctccgcgcctcgctccgccgcctcgacatggactacgtcgacgtcgtctactgccaccgccccgacgcctccacgcccgtcgaggagacggtgcgcgccatcaactgggtcatcgaccagggctgggccttctactggggcacctccgagtggtccgcgcagcagatcaccgaggcctgggcagtcgccaaccgcctcgacctcgtgggacccatcgtcgagcagccggagtacaacctcttctccaggcacaaggttgagtctgagtttttgccactttacagcacctatggcatcggattgactacatggagtcctctagcttcaggagtactaactggaaaatataccaaagggaacatacctgctgatagcaggtttgcactagacaattacaagaacctggcaaataggtccctggttgacgacacgcttcgaaaagtgaatgggctaaaacctatcgccgctgaactcggcgtttcgttagctcaactctccattgcttggtgcgcgtcaaaccccaacgtctcatccgtgatcactggagccaccaaagaaagccagatcgtggagaacatgaaggctctagatgtcatcccactgctgacgccggaggtcgttgacaggattgaggcggtggtccagagcaagcccaaacgcactgaatcatacaggtgaaggcggtacgtacgggcctacgtgagtgttcgtccgaatggagtttaggcctctccagtgacttggggggtgtttggtttctagggactaatttttagtccctccacttaattctattttagtccctaaattactaaatatagaaactaaaactctattttagtttccctatttaacaatttatgaactaaaatggaattaagtgaagggactaaagtttagtccctataaaccaaacacccccttgatttcacgaaattatatccatggaacatggtcccgtgtattctttctgggcgtccgcagtcgtggtgctgtgttccaaacatctgtccgtcctgtgtgtattctgcctgcgtttcagattcagatttttttattttggactcaatcaacgctgcactgtgtgtttgaatgcactatagctaagagttagttagtt

SEQ ID NO: 51902 - DNA, 835 bp, Zea Mays
tatagatgctgtggttcggatgctcaagatggagatccacagattagtaataagtgagattaccagctgagaatcaggatgaacaagtaatatgtgagtatcagaatgctgacaaactagagataaaaaaactgcatgtacatacttcatttgtattatccttaattaacattgacaacacagagtatgttgcaagcctaatggggttctaaacactatcaacaggtataattgcccgtgctgatgttcttcgtgtgttggaaggcatgctgaagatttaggagcgcacaaatccatgcatggaagtcagaaacttcttgtaaatatgtagatatgtccatggtgcttttgatgcttttgagtatcagcaaggagacctaggccctatttgtttccattctagattatataagttggattatggtgaaagagtaatagggtaaaatacaactttaagatcacaaataagctgaaataaactacccaatgttagattattttagcttatttgcagtcctaaagtgatttttaccctattacccttccaccataatccaacatatataatctagaaagtaaacaaacacaccccctgtaacctataggagtctgctgtgccatccatcggtaacaagtctgcggaagggtttggagtttttcgttgtagcacgccaggagactatctctgttttgtactgcttgcgtaatcaaatgctgtaaactagccaaatacttccagagcaatataaatggatatactcgttctctatgttgaaactgcttaaatcaggagatgcccccttggtcttctcctgaagcaacagaagcagcacta

SEQ ID NO: 51903 - DNA, 5017 bp, Zea Mays
ctgctatactcgatgggccgggcgcccgggcctcgttgcatctcctaaagctcaccggatacgtattcctcagttacgccttcgtcgcacgttcacgcctccaccgattcaaacgccggaacacccacgcggtcggcggaggcctccccgtcgtttgcccatgcccttgcgccgccatgccggccgcgccatcgccgccgcgcccggcggtttcctccacctctccctgctcgcctccctccgccaccgcccctcgcttcaggcgcacgcgcagctcctgctcttgggcctcccgctgccccccgccgcggcctcacacctcctccgcccgcacctccgcgccggccatccgcttgcctcgctccgcctcttcctccgcgtgctccgcgaccaccaccccgccacaaccggcgccaccgcttcccaggaggagggggctgttcccgactcccgctccctctccgcggttctcgcagcctgctcccgcctcgagtccccttcccccggactctgcatccacgccttcctcctaaagtcgggattcgcctccgacgtcttcgccgccaattcgctcctccatttctatgccgcgttcggtctccacgccctcgcgtgcaagctgttcgacgaaatgccgaccagggacaccgtgtcgttcaacaccctgatcggttcgtacgtgcagtcgggacgcgttgaacgcgcgttggtggtgttcaggaacatggtggagggagggttccggctggacgagtggaccatcagagcgttgctgggtgcctgtgctgggctaggcgatttcatggtggccaaagctgcgcatgggtttgccagcaggacattgaggcatagattgctcgactctggagaggtggtgattgggttagtggacatgtatgtcaagtgtggtgcagtgcacctcgccaggaaaacatttgatttgtttggggagaaggtgaaggacgtgagagtttggagtgtgatggtatcagggtatgctagggttggggagatcggcatggctcggaagttgtttgatgagatgcccaataaggacttggttgcgtggacagttttggtcggtggatatgtgcaggcaggtagatacaaggaggcacttgggttgttcgaggagatggaagcggcaggacttgaggctgatgagatgacggtcgtcaccgtgctttcagcttgtgcccagaatgatgctattagccttgtaaagaggctccattatcgtatgaaccagaatggattggttagcagaaatgcaagagttgccaccagcttcgtgcacatatatgcaaaacatgggtgcatacagacagctatggatgtgtttcgtggaatcactgatgaattcaagactgtggagttgttcaatgctatgatacatggactcgctcaccatggttatggtgagaaagctatctcactttttgataaaatggaaagcctggggctccaacctgatgacatcacatttgtgggaatcctgtgcgcatgcagtcgcagtaacttggtcgaacaagggtgtaagatgttctcatcaatgctggacaagtacggtgtcaaaccagatgtcaagcatcacgcttgcatggctgatcttcttggaagagctggacgtcttgatgatgcttacaactttatccagaatatgcctttcaaagcaaatcttgtgatatggtcatctcttctgacagcttgcaagatccatggaaataacaagattaggaagcttgtagagaggcaaattctcggattagatgctacctacaagcctgaaaagctgaccttatctggcttattttctgatgagaagaggaaagagctatctgcaagggcgagaaaagctataaagcacaaatctgagcacagatgtacctagtagaactcacatcgaatgatactgtttatcagattgtaattactgatacttccgagctccaccctcagggaaaggtgattgattggatgcctgaagatgtccaaggcattggatttttttcaggatgcattgggagaaggctgcttggaatatcgagagacagctgctctagcattttccttgataaactcacttcctgaaaccccaacagaaggtgtcaccaaccattgtacatatggtacttgccattcatcactctgagtattcgctgaaaatataaagtaggggtgttagttccaatgttaggctaagttttgaaaggaaacatataggtcaatggtgatgcattttcaaatcttgtgtacaagctctggtagtcagcttctgatatggtaggttaatctctgttttcctggcgcagctgctaacctagatttgtcttgaattcactgcaaggattacaattaatcaggcacttgtgcaactgatcttatgacttctgggaatgagatggcagaatagagaaagactggtgaaagagctgtaagctctgagatgctcttttagggcccgtttggttggagagccaggggagtggagcggttccattccagatttagagggtggagcagctgcattccagattctgagagcggagtagaatcgttccattttctgtttggacccaccgcaaagagatagggagaagttgaacggtaggattccaccgttttttggagcgagcttgttccaaatccggtgggaatattcctgatttagagccgttccaccctgaccgctccgtttgctctccaaccaaaagcagaatggatcggctccatcccatctcactcaaccaaatggaccttagaagagcagtagatgaatctaagcggcaaatgtggatggaaatagttcagctagcttcaaccattattttttcagttgaagaggatactatgaatctatgatttggcaattcacttctaatggaatgtacttgtcattctttatataggattattaacttcaactttcagcggtatatataattccagtttacagaatgtagcttgtaagggtatggcgattttgctacagaagataacagggctagcgcaaaaatttggggggaaatcatctattgaatggagagtagacttttgttggaagttggaacaaaagttgctagatttgaggcaggtggccagcataccggaaagaatcagccggtgagctgtggtgtgtgggttatagttactggttgcaaggggtggtgactcgatactagcttccgtccctcccttggctacttgtgtcaggtggttctctcttggagtttgtgggtggactgctctactctgtagaagaagcgtctgggcatggaagcaatcttttctttggaacggaacctcttggagtggagttatgtggtgaaaagccatggatcagtgaagaagaggacctggagaaggcaatgtcgtcgggcctttggatctagccccgaggatgatggcttggttggtcaggttcaggtgtttatttcgtgcgtggagctgtgcggttacgtacaggatgtcagttgtcaggggaggtggtgtggtggccaaccactggaaagctaacttttgctctgagtataaaatatggtggcatccttcctggctatatactgtcttgaatgaagtaccaaactagagttggagagcaacctcaaaggcaggggcataagtgatcatgggaaagggacaatgcaaggctgctggtggctcaaagacgtacgttctgaagctggacatgcactgccaatgcaatggctgtgtcaagaagatgaaggacgcggtgaaggagatgatgagcctctcgcaaggggtggagagagctgatgtttcagcagaggcagaggcgggagaggtgagggtggaagtgacgggcggaattgacatggacccagcgaagctctgctgcctgctgcaagaggcgacgaagaagaagcgtgtgaggatagccgaagaagcgagcgtcccatcgcctgggcggcaaaccactctgtctggtcagggtcaggcagaggctgctggtggctggcggcgagatggcgcgggcaccttccctacaaccgtcccgatcccgagcgccccgccggcgccggcgccagaggaggaggcggaggcatggagcgagacgacggcgccttcggagcgttgccggtaccgctgggcggcgcctgtcagcacgttcggtgtgtgggctgcatcggacatcaccgggacgttggccatgttgtaccaccaccacctatgaaccccgcctcatgctgtgtataaaacgaagcagtccgcgccctctctctctccctctctctctctccctccctctctccctctctctctctctgtcgagttagatgggtgtttgatattttggacgcgtttgggcccggggttaaatttagtcctaggttttatatgccaaatatgagggttttaacatttactaatcataaattgataaggcttacttacgggtacctaaaagcttagggtgtgtttggatggagggacgaggaaggatgaagagagataggatgggatcattttaatttgacccgcgtttggtttggaggtccacagtcagggtcaaaaaatattgttcaaaaatggtggatgggactatccctcaaaaaataagggacggggtcaacccagggttgatcccgtctcatccctcgttgacaccgaaccaaacactaccttaaattatcatcacgcaatgcagtcctgagatcccaaacgcgtcgtctataggttgggacaacagcaacgcggcaccgtactagtgcaaagtggggcgaagccgtgaagtgacgcggaagtcgggtgtgtagcagcgcgtcaaccacgcaagtcaaggagggaatcaccacaaaaaaatatagaatagtttcagtttgtatccaccttgattggttatccgcacccttttatcttagatcatcgtatgtattgactttatttgagattatgtttggttgattgtatgtgtgagtcatagtctacatggtgcatacaaaataagtcattttgatattattaacatgcatccatctatatgatgcttaaaatt

SEQ ID NO: 51904 - DNA, 4606 bp, Zea Mays
ctgctatactcgatgggccgggcgcccgggcctcgttgcatctcctaaagctcaccggatacgtattcctcagttacgccttcgtcgcacgttcacgcctccaccgattcaaacgccggaacacccacgcggtcggcggaggcctccccgtcgtttgcccatgcccttgcgccgccatgccggccgcgccatcgccgccgcgcccggcggtttcctccacctctccctgctcgcctccctccgccaccgcccctcgcttcaggcgcacgcgcagctcctgctcttgggcctcccgctgccccccgccgcggcctcacacctcctccgcccgcacctccgcgccggccatccgcttgcctcgctccgcctcttcctccgcgtgctccgcgaccaccaccccgccacaaccggcgccaccgcttcccaggaggagggggctgttcccgactcccgctccctctccgcggttctcgcagcctgctcccgcctcgagtccccttcccccggactctgcatccacgccttcctcctaaagtcgggattcgcctccgacgtcttcgccgccaattcgctcctccatttctatgccgcgttcggtctccacgccctcgcgtgcaagctgttcgacgaaatgccgaccagggacaccgtgtcgttcaacaccctgatcggttcgtacgtgcagtcgggacgcgttgaacgcgcgttggtggtgttcaggaacatggtggagggagggttccggctggacgagtggaccatcagagcgttgctgggtgcctgtgctgggctaggcgatttcatggtggccaaagctgcgcatgggtttgccagcaggacattgaggcatagattgctcgactctggagaggtggtgattgggttagtggacatgtatgtcaagtgtggtgcagtgcacctcgccaggaaaacatttgatttgtttggggagaaggtgaaggacgtgagagtttggagtgtgatggtatcagggtatgctagggttggggagatcggcatggctcggaagttgtttgatgagatgcccaataaggacttggttgcgtggacagttttggtcggtggatatgtgcaggcaggtagatacaaggaggcacttgggttgttcgaggagatggaagcggcaggacttgaggctgatgagatgacggtcgtcaccgtgctttcagcttgtgcccagaatgatgctattagccttgtaaagaggctccattatcgtatgaaccagaatggattggttagcagaaatgcaagagttgccaccagcttcgtgcacatatatgcaaaacatgggtgcatacagacagctatggatgtgtttcgtggaatcactgatgaattcaagactgtggagttgttcaatgctatgatacatggactcgctcaccatggttatggtgagaaagctatctcactttttgataaaatggaaagcctggggctccaacctgatgacatcacatttgtgggaatcctgtgcgcatgcagtcgcagtaacttggtcgaacaagggtgtaagatgttctcatcaatgctggacaagtacggtgtcaaaccagatgtcaagcatcacgcttgcatggctgatcttcttggaagagctggacgtcttgatgatgcttacaactttatccagaatatgcctttcaaagcaaatcttgtgatatggtcatctcttctgacagcttgcaagatccatggaaataacaagattaggaagcttgtagagaggcaaattctcggattagatgctacctacaagcctgaaaagctgaccttatctggcttattttctgatgagaagaggaaagagctatctgcaagggcgagaaaagctataaagcacaaatctgagcacagatgtacctagtagaactcacatcgaatgatactgtttatcagattgtaattactgatacttccgagctccaccctcagggaaaggtgattgattggatgcctgaagatgtccaaggcattggatttttttcaggatgcattgggagaaggctgcttggaatatcgagagacagctgctctagcattttccttgataaactcacttcctgaaaccccaacagaaggtgtcaccaaccattgtacatatggtacttgccattcatcactctgagtattcgctgaaaatataaagtaggggtgttagttccaatgttaggctaagttttgaaaggaaacatataggtcaatggtgatgcattttcaaatcttgtgtacaagctctggtagtcagcttctgatatggtaggttaatctctgttttcctggcgcagctgctaacctagatttgtcttgaattcactgcaaggattacaattaatcaggcacttgtgcaactgatcttatgacttctgggaatgagatggcagaatagagaaagactggtgaaagagctgtaagctctgagatgctcttttagggcccgtttggttggagagccaggggagtggagcggttccattccagatttagagggtggagcagctgcattccagattctgagagcggagtagaatcgttccattttctgtttggacccaccgcaaagagatagggagaagttgaacggtaggattccaccgttttttggagcgagcttgttccaaatccggtgggaatattcctgatttagagccgttccaccctgaccgctccgtttgctctccaaccaaaagcagaatggatcggctccatcccatctcactcaaccaaatggaccttagaagagcagtagatgaatctaagcggcaaatgtggatggaaatagttcagctagcttcaaccattattttttcagttgaagaggatactatgaatctatgatttggcaattcacttctaatggaatgtacttgtcattctttatataggattattaacttcaactttcagcggtatatataattccagtttacagtacaggatgtcagttgtcaggggaggtggtgtggtggccaaccactggaaagctaacttttgctctgagtataaaatatggtggcatccttcctggctatatactgtcttgaatgaagtaccaaactagagttggagagcaacctcaaaggcaggggcataagtgatcatgggaaagggacaatgcaaggctgctggtggctcaaagacgtacgttctgaagctggacatgcactgccaatgcaatggctgtgtcaagaagatgaaggacgcggtgaaggagatgatgagcctctcgcaaggtatgtatgtgcttttgtcgtgtactgtgtactactactactacacgcctgctgtctggctggctggctgcgtcattgaaagtggaggtacaggggtggagagagctgatgtttcagcagaggcagaggcgggagaggtgagggtggaagtgacgggcggaattgacatggacccagcgaagctctgctgcctgctgcaagaggcgacgaagaagaagcgtgtgaggatagccgaagaagcgagcgtcccatcgcctgggcggcaaaccactctgtctggtcagggtcaggcagaggctgctggtggctggcggcgagatggcgcgggcaccttccctacaaccgtcccgatcccgagcgccccgccggcgccggcgccagaggaggaggcggaggcatggagcgagacgacggcgccttcggagcgttgccggtaccgctgggcggcgcctgtcagcacgttcggtgtgtgggctgcatcggacatcaccgggacgttggccatgttgtaccaccaccacctatgaaccccgcctcatgctgtgtataaaacgaagcagtccgcgccctctctctctccctctctctctctccctccctctctccctctctctctctctgtcgagttagatgggtgtttgatattttggacgcgtttgggcccggggttaaatttagtcctaggttttatatgccaaatatgagggttttaacatttactaatcataaattgataaggcttacttacgggtacctaaaagcttagggtgtgtttggatggagggacgaggaaggatgaagagagataggatgggatcattttaatttgacccgcgtttggtttggaggtccacagtcagggtcaaaaaatattgttcaaaaatggtggatgggactatccctcaaaaaataagggacggggtcaacccagggttgatcccgtctcatccctcgttgacaccgaaccaaacactaccttaaattatcatcacgcaatgcagtcctgagatcccaaacgcgtcgtctataggttgggacaacagcaacgcggcaccgtactagtgcaaagtggggcgaagccgtgaagtgacgcggaagtcgggtgtgtagcagcgcgtcaaccacgcaagtcaaggagggaatcaccacaaaaaaatatagaatagtttcagtttgtatccaccttgattggttatccgcacccttttatcttagatcatcgtatgtattgactttatttgagattatgtttggttgattgtatgtgtgagtcatagtctacatggtgcatacaaaataagtcattttgatattattaacatgcatccatctatatgatgcttaaaatt

SEQ ID NO: 51905 - DNA, 5012 bp, Zea Mays
ctgctatactcgatgggccgggcgcccgggcctcgttgcatctcctaaagctcaccggatacgtattcctcagttacgccttcgtcgcacgttcacgcctccaccgattcaaacgccggaacacccacgcggtcggcggaggcctccccgtcgtttgcccatgcccttgcgccgccatgccggccgcgccatcgccgccgcgcccggcggtttcctccacctctccctgctcgcctccctccgccaccgcccctcgcttcaggcgcacgcgcagctcctgctcttgggcctcccgctgccccccgccgcggcctcacacctcctccgcccgcacctccgcgccggccatccgcttgcctcgctccgcctcttcctccgcgtgctccgcgaccaccaccccgccacaaccggcgccaccgcttcccaggaggagggggctgttcccgactcccgctccctctccgcggttctcgcagcctgctcccgcctcgagtccccttcccccggactctgcatccacgccttcctcctaaagtcgggattcgcctccgacgtcttcgccgccaattcgctcctccatttctatgccgcgttcggtctccacgccctcgcgtgcaagctgttcgacgaaatgccgaccagggacaccgtgtcgttcaacaccctgatcggttcgtacgtgcagtcgggacgcgttgaacgcgcgttggtggtgttcaggaacatggtggagggagggttccggctggacgagtggaccatcagagcgttgctgggtgcctgtgctgggctaggcgatttcatggtggccaaagctgcgcatgggtttgccagcaggacattgaggcatagattgctcgactctggagaggtggtgattgggttagtggacatgtatgtcaagtgtggtgcagtgcacctcgccaggaaaacatttgatttgtttggggagaaggtgaaggacgtgagagtttggagtgtgatggtatcagggtatgctagggttggggagatcggcatggctcggaagttgtttgatgagatgcccaataaggacttggttgcgtggacagttttggtcggtggatatgtgcaggcaggtagatacaaggaggcacttgggttgttcgaggagatggaagcggcaggacttgaggctgatgagatgacggtcgtcaccgtgctttcagcttgtgcccagaatgatgctattagccttgtaaagaggctccattatcgtatgaaccagaatggattggttagcagaaatgcaagagttgccaccagcttcgtgcacatatatgcaaaacatgggtgcatacagacagctatggatgtgtttcgtggaatcactgatgaattcaagactgtggagttgttcaatgctatgatacatggactcgctcaccatggttatggtgagaaagctatctcactttttgataaaatggaaagcctggggctccaacctgatgacatcacatttgtgggaatcctgtgcgcatgcagtcgcagtaacttggtcgaacaagggtgtaagatgttctcatcaatgctggacaagtacggtgtcaaaccagatgtcaagcatcacgcttgcatggctgatcttcttggaagagctggacgtcttgatgatgcttacaactttatccagaatatgcctttcaaagcaaatcttgtgatatggtcatctcttctgacagcttgcaagatccatggaaataacaagattaggaagcttgtagagaggcaaattctcggattagatgctacctacaagcctgaaaagctgaccttatctggcttattttctgatgagaagaggaaagagctatctgcaagggcgagaaaagctataaagcacaaatctgagcacagatgtacctagtagaactcacatcgaatgatactgtttatcagattgtaattactgatacttccgagctccaccctcagggaaaggtgattgattggatgcctgaagatgtccaaggcattggatttttttcaggatgcattgggagaaggctgcttggaatatcgagagacagctgctctagcattttccttgataaactcacttcctgaaaccccaacagaaggtgtcaccaaccattgtacatatggtacttgccattcatcactctgagtattcgctgaaaatataaagtaggggtgttagttccaatgttaggctaagttttgaaaggaaacatataggtcaatggtgatgcattttcaaatcttgtgtacaagctctggtagtcagcttctgatatggtaggttaatctctgttttcctggcgcagctgctaacctagatttgtcttgaattcactgcaaggattacaattaatcaggcacttgtgcaactgatcttatgacttctgggaatgagatggcagaatagagaaagactggtgaaagagctgtaagctctgagatgctcttttagggcccgtttggttggagagccaggggagtggagcggttccattccagatttagagggtggagcagctgcattccagattctgagagcggagtagaatcgttccattttctgtttggacccaccgcaaagagatagggagaagttgaacggtaggattccaccgttttttggagcgagcttgttccaaatccggtgggaatattcctgatttagagccgttccaccctgaccgctccgtttgctctccaaccaaaagcagaatggatcggctccatcccatctcactcaaccaaatggaccttagaagagcagtagatgaatctaagcggcaaatgtggatggaaatagttcagctagcttcaaccattattttttcagttgaagaggatactatgaatctatgatttggcaattcacttctaatggaatgtacttgtcattctttatataggattattaacttcaactttcagcggtatatataattccagtttacagaatgtagcttgtaagggtatggcgattttgctacagaagataacagggctagcgcaaaaatttggggggaaatcatctattgaatggagagtagacttttgttggaagttggaacaaaagttgctagatttgaggcaggtggccagcataccggaaagaatcagccggtgagctgtggtgtgtgggttatagttactggttgcaaggggtggtgactcgatactagcttccgtccctcccttggctacttgtgtcaggtggttctctcttggagtttgtgggtggactgctctactctgtagaagaagcgtctgggcatggaagcaatcttttctttggaacggaacctcttggagtggagttatgtggtgaaaagccatggatcagtgaagaagaggacctggagaaggcaatgtcgtcgggcctttggatctagccccgaggatgatggcttggttggtcaggttcaggtgtttatttcgtgcgtggagctgtgcggttacggatgtcagttgtcaggggaggtggtgtggtggccaaccactggaaagctaacttttgctctgagtataaaatatggtggcatccttcctggctatatactgtcttgaatgaagtaccaaactagagttggagagcaacctcaaaggcaggggcataagtgatcatgggaaagggacaatgcaaggctgctggtggctcaaagacgtacgttctgaagctggacatgcactgccaatgcaatggctgtgtcaagaagatgaaggacgcggtgaaggagatgatgagcctctcgcaaggggtggagagagctgatgtttcagcagaggcagaggcgggagaggtgagggtggaagtgacgggcggaattgacatggacccagcgaagctctgctgcctgctgcaagaggcgacgaagaagaagcgtgtgaggatagccgaagaagcgagcgtcccatcgcctgggcggcaaaccactctgtctggtcagggtcaggcagaggctgctggtggctggcggcgagatggcgcgggcaccttccctacaaccgtcccgatcccgagcgccccgccggcgccggcgccagaggaggaggcggaggcatggagcgagacgacggcgccttcggagcgttgccggtaccgctgggcggcgcctgtcagcacgttcggtgtgtgggctgcatcggacatcaccgggacgttggccatgttgtaccaccaccacctatgaaccccgcctcatgctgtgtataaaacgaagcagtccgcgccctctctctctccctctctctctctccctccctctctccctctctctctctctgtcgagttagatgggtgtttgatattttggacgcgtttgggcccggggttaaatttagtcctaggttttatatgccaaatatgagggttttaacatttactaatcataaattgataaggcttacttacgggtacctaaaagcttagggtgtgtttggatggagggacgaggaaggatgaagagagataggatgggatcattttaatttgacccgcgtttggtttggaggtccacagtcagggtcaaaaaatattgttcaaaaatggtggatgggactatccctcaaaaaataagggacggggtcaacccagggttgatcccgtctcatccctcgttgacaccgaaccaaacactaccttaaattatcatcacgcaatgcagtcctgagatcccaaacgcgtcgtctataggttgggacaacagcaacgcggcaccgtactagtgcaaagtggggcgaagccgtgaagtgacgcggaagtcgggtgtgtagcagcgcgtcaaccacgcaagtcaaggagggaatcaccacaaaaaaatatagaatagtttcagtttgtatccaccttgattggttatccgcacccttttatcttagatcatcgtatgtattgactttatttgagattatgtttggttgattgtatgtgtgagtcatagtctacatggtgcatacaaaataagtcattttgatattattaacatgcatccatctatatgatgcttaaaatt

SEQ ID NO: 51906 - DNA, 3686 bp, Zea Mays
ctgctatactcgatgggccgggcgcccgggcctcgttgcatctcctaaagctcaccggatacgtattcctcagttacgccttcgtcgcacgttcacgcctccaccgattcaaacgccggaacacccacgcggtcggcggaggcctccccgtcgtttgcccatgcccttgcgccgccatgccggccgcgccatcgccgccgcgcccggcggtttcctccacctctccctgctcgcctccctccgccaccgcccctcgcttcaggcgcacgcgcagctcctgctcttgggcctcccgctgccccccgccgcggcctcacacctcctccgcccgcacctccgcgccggccatccgcttgcctcgctccgcctcttcctccgcgtgctccgcgaccaccaccccgccacaaccggcgccaccgcttcccaggaggagggggctgttcccgactcccgctccctctccgcggttctcgcagcctgctcccgcctcgagtccccttcccccggactctgcatccacgccttcctcctaaagtcgggattcgcctccgacgtcttcgccgccaattcgctcctccatttctatgccgcgttcggtctccacgccctcgcgtgcaagctgttcgacgaaatgccgaccagggacaccgtgtcgttcaacaccctgatcggttcgtacgtgcagtcgggacgcgttgaacgcgcgttggtggtgttcaggaacatggtggagggagggttccggctggacgagtggaccatcagagcgttgctgggtgcctgtgctgggctaggcgatttcatggtggccaaagctgcgcatgggtttgccagcaggacattgaggcatagattgctcgactctggagaggtggtgattgggttagtggacatgtatgtcaagtgtggtgcagtgcacctcgccaggaaaacatttgatttgtttggggagaaggtgaaggacgtgagagtttggagtgtgatggtatcagggtatgctagggttggggagatcggcatggctcggaagttgtttgatgagatgcccaataaggacttggttgcgtggacagttttggtcggtggatatgtgcaggcaggtagatacaaggaggcacttgggttgttcgaggagatggaagcggcaggacttgaggctgatgagatgacggtcgtcaccgtgctttcagcttgtgcccagaatgatgctattagccttgtaaagaggctccattatcgtatgaaccagaatggattggttagcagaaatgcaagagttgccaccagcttcgtgcacatatatgcaaaacatgggtgcatacagacagctatggatgtgtttcgtggaatcactgatgaattcaagactgtggagttgttcaatgctatgatacatggactcgctcaccatggttatggtgagaaagctatctcactttttgataaaatggaaagcctggggctccaacctgatgacatcacatttgtgggaatcctgtgcgcatgcagtcgcagtaacttggtcgaacaagggtgtaagatgttctcatcaatgctggacaagtacggtgtcaaaccagatgtcaagcatcacgcttgcatggctgatcttcttggaagagctggacgtcttgatgatgcttacaactttatccagaatatgcctttcaaagcaaatcttgtgatatggtcatctcttctgacagcttgcaagatccatggaaataacaagattaggaagcttgtagagaggcaaattctcggattagatgctacctacaagcctgaaaagctgaccttatctggcttattttctgatgagaagaggaaagagctatctgcaagggcgagaaaagctataaagcacaaatctgagcacagatgtacctagtagaactcacatcgaatgatactgtttatcagattgtaattactgatacttccgagctccaccctcagggaaaggtgattgattggatgcctgaagatgtccaaggcattggatttttttcaggatgcattgggagaaggctgcttggaatatcgagagacagctgctctagcattttccttgataaactcacttcctgaaaccccaacagaaggtgtcaccaaccattgtacatatgtacaggatgtcagttgtcaggggaggtggtgtggtggccaaccactggaaagctaacttttgctctgagtataaaatatggtggcatccttcctggctatatactgtcttgaatgaagtaccaaactagagttggagagcaacctcaaaggcaggggcataagtgatcatgggaaagggacaatgcaaggctgctggtggctcaaagacgtacgttctgaagctggacatgcactgccaatgcaatggctgtgtcaagaagatgaaggacgcggtgaaggagatgatgagcctctcgcaaggggtggagagagctgatgtttcagcagaggcagaggcgggagaggtgagggtggaagtgacgggcggaattgacatggacccagcgaagctctgctgcctgctgcaagaggcgacgaagaagaagcgtgtgaggatagccgaagaagcgagcgtcccatcgcctgggcggcaaaccactctgtctggtcagggtcaggcagaggctgctggtggctggcggcgagatggcgcgggcaccttccctacaaccgtcccgatcccgagcgccccgccggcgccggcgccagaggaggaggcggaggcatggagcgagacgacggcgccttcggagcgttgccggtaccgctgggcggcgcctgtcagcacgttcggtgtgtgggctgcatcggacatcaccgggacgttggccatgttgtaccaccaccacctatgaaccccgcctcatgctgtgtataaaacgaagcagtccgcgccctctctctctccctctctctctctccctccctctctccctctctctctctctgtcgagttagatgggtgtttgatattttggacgcgtttgggcccggggttaaatttagtcctaggttttatatgccaaatatgagggttttaacatttactaatcataaattgataaggcttacttacgggtacctaaaagcttagggtgtgtttggatggagggacgaggaaggatgaagagagataggatgggatcattttaatttgacccgcgtttggtttggaggtccacagtcagggtcaaaaaatattgttcaaaaatggtggatgggactatccctcaaaaaataagggacggggtcaacccagggttgatcccgtctcatccctcgttgacaccgaaccaaacactaccttaaattatcatcacgcaatgcagtcctgagatcccaaacgcgtcgtctataggttgggacaacagcaacgcggcaccgtactagtgcaaagtggggcgaagccgtgaagtgacgcggaagtcgggtgtgtagcagcgcgtcaaccacgcaagtcaaggagggaatcaccacaaaaaaatatagaatagtttcagtttgtatccaccttgattggttatccgcacccttttatcttagatcatcgtatgtattgactttatttgagattatgtttggttgattgtatgtgtgagtcatagtctacatggtgcatacaaaataagtcattttgatattattaacatgcatccatctatatgatgcttaaaatt

SEQ ID NO: 51907 - DNA, 1556 bp, Zea Mays
gtttgtgattctgattatgtttcttctggatgtcagttgtcaggggaggtggtgtggtggccaaccactggaaagctaacttttgctctgagtataaaatatggtggcatccttcctggctatatactgtcttgaatgaagtaccaaactagagttggagagcaacctcaaaggcaggggcataagtgatcatgggaaagggacaatgcaaggctgctggtggctcaaagacgtacgttctgaagctggacatgcactgccaatgcaatggctgtgtcaagaagatgaaggacgcggtgaaggagatgatgagcctctcgcaagcagaggcagaggcgggagaggtgagggtggaagtgacgggcggaattgacatggacccagcgaagctctgctgcctgctgcaagaggcgacgaagaagaagcgtgtgaggatagccgaagaagcgagcgtcccatcgcctgggcggcaaaccactctgtctggtcagggtcaggcagaggctgctggtggctggcggcgagatggcgcgggcaccttccctacaaccgtcccgatcccgagcgccccgccggcgccggcgccagaggaggaggcggaggcatggagcgagacgacggcgccttcggagcgttgccggtaccgctgggcggcgcctgtcagcacgttcggtgtgtgggctgcatcggacatcaccgggacgttggccatgttgtaccaccaccacctatgaaccccgcctcatgctgtgtataaaacgaagcagtccgcgccctctctctctccctctctctctctccctccctctctccctctctctctctctgtcgagttagatgggtgtttgatattttggacgcgtttgggcccggggttaaatttagtcctaggttttatatgccaaatatgagggttttaacatttactaatcataaattgataaggcttacttacgggtacctaaaagcttagggtgtgtttggatggagggacgaggaaggatgaagagagataggatgggatcattttaatttgacccgcgtttggtttggaggtccacagtcagggtcaaaaaatattgttcaaaaatggtggatgggactatccctcaaaaaataagggacggggtcaacccagggttgatcccgtctcatccctcgttgacaccgaaccaaacactaccttaaattatcatcacgcaatgcagtcctgagatcccaaacgcgtcgtctataggttgggacaacagcaacgcggcaccgtactagtgcaaagtggggcgaagccgtgaagtgacgcggaagtcgggtgtgtagcagcgcgtcaaccacgcaagtcaaggagggaatcaccacaaaaaaatatagaatagtttcagtttgtatccaccttgattggttatccgcacccttttatcttagatcatcgtatgtattgactttatttgagattatgtttggttgattgtatgtgtgagtcatagtctacatggtgcatacaaaataagtcattttgatattattaacatgcatccatctatatgatgcttaaaatt

SEQ ID NO: 51908 - DNA, 927 bp, Zea Mays
gggacatctgactctgtcacagtttaacaagtgcatgtcctgcagcatgggaaaccagaagagcgttctacaataattacacaactcgctggacagatagtgaaaatgagccagcagaaatttgcttctaatgttgttgaaaagtgtcttacttttggtaatcctgagcaacgtcagattctgatcactgaaatgcttggcacaactgatgagaatgagccgttacaggcaatgatgaaagaccagttcgcaaactatgtggtgcagaaggttctggagatatgtgatgaccagaaccgtgaattgattctttcccgtatcaaggtccacttgaatgcactgaaaagatacacctatgggaagcatatcgtggcacgtgttgagaagcttattgctgcaggagaacggcgcattggtgccccatcctcttgctgagatggcaataaagctatatacaggtcgcagaataacacctgtacagacagacagggatagcgaggcctagctttttaccattaccagtagtcggtaatattgagcgacggagaggttaaaaaaggctcccaaatcctttgatgtaaataaaggatagccgctggaaataaataaaaagaatgagaaaagatgaagagattttgcttgtccttgagggaagagttgtatatttgtgtggtttattttcccctcttgaagcagatggataaatgttttaggatcatagatgatgggaagcaagggcagctgtagattatcctttctttttttccttgggtttcattagtcaatgtataatgtattaatgttcatggtgatgctaatctctgtaaagcctgccttgagtttactgacattttcctgaaatgaaattaaatgcatgtttcctggtacttgtgaaatgcctgcgtctaggcagctcatcaaatatca

SEQ ID NO: 51909 - DNA, 973 bp, Zea Mays
gtggtatttgactttcagtcgttttcttttgttttaaagtgttgtattatgttacaatgttctgtactgacttgccgttgccttacgctacatgttagttcatccatttttgagagatagctttttataatcccattttttgttttgcagcatgtcctgcagcatgggaaaccagaagagcgttctacaataattacacaactcgctggacagatagtgaaaatgagccagcagaaatttgcttctaatgttgttgaaaagtgtcttacttttggcaatgatgaaagaccagttcgcaaactatgtggtgcagaaggttctggagatatgtgatgaccagaaccgtgaattgattctttcccgtatcaaggtccacttgaatgcactgaaaagatacacctatgggaagcatatcgtggcacgtgttgagaagcttattgctgcaggagaacggcgcattggtgccccatcctcttgctgagatggcaataaagctatatacaggtcgcagaataacacctgtacagacagacagggatagcgaggcctagctttttaccattaccagtagtcggtaatattgagcgacggagaggttaaaaaaggctcccaaatcctttgatgtaaataaaggatagccgctggaaataaataaaaagaatgagaaaagatgaagagattttgcttgtccttgagggaagagttgtatatttgtgtggtttattttcccctcttgaagcagatggataaatgttttaggatcatagatgatgggaagcaagggcagctgtagattatcctttctttttttccttgggtttcattagtcaatgtataatgtattaatgttcatggtgatgctaatctctgtaaagcctgccttgagtttactgacattttcctgaaatgaaattaaatgcatgtttcctggtacttgtgaaatgcctgcgtctaggcagctcatcaaatatca

SEQ ID NO: 51910 - DNA, 3690 bp, Zea Mays
ggacggaggaagaattccttcctggtcgtcacggggagtggagacgagggtgacgggaggagcacgagggcagagggagggggaagacggatggatcgccggacgcgacaaatttattggagacgactcgcaatcgctctgtgtccccgcgccgccgcaactgcacgagagagagagcagccaacgttgcagaggagacggagtggaatcaggccttcgatttctccaaggacaccaccttcctcaccaattgcatgaaggagaccaagggtacgtagcgtagcgtagcccaggatatactccgcaatcgcatcctcctgaccagcagataccaacgacaacaggggacctccagcagcggatctgcacggccgccgagatgaggttctacttcgacagcctgatgggcggcgacgacacggcggaggccaactacgtgaggcccaacgtcaactgcaaccggtcgtcgtggatcgacgggtgcgagcccggctgggcgtgcagcgccggggccgaccagaagatcaacctgcaggacaccaagaacatgccctacaggccgctcaagtgccagtcctgctgcccaggattcttctgcccgcatggcctcacctgcatgatcccttgccctctgggtgcctactgtccacggtccagcctgaatacctccacaggcatctgtgacccctacaactaccagccgccgcccgggaaccctaaccacacctgcggagccgccgacatctgggccgatgtggtcacgacagatgacatcttctgccccgctggattctactgccccagcactatacagaagctcccttgtagtagtattattgcaggaagggatcaacctcacagactagatgctacaagaagagctcttgcccaccaaactctgctactcaggacatcacaatcttcggcgcgctgcttgtggtcgcgtcctgcttagtcctcctcatcatctacaacttctccggccaaatcctgaccaaccgcgagaagcggcaggccaagtcccgggaggccgccgcgaggcacgcgcgggagacagcgcaggcccgggagaggtggaagtcggccaagggcgtggccaagaaggccggcgtgggcctgcagtcgcagctgtcccgcaccttctcgcgcaagaagggcggtggcggtggcggtgggcagtcgtcgcagctgcaggccggagcgtccacaaaggtaggtgatgacgcgggcgggaagaagcacagcaacctcgccgacatggtgcggtccatcgacgacaacccggagagcgacgaagggttcaacctggaggtaggggacaaggcgctgaagaagccgacgggcaaggagatgcacacccggagccagatcttcaagtacgcgtacggccagatcgagagggagaaggcgatgcagcaggagaaccacaacatgaccttctcgggcgtcatctccatggcgcaggaccacgacgtgagcacgcgcctgtccgtcgagatcgccttcaaggacctgaccctcacgctcaagggcagcaagaagaagctcctgcggtccgtcacggggaagctctcgcccgggaaggtggcggccgtcatgggcccgtccggcgccgggaagaccaccttcctcagcgccatcgccggcaaggccacagggtgcgacacgtcgggcctggtgctgataaacggcaggatcgagccgatccgagggtacaagaagatcatcggcttcgtaccccaggacgacatcgtccacggcaacctgaccgtggaggagaacctgtggttcaacgcgaggtgcaggctgtcggcggagatgtcgaaagccgacaaggtgctcgtcgtggagagggtcatcgagtcccttgggctgcagccggtccgggactccctggtggggacggtggagcagcgcggcatctccggcgggcagcggaagagggtcaacgtcggcctggagatggtgatggagccgtcggtgctgatcctggacgagccgacgtctggactggacagcgcatcctcgctgctcctgctccgcgccctccgccgcgaggctctcgagggcgtcaacatctccatggtggtccaccagcccagctacacactgtacaggatgttcgacgacctgatcctactggccaaggggggcatgacggtgtaccacgggccggtgaagaaggtggaggagtacttcacagggctgggcatcgtggtgccggagcgcgtgaacccgccggactactacatcgacatcctggagggcatcgtgaagccgagcctgagctcgggaggcagcgtcaaggacctgcccatcaggtggatggtgcacaacggctacgacgtgccgcgggacatgctgcagagctcgtcggaatcggagtccacgtccaggggcgacgcgggacacgctccggacgagccgtcgtccgtggtctcgctgctctggggcaacctcagggacatcctcgggcagaagaaggacgagtacgactacaacaagacgtcggaggacctgtccaagcgcaagactccaggcatactcaggcagtacagatacttcctaggaaggtgcggcaagcagaggctccgtgacgccaggatacagggagtggactacctgatcctctgtctcgccggcatatgcctgggaacgctggccaaagtgagcgacgagacgttcggggcgctggggtacacctacaccgtcatcgctgtctctctgctgtgcaagatcggagccctgcgttccttcacgctggacaagataaactactggagggagcgagcctccgggatgagctcgctggcctacttcctgtccaaggacagcatcgaccacttcaacacggtggtgaagcccatcgtctacctctccatgttctacttcttcaacaacccgcggtcctccatctgggagaactacatcgtcctcctcgcgctcgtctactgcgtcaccggcatcggatacaccttcgcagtcttcttccagccaggttccgcgcagctgtggtcggccttgcttccggtggttttgactctgatagccactcagcagaaggacactatccttgccgacctgtgctacaccaagtgggctctggaagccttcgtcattgccaacgctcagaactattccggcgtgtggctcataacccggtgtggctcgctggtcaggagcggctacgatatcgagcacgaggctctctgtatagcggtcctcatcgccaacggggtactcttccgctgtgtagccttcttctgcatggtcaccttccagaagaactgagagaggtcggtcaaggaaaacacacccgtgattccgtgaactttctatgcccacgtagcagctctgtttttgttaatttcagtgcaataggattgtagattagagcccctcttggtaaggtatgtcagtatgtgtagatgaggacagattcttgaatagcaggcaactatcagggatgccctaaattacagaggcggtttcttgcctaacaccaatgtaaatttgatatgcaaattcagtgtatatatgggtacgacgactaatcatgaaatctgtagctcttcaccagcttccagcacaagtttaaagtcataacaaccatctgtaagaggcgccacaagcaatccgtgaatgaatgcaggcacacaactgactacatgatcagaaatgcgggcagtc

SEQ ID NO: 51911 - DNA, 7402 bp, Zea Mays
agtcactgctgcttttccatctctttggttggcaagaaaatgctagtagaaaaagaaagtcacctttttgtggggccagggtcccaactaacaacttctttggcacgctcttcaaagcggccgtttacacgaaaccacacgacacccccatggcacatggcaagagtgaatctgcacacagtttatgtacaaaccctaaacatgtttttttaaaattatcttaaacattctttaagataatgatataaagttccagcatgtatcatttcatgggatggtagtggtatacgtaggagtaacaatgaactctaaattttaccctatataagattggattagggtcaagacttatttctattcattttgaactaatttttttttgagccctcccattttgtaaagaagcatttgaatcacaatacattaccatccctagatacacgtctgatagtcaagatagagatgaaagccataagacttgcacgtacaagaaacacggccattgggcgttgattcgaatactacttattagtatgtgattttgtcttttcttcggttgtgaataaatagaatatagaatttgttatgcaaatccatatattgttttagtgtcgcgcttgttagactatcttcgacactttatttatctacatttatatattcaaacttcactctacgaacaatgcaacataatattcagataattttttcacacttttcgttgtagggagcaaacaatgcaaaaaaaatcattcttattttcatgatgtacttaagaacataactaaatattaacacaaaattatatgcatatctattttaaaatattaaatttatcctgtaatttggatgtttgagatccatccctaaataagaagtaagcttcattgcagttctggaagctccaaccaaacttcataaagacatataacataaaagtttcccatcttctctatcacaccatgaaaaaggtacacctctttttcatgcatcatgaaccaccgtaaaaaaccaatacatcatcctaaaaattacatgcatagaagtattagatttagcctcttctctgtcacactatgaaaaagctacacctttttttcatgcatcatgaaccactgtcaaaaccaatgcatcatcctaaaaattttatgcatagaagtattatatttagccttgttaaataacatatcatctctattcaaccaaattgccctacagagtacaggcgcacatagaaaaattttgttttccaagctttggacttagtccacgtagccaagaactaaaccaattagcaaagctattaggcaggaacgaagccggaaattttttgacatgagctaaattaaagcgctacaacgaaataatctcattaaatcacctacaatatataatagtttgcatgttttaaaatttaggaggagcttcggtggggctctataggttcgggagtggtagggggattggagccccacccaccgtaccactaaatccgtccctgctagtaggtggccttttgtcaggaagaacatcttgtcaaatcaaagttctacatggcccgagctgtgaatatgacattcttactaaagttgcaccaaaaaacatctctcctatttgtgaagtggcctagtactacttttgacgataagtcaaaccagatgatctggtttccaaaaaccaaacattgtctagaagacacattaagtggaatagtcttaaggaatctgccaccatcattttaccttcatgcctcacaattctaaataagctagggtaaacctcactaaaaggtttgtcacctaaccacatttccttccaaaacctcacttggtccccattctgcacgttaaaagtgtcacaagacaacaacatcttctgccttcataaagtgatccaaaattgtgaatcccctatcctatgctgcacctaagttatagatttattagatagatatttccttcttagaattgccaagccccatccccattaatcaatccaaatatccgtgtgctcaagagacacctattttgaagttctaggttatgtattcctagatcaccaaaatcttttggcatacatagagcactccacttagcaagatgatatttctttttatactcctactccactagaacaaataggagcgatagtactctaaattttaagaactcgtctaggggtctcaacaaaagataacataaacatagccaagctctttacacactaaattaatgaggacaagacgcctgccaacctagagtagtttttctttgtagctatagaatttttttctagaaccttttcgtaatacaagatcaatccttattggtagtttaggaaaacctagttatctaaaaggagaaatggctaaccggcacacaaattaattgtgcatactcgtattcaaattctaagttgagccatagcttgttgagacaaaaaaaggaaatagttcgcaggagttttgtctgatacgaccataagataattagtagagtattagcgaatgagattctaaatataaaggtttttttgggaggtgtttgtgtgagttcaaaaacaatggttgctattgtttgggatgcaaggcacctcatataaccagggttggatatcgagccaacttagctccgttcggtctagctcaagctaactcattaaaatatcgagctggatcaatcagtctcattaagataatgagctagagaggcacctcgactcatctcgttttgtgagctcaagctaactcgcttagcttatgagccaaaaaatacaatatacatatacatacaacattttatccatttcatatttaatttaaacaattctaataccataataaattagcattatatggtcacaacggacaactcacatatatctcgttgccggctctatttgtaccaaaataaaatttgttttattattttaatggatttatacaatatttgatgtatgtattatgtgttgaatgtagacataaaaatagagagttaaaacgaatactattttaagacggggaaatattattcgctgactcgtatcaagagagtcgaatataggatctaaggtgatatcgaggctctggtagccactttgctgcgtatcttttacgcttgccaaatctttggctttgatatatatatatattttaaaaaagtcaaccgaagaagaagaaaagagaggatatgagaggaatgcgcccaccattgttcctcagcagtcagcagtactcccgccgcggatgaatgggtgcgtggtgggcccatctggaagacttggaccaagactttgactcgatcccattcaattcgttcccatcaccggtcctgcacagagacggagaggtcggtgttcgagtccaccaccaccgccgccgccgccgtcctccctacggaccaaactctagctgggccacggcccaagtggagccattccgcagcccggctcggtttcttctaggccgtcccgcggcccgcccattcgaatgcaaagcacccaccacctctgctgctgtcttccgcccgtcgcttcctcttctcccgcctgttttttctcctcgccaccaaaacgccccacggccgtacgtcctcctcctcctgctctgctccacctcctccgtccaagtcgcagacccagctaccgtcttggacggaccgtaccgaccgatgcaacgatggcctgctgggtggcggccgccatgcacctgctgctgctctgcaacgccgcggccgccgcgcgcgccgccgtcgccctgttcgccgcgactccgatgcccccgcgcctgtccctcgcggaggccgccgccgccgccggcgcaggcgactacgacgacggcggcaccggggacaaggggtcccaggccctcgtggggagccccatcgtggccggcgccatgaacaaccgcctgagggcgctcacctcctccttcgccgccgccatcggcaagaagctggactactgcatcaaggacacggagacggagtggaatcaggccttcgatttctccaaggacaccaccttcctcaccaattgcatgaaggagaccaagggggacctccagcagcggatctgcacggccgccgagatgaggttctacttcgacagcctgatgggcggcgacgacacggcggaggccaactacgtgaggcccaacgtcaactgcaaccggtcgtcgtggatcgacgggtgcgagcccggctgggcgtgcagcgccggggccgaccagaagatcaacctgcaggacaccaagaacatgccctacaggccgctcaagtgccagtcctgctgcccaggattcttctgcccgcatggcctcacctgcatgatcccttgccctctgggtgcctactgtccacggtccagcctgaatacctccacaggcatctgtgacccctacaactaccagccgccgcccgggaaccctaaccacacctgcggagccgccgacatctgggccgatgtggtcacgacagatgacatcttctgccccgctggattctactgccccagcactatacagaagctcccttgtagtagtgggtattattgcaggaagggatcaacctcacagactagatgctacaagaagagctcttgcccaccaaactctgctactcaggacatcacaatcttcggcgcgctgcttgtggtcgcgtcctgcttagtcctcctcatcatctacaacttctccggccaaatcctgaccaaccgcgagaagcggcaggccaagtcccgggaggccgccgcgaggcacgcgcgggagacagcgcaggcccgggagaggtggaagtcggccaagggcgtggccaagaaggccggcgtgggcctgcagtcgcagctgtcccgcaccttctcgcgcaagaagggcggtggcggtggcggtgggcagtcgtcgcagctgcaggccggagcgtccacaaaggtaggtgatgacgcgggcgggaagaagcacagcaacctcgccgacatggtgcggtccatcgacgacaacccggagagcgacgaagggttcaacctggaggtaggggacaaggcgctgaagaagccgacgggcaaggagatgcacacccggagccagatcttcaagtacgcgtacggccagatcgagagggagaaggcgatgcagcaggagaaccacaacatgaccttctcgggcgtcatctccatggcgcaggaccacgacgtgagcacgcgcctgtccgtcgagatcgccttcaaggacctgaccctcacgctcaagggcagcaagaagaagctcctgcggtccgtcacggggaagctctcgcccgggaaggtggcggccgtcatgggcccgtccggcgccgggaagaccaccttcctcagcgccatcgccggcaaggccacagggtgcgacacgtcgggcctggtgctgataaacggcaggatcgagccgatccgagggtacaagaagatcatcggcttcgtaccccaggacgacatcgtccacggcaacctgaccgtggaggagaacctgtggttcaacgcgaggtgcaggctgtcggcggagatgtcgaaagccgacaaggtgctcgtcgtggagagggtcatcgagtcccttgggctgcagccggtccgggactccctggtggggacggtggagcagcgcggcatctccggcgggcagcggaagagggtcaacgtcggcctggagatggtgatggagccgtcggtgctgatcctggacgagccgacgtctggactggacagcgcatcctcgctgctcctgctccgcgccctccgccgcgaggctctcgagggcgtcaacatctccatggtggtccaccagcccagctacacactgtacaggatgttcgacgacctgatcctactggccaaggggggcatgacggtgtaccacgggccggtgaagaaggtggaggagtacttcacagggctgggcatcgtggtgccggagcgcgtgaacccgccggactactacatcgacatcctggagggcatcgtgaagccgagcctgagctcgggaggcagcgtcaaggacctgcccatcaggtggatggtgcacaacggctacgacgtgccgcgggacatgctgcagagctcgtcggaatcggagtccacgtccaggggcgacgcgggacacgctccggacgagccgtcgtccgtggtctcgctgctctggggcaacctcagggacatcctcgggcagaagaaggacgagtacgactacaacaagacgtcggaggacctgtccaagcgcaagactccaggcatactcaggcagtacagatacttcctaggaaggtgcggcaagcagaggctccgtgacgccaggatacagggagtggactacctgatcctctgtctcgccggcatatgcctgggaacgctggccaaagtgagcgacgagacgttcggggcgctggggtacacctacaccgtcatcgctgtctctctgctgtgcaagatcggagccctgcgttccttcacgctggacaagataaactactggagggagcgagcctccgggatgagctcgctggcctacttcctgtccaaggacagcatcgaccacttcaacacggtggtgaagcccatcgtctacctctccatgttctacttcttcaacaacccgcggtcctccatctgggagaactacatcgtcctcctcgcgctcgtctactgcgtcaccggcatcggatacaccttcgcagtcttcttccagccaggttccgcgcagctgtggtcggccttgcttccggtggttttgactctgatagccactcagcagaaggacactatccttgccgacctgtgctacaccaagtgggctctggaagccttcgtcattgccaacgctcagaactattccggcgtgtggctcataacccggtgtggctcgctggtcaggagcggctacgatatcgagcacgaggctctctgtatagcggtcctcatcgccaacggggtactcttccgctgtgtagccttcttctgcatggtcaccttccagaagaactgagagaggtcggtcaaggaaaacacacccgtgattccgtgaactttctatgcccacgtagcagctctgtttttgttaatttcagtgcaataggattgtagattagagcccctcttggtaaggtatgtcagtatgtgtagatgaggacagattcttgaatagcaggcaactatcagggatgccctaaattacagaggcggtttcttgcctaacaccaatgtaaatttgatatgcaaattcagtgtatatatgggtacgacgactaatcatgaaatctgtagctcttcaccagcttccagcacaagtttaaagtcataacaaccatctgtaagaggcgccacaagcaatccgtgaatgaatgcaggcacacaactgactacatgatcagaaatgcgggcagtc

SEQ ID NO: 51912 - DNA, 3722 bp, Zea Mays
atggcctgctgggtggcggccgccatgcacctgctgctgctctgcaacgccgcggccgccgcgcgcgccgccgtcgccctgttcgccgcgactccgatgcccccgcgcctgtccctcgcggaggccgccgccgccgccggcgcaggcgactacgacgacggcggcaccggggacaaggggtcccaggccctcgtggggagccccatcgtggccggcgccatgaacaaccgcctgagggcgctcacctcctccttcgccgccgccatcggcaagaagctggactactgcatcaaggacacggagacggagtggaatcaggccttcgatttctccaaggacaccaccttcctcaccaattgcatgaaggagaccaagggggacctccagcagcggatctgcacggccgccgagatgaggttctacttcgacagcctgatgggcggcgacgacacggcggaggccaactacgtgaggcccaacgtcaactgcaaccggtcgtcgtggatcgacgggtgcgagcccggctgggcgtgcagcgccggggccgaccagaagatcaacctgcaggacaccaagaacatgccctacaggccgctcaagtgccagtcctgctgcccaggattcttctgcccgcatggcctcacctgcatgatcccttgccctctgggtgcctactgtccacggtccagcctgaatacctccacaggcatctgtgacccctacaactaccagccgccgcccgggaaccctaaccacacctgcggagccgccgacatctgggccgatgtggtcacgacagatgacatcttctgccccgctggattctactgccccagcactatacagaagctcccttgtagtagtattattgcaggaagggatcaacctcacagactagatgctacaagaagagctcttgcccaccaaactctgctactcaggacatcacaatcttcggcgcgctgcttgtggtcgcgtcctgcttagtcctcctcatcatctacaacttctccggccaaatcctgaccaaccgcgagaagcggcaggccaagtcccgggaggccgccgcgaggcacgcgcgggagacagcgcaggcccgggagaggtggaagtcggccaagggcgtggccaagaaggccggcgtgggcctgcagtcgcagctgtcccgcaccttctcgcgcaagaagggcggtggcggtggcggtgggcagtcgtcgcagctgcaggccggagcgtccacaaaggtaggtgatgacgcgggcgggaagaagcacagcaacctcgccgacatggtgcggtccatcgacgacaacccggagagcgacgaagggttcaacctggaggtaggggacaaggcgctgaagaagccgacgggcaaggagatgcacacccggagccagatcttcaagtacgcgtacggccagatcgagagggagaaggcgatgcagcaggagaaccacaacatgaccttctcgggcgtcatctccatggcgcaggaccacgacgtgagcacgcgcctgtccgtcgagatcgccttcaaggacctgaccctcacgctcaagggcagcaagaagaagctcctgcggtccgtcacggggaagctctcgcccgggaaggtggcggccgtcatgggcccgtccggcgccgggaagaccaccttcctcagcgccatcgccggcaaggccacagggtgcgacacgtcgggcctggtgctgataaacggcaggatcgagccgatccgagggtacaagaagatcatcggcttcgtaccccaggacgacatcgtccacggcaacctgaccgtggaggagaacctgtggttcaacgcgaggtgcaggctgtcggcggagatgtcgaaagccgacaaggtgctcgtcgtggagagggtcatcgagtcccttgggctgcagccggtccgggactccctggtggggacggtggagcagcgcggcatctccggcgggcagcggaagagggtcaacgtcggcctggagatggtgatggagccgtcggtgctgatcctggacgagccgacgtctggactggacagcgcatcctcgctgctcctgctccgcgccctccgccgcgaggctctcgagggcgtcaacatctccatggtggtccaccagcccagctacacactgtacaggatgttcgacgacctgatcctactggccaaggggggcatgacggtgtaccacgggccggtgaagaaggtggaggagtacttcacagggctgggcatcgtggtgccggagcgcgtgaacccgccggactactacatcgacatcctggagggcatcgtgaagccgagcctgagctcgggaggcagcgtcaaggacctgcccatcaggtggatggtgcacaacggctacgacgtgccgcgggacatgctgcagagctcgtcggaatcggagtccacgtccaggggcgacgcgggacacgctccggacgagccgtcgtccgtggtctcgctgctctggggcaacctcagggacatcctcgggcagaagaaggacgagtacgactacaacaagacgtcggaggacctgtccaagcgcaagactccaggcatactcaggcagtacagatacttcctaggaaggtgcggcaagcagaggctccgtgacgccaggatacagggagtggactacctgatcctctgtctcgccggcatatgcctgggaacgctggccaaagtgagcgacgagacgttcggggcgctggggtacacctacaccgtcatcgctgtctctctgctgtgcaagatcggagccctgcgttccttcacgctggacaagataaactactggagggagcgagcctccgggatgagctcgctggcctacttcctgtccaaggacagcatcgaccacttcaacacggtggtgaagcccatcgtctacctctccatgttctacttcttcaacaacccgcggtcctccatctgggagaactacatcgtcctcctcgcgctcgtctactgcgtcaccggcatcggatacaccttcgcagtcttcttccagccaggttccgcgcagctgtggtcggccttgcttccggtggttttgactctgatagccactcagcagaaggacactatccttgccgacctgtgctacaccaagtgggctctggaagccttcgtcattgccaacgctcagaactattccggcgtgtggctcataacccggtgtggctcgctggtcaggagcggctacgatatcgagcacgaggctctctgtatagcggtcctcatcgccaacggggtactcttccgctgtgtagccttcttctgcatggtcaccttccagaagaactgagagaggtcggtcaaggaaaacacacccgtgattccgtgaactttctatgcccacgtagcagctctgtttttgttaatttcagtgcaataggattgtagattagagcccctcttggtaaggtatgtcagtatgtgtagatgaggacagattcttgaatagcaggcaactatcagggatgccctaaattacagaggcggtttcttgcctaacaccaatgtaaatttgatatgcaaattcagtgtatatatgggtacgacgactaatcatgaaatctgtagctcttcaccagcttccagcacaagtttaaagtcataacaaccatctgtaagaggcgccacaagcaatccgtgaatgaatgcaggcacacaactgactacatgatcagaaatgcgggcagtc

SEQ ID NO: 51913 - DNA, 2063 bp, Zea Mays
ttgttgacagcagagtagcagaccaaagttaacaacataatctcacagttatacatagcaggaaaggaacaaaaaagtggcagtcatccaaactttcaggaatttaatatgtactacatagcaataaatataaaataatctcaaccattgaaacaataccaaaatttgagataaaccctctaatagcaaatatattggtaatatgtttggcagctcctataatgctaacctctttctttggtgctgaccaaaatgtatctcacagaaacgccaaagtctaaacctaaaacaagtgttatgaaatactccgtattattaacattaaacaactactgctagcactagcacaaaatgaactagtgcagcttgttgagatcaatttggtgaataacataaagaatccatcaaagttaaattttctagtatcgtcagttcatcacctcagcactagtatgaactgtaaggacactagagtttggaacaaaaccgacgaagtacctaggactaatggtgctgcaatcaaggcaccaaattagtgaagcacagtatggtatccactccatctactcgattagttctgcaaagcagcagggaccagaaatctgttgctaaatccacaagctgctaaagccttcgaccaagctttgaagagtagcaaagccgattcagtgaagcgagacgagaccttggaggagggcgcggcgcggcgcatccccgcggaggttgcggagggagaagagcgcccggaagcgctccgcgatgggctgctccgtgttcagcagccgctcgcagaggaaccgctccatctccggggacgactcgaacgcggaggtggccgtcatctcacgcgggcgactccgtacggttcacacgctccggtcggcaaggtggtcactgggggcggcggcggcgaaggaaatcccgcctctcggaaagaaaaagaaaaggagaagacgagggacgagctcgcgtcgagtcgacgccgaccgtccgatcggaacgcgccacgtcacctctccaaacggacggacgacagcgaccagaggctcctcttgtcttgatgccggtgggtcccaatggctttacccagattctggcccacatggcagttacacgctacgtgtgtaatctcgcgtcggcgaagcgcgtagcattccttttcctcctcccctttgcggcttctcgcagcgctgcgaatcccaatccgcaccgatccgacgcgaatcgatcgagaggcagggggcagcactaatcgaatcgagactagcgccatgaacccgagaggccatcgtagcaacagaacttctctcttcgatggcattgaggagggtggaatccgagcaacatcctattcttctcatgagatagatgagcaagaaaatgatggagctattgatggactgcaggatcgtgtcagcattctcaagcggttgtcaggcgatatccatgaagaggtggagactcataacagaatgctggaccgaatggggaacgatatggatacttcaaggggttttctgtctgggaccgtggacaaattcaagatggtatttgagaccaaatcaagccggaggatgggaaccctcgtcgcatcattcgtcgccctttttctgctggtttactacttgaccaggtagaagacatgacatgctggaaatggtcatctcatcatctgcgtgccgtgccgtatagatagataccttgaaaacccaccgtcctgagtgccaaagtatatgttgatgtgggtgtttcgtcaactctgcactgtacaacacgactacagcgtgcgtgctgggtcgatcctatgttctcttgttgcgggattcaagtttgttgtccgttccttccctttggcatgtcatgtgtatggtatttagtagcataacaacaacaaaaaaactgtataaagaagctttgattgagcactatgtgaggtcgacacgtgtcccgcagcatctggcaaaacgaatccagatgcaaggaatgataatgaatcataaccaacgcagtgatcaaggatgcaattattgaggcagcgagatgctctctactcgggcgggcaa

SEQ ID NO: 51914 - DNA, 3457 bp, Zea Mays
ctgcacaggggtttcgattttttcgattaaactgaaaactgaaccgaagcatacggttaactgaatcttcggttttccttttttctaaacaaaatttcggttaaccaaacttaaaaaaaaaactaaaaaaccaaaccgaaaaatttcggttactcaattgcccagccctgtgggcctcgtgccgctcactagactttaaagcccgtttggccctctacacggaccagacctgccttttcttcttcagcgtgcacattccttccccacttctctctctctctcgtgacgacggcgacggcaacgactggggcgacagtcgctgccgccctacttgccggttgctcggatcttcttcggcccgttagccgtcgacgagcaccaccaggtacgccaaccccttcatcttctcttcctgctgtgcgaaactgaggacccaaaccctaacctactatttgtttttcggatctgatctatgcatgcattacgcctactaacttcgattgctctgcaaaaataatcggtgtatacatgagtagacccacgtcccgggcaaaattctgaagcccattgttgatgtgggcatattagcaaatctctcgtgttcaccccagcttaaaaatataagctgtttggtgccgctcgtgtatttaccatgtttttgctactattgattgtgccagggcaaccagatacttcagtggcttcgcaaggatgtcctggtgcactattgagtctgatcctggtgagttttcgcatggtctcatcaatgactatatgtgctgttccttgtcattttcgattcgtgggaggtgtatggcatgttagcgtgcgggtaggatactcccttattttttcccctgcccgtccacctctgcatatcatgcaatttctgtgttttgcttataagtgtagtgggctcggttatacccgagttatcttcaaggggacaattttcctttagtcatgatgattgcattcatcgtctttttaagtcattcagcatgtgctcttcaccgttcctaatagtagcgttaggaaaccaacttatgtcatcagtcgtcacacttttgaatgatctaccaacccattggtatctctgttctttggcatattacttcccccctactttcacgaaacagcaaactgttgatgagttgaaacacattttgttatgcttactcccatttgtacttctgagttctgtcttagttgttcttactggtgtttgaaaccattgcttatgttatacttgagcaggtgtgttcactgagctgattcagcaaatgcaagtgaaaggtgtacaggttagcttccagggctctgttgcgttccttgcctgaactgcttgttttgtagcaactgtttttttcctcatccattgaactattattgtatctgcaatggcattatgcgctcgacctgttcattcactagtgtacactagttcttctgaagttttgtttcttgctcatgttctgaaactcacatcaacctggaactctcatttttggaagtgccttactgccatattatatgactgtaggataagcataataatatgtagctgattgtaatcttgtttgtcaacaggatcttgaagacatgcactttagtttaaggtagaataactgataatttgttgtcaatagttgctctttttttacctttatgcaacggtcaactcaatttgaaatggggagggtccttgtattatcaaaaagtaagggaggccttgagtgaggcttattctacatttgtttattcacttgcattcgtttagtatgggacctctagtcacatgacaacatgccagctaccaattatatttgtttgaggtcatgcttttatttcttgagtttgataatgttggtacttaagttacaataataatatatatagaacaggtgcctctagaaatatgtgacgatcatttttttgtcaagttatccatagaaaaaaaatttgaacccagaaatttatatgtttgggatgttctttaaacaggtggaagagctttactctctcgatgtgggctctcttagtcaactgcggccagtatatgggctaatttttctcttcaagtggatacccggggagaaggatgaacggcctgttgtcagagatcctaacccaaaccttttctttgcgcaccaagtcatcactaatgcatgtgctactcaagctattctctcagttctcatgaatcgccctgaaattgacattggcccagaattatctcaattgaaggaattcacaggagcttttacaccagatctgaagggcttggctattagcaacagcgaatctatccggacagctcataacagctttgcaaggccagagccatttatttctgatgagcagagggccgcaactaaggatgatgatgtttaccatttcataagctatttaccttttgaaggtgtcctgtatgagctggatggactgaaggaagggcctgtgaatcttgggcagtgcgatggtgctgatgatcttgattggctacggatggtgcagccagttattcaagaaaggattgagcgctactcacaaagcgagatcaggttcaatctcatggccatcataaagaacaggaaagaggtgtacagtgctgagcttgaggaactggagaagagaagggagcagattttgcaggagatgaataatgcttcctccacagaatccttgagcagttcgcttacggaggtgatatcggcaatcgaaactgtcacggagaaggtcatcatggaagaagagaagttcaagaagtggaagaaggagaacattcggaggaaacataactacatccctttcttgttcaacttgctgaagatgcttgcagagaagcagcagctaaaacctctggtcgagaaggccaaacagcaaaagtcagcaagcccgagcacgagttgatggtgaaatgtcaatagactggtagcttttgccgatgtcttctgagcgtcgtgttatcttatcagatacattgccaagtcggcagctcagataaattatgaccgatgttatttataccatgttgcacgccgtgatgtatcagcagctatgccattttttttttgcagagcacgtgcgttgttgaagtggttaattttagtcgtttagagagattgtttgagagtaagggtaatggaatggactgaggaggttgaatcactcaatattcaattttaaataatgatgggttccagccctctcaatcccctccattccacctactcctaaacaaactcttaggtctagttttgcaactcttttttgtcaaggaattttcattttatcaagagaaattagttcatttatacttagaaaaatggagttgacaatctagcctttagccgtttattttgtgttaggttaattgtccctgtggatttgttgatggttgtggatcattttgggtaataattttgagataccacttgctagttgagtacaagat

SEQ ID NO: 51915 - DNA, 303 bp, Zea Mays
ccacaggataacaattatgttggtttgcatgacaggcttgttacagtcacaggaacctttgataatcagatgaatgcgatagatttgatactgaaaaagttatctttggatgttcactacccagctaatttgagctccccatttccatatgcaggtcttactttcccaagctaccctggtgttcctgttggttatatgattccgcaggtgccatataataatgctgtgaactatggacctaataacgggtatggaggaaggtaccaaaacaacaagtacaagttggaggtctcgaattttaag

SEQ ID NO: 51916 - DNA, 1189 bp, Zea Mays
aggataacaattatgttggtttgcatgacaggcttgttacagtcacaggaacctttgataatcagatgaatgcgatagatttgatactgaaaaagttatctttggatgttcactacccagctaatttgagctccccatttccatatgcaggtcttactttcccaagctaccctggtgttcctgttggttatatgattccgcaggtgccatataataatgctgtgaactatggacctaataacgggtatggaggaaggtaccaaaacaacaagaaatctcatggagacaaactttgatagtacaagttggaggtctcgaattttaagcccagtacacctatgagatctcctgctagtaatgaagcccaagaatctctgaccattggtattgccgatgaacacattggtgctgttgtaggacgtgctggaaggaacataacagagattattcaggctagtggtgctcggatcaagatatcggataggggtgacttcatatctgggacatctgacagaagctatccggaccgcggagtccatgatcatgcagagggtgtcagccagttcggagaggctatgataccagatatgtttgacggactgtgggggccgttgttgagtccgagcagcatgtttgatgcaagttattattgtttgttgcgttgcgccaatggtttagtcgaagatatatatgtgcagcgtttgaatggatttgggaatagggctgagttatatcccgtggatgccacaacaaggcaggcaggcgccgctctgtgctagtggctgagtaggttgacaattcgaaagggcatggttggaagctttcagcgtttcccattcattcttgtgtgcctctccggatggagatcctctgcagtgccatgtcggccagactgcgagcaaaagctgacttttctggcggacgaagataggagtagcatgcatctagctgtcttgtgaaagtactattatttatcaaaatacagaatcggtcctcaaactttggtacgttgttggctccctgaattcaagaaatcgaaaaaaaaaacaagtcttgtaactttgtcgggtctaaaattagatttgtctaaaccgaatgcgccgatgtggcgtgacactattattaggtttagtgtatttaaacacctctaaatatatgagaaaggcgtgccactattattaggtttagt

SEQ ID NO: 51917 - DNA, 1197 bp, Zea Mays
gataacaattatgttggtttgcatgacaggcttgttacagtcacaggaacctttgataatcagatgaatgcgatagatttgatactgaaaaagttatctttggatgttcactacccagctaatttgagctccccatttccatatgcaggtgccatataataatgctgtgaactatggacctaataacgggtatggaggaaggtaccaaaacaacaagcccagtacacctatgagatctcctgctagtaatgaagcccaagaatctctgaccattggtattgccgatgaacacattggtgctgttgtaggacgtgctggaaggaacataacagagattattcaggctagtggtgctcggatcaagatatcggataggggtgacttcatatctgggacatctgacaggaaggtgacgattactggaacatcagaagctatccggaccgcggagtccatgatcatgcagagggtgtcagccagttcggagaggctatgataccagatatgtttgacggactgtgggggccgttgttgagtccgagcagcatgtttgatgcaagttattattgtttgttgcgttgcgccaatggtttagtcgaagatatatatgtgcagcgtttgaatggatttgggaatagggctgagttatatcccgtggatgccacaacaaggcaggcaggcgccgctctgtgctagtggctgagtaggttgacaattcggtatgttgatttcctggtacccccccttccttttttttttgagtcttgtgtatgtagatctgagtatgggttctttctttcacgtggccagaaagggcatggttggaagctttcagcgtttcccattcattcttgtgtgcctctccggatggagatcctctgcagtgccatgtcggccagactgcgagcaaaagctgacttttctggcggacgaagataggagtagcatgcatctagctgtcttgtgaaagtactattatttatcaaaatacagaatcggtcctcaaactttggtacgttgttggctccctgaattcaagaaatcgaaaaaaaaaacaagtcttgtaactttgtcgggtctaaaattagatttgtctaaaccgaatgcgccgatgtggcgtgacactattattaggtttagtgtatttaaacacctctaaatatatgagaaaggcgtgccactattattaggtttagt

SEQ ID NO: 51918 - DNA, 1144 bp, Zea Mays
tgttggtttgcatgacaggcttgttacagtcacaggaacctttgataatcagatgaatgcgatagatttgatactgaaaaagttatctttggatgttcactacccagctaatttgagctccccatttccatatgcaggtcttactttcccaagctaccctggtgttcctgttggttatatgattccgcaggtgccatataataatgctgtgaactatggacctaataacgggtatggaggaaggtaccaaaacaacaagcccagtacacctatgagatctcctgctagtaatgaagcccaagaatctctgaccattggtattgccgatgaacacattggtgctgttgtaggacgtgctggaaggaacataacagagattattcaggctagtggtgctcggatcaagatatcggataggggtgacttcatatctgggacatctgacaggaaggtgacgattactggaacatcagaagctatccggaccgcggagtccatgatcatgcagagggtgtcagccagttcggagaggctatgataccagatatgtttgacggactgtgggggccgttgttgagtccgagcagcatgtttgatgcaagttattattgtttgttgcgttgcgccaatggtttagtcgaagatatatatgtgcagcgtttgaatggatttgggaatagggctgagttatatcccgtggatgccacaacaaggcaggcaggcgccgctctgtgctagtggctgagtaggttgacaattcgggcatggttggaagctttcagcgtttcccattcattcttgtgtgcctctccggatggagatcctctgcagtgccatgtcggccagactgcgagcaaaagctgacttttctggcggacgaagataggagtagcatgcatctagctgtcttgtgaaagtactattatttatcaaaatacagaatcggtcctcaaactttggtacgttgttggctccctgaattcaagaaatcgaaaaaaaaaacaagtcttgtaactttgtcgggtctaaaattagatttgtctaaaccgaatgcgccgatgtggcgtgacactattattaggtttagtgtatttaaacacctctaaatatatgagaaaggcgtgccactattattaggtttagt

SEQ ID NO: 51919 - DNA, 1186 bp, Zea Mays
aaaagctattacgttttctgtgaactgttgtgtagtttttaggtcgtgcatgccgtggaaagtgtgggtgtggcttttggtggaaaacatgaaagaacttcacccactgctacaatctaattgttttatatttttatcatgcatatctatactgttggtctgttggattaatttgagttgtgactatttctgttgatactttgcagcccagtacacctatgagatctcctgctagtaatgaagcccaagaatctctgaccattggtattgccgatgaacacattggtgctgttgtaggacgtgctggaaggaacataacagagattattcaggctagtggtgctcggatcaagatatcggataggggtgacttcatatctgggacatctgacaggaaggtgacgattactggaacatcagaagctatccggaccgcggagtccatgatcatgcagagggtgtcagccagttcggagaggctatgataccagatatgtttgacggactgtgggggccgttgttgagtccgagcagcatgtttgatgcaagttattattgtttgttgcgttgcgccaatggtttagtcgaagatatatatgtgcagcgtttgaatggatttgggaatagggctgagttatatcccgtggatgccacaacaaggcaggcaggcgccgctctgtgctagtggctgagtaggttgacaattcggtatgttgatttcctggtacccccccttccttttttttttgagtcttgtgtatgtagatctgagtatgggttctttctttcacgtggccagaaagggcatggttggaagctttcagcgtttcccattcattcttgtgtgcctctccggatggagatcctctgcagtgccatgtcggccagactgcgagcaaaagctgacttttctggcggacgaagataggagtagcatgcatctagctgtcttgtgaaagtactattatttatcaaaatacagaatcggtcctcaaactttggtacgttgttggctccctgaattcaagaaatcgaaaaaaaaaacaagtcttgtaactttgtcgggtctaaaattagatttgtctaaaccgaatgcgccgatgtggcgtgacactattattaggtttagtgtatttaaacacctctaaatatatgagaaaggcgtgccactattattaggtttagt

SEQ ID NO: 51920 - DNA, 2893 bp, Zea Mays
agcaggacacgtatcacgctctcagttgaaactgaaatgaagggtgggtgggtgggtgcgacccacggtccgccgccgaagccgagctccctcgcaaatctctcgcatcgcgttcacagcagatggcggggaaggaggagaggaagcgggtgttggtggtgggcggcagcggctacctgggccagcacctcctcgcggcgtcctccaccgtcgaccgcctcgacgtcgctttcacccaccacagccccgccccgccgcagccgctcctcgagacgctcccctccgtccgcgcattccgcgccgacctccgctccggcgacggcttcgaggcgatctccgcgtcctttggccagccacacgtggttgtcaactgtgctgcgatgtcagttcctcgggcatgcgaattggatccacctgctgctatggctaccaatgtgccttcttcgcttgtgaattggttgctaagttttgggaatgaagactcgcttttgattcagctctcaaccgatcaagtttatgagggggtgaaatccttctacaaagaagaggacgagacaatgccggtgaacatgtatggaaaatctaaagttgcagcggagaaactaatcgttgagaaatgctcgaactatgcgatcttgagaagcagcattatatatgggccacaaacaatctctcctgtggcaaaatcccttccgattcagtggatggatggtgttctttcacaaggccaacaggttgagttcttcagtgatgaattccggtgccctgtctatgtcaaagatatggtggacgtaattttgtcactaacaaagacttggttcccagatgatggcaaaaaagtccaggtcctcctgaatgtcggtggtccagatagggtatcaagactgcagatggctgagtctgttgctgttgtccgtggatataaccccagtataatcaaatctgtgtctgcatcatcggtattatcttgcctctggaatatagcattcaagcatccatatatctgccagtttagtgttagcacatgagtactattagaacacagttattcaacaagcatggtgttttagatacgaagtggtcttgactttacaattgaaatagtatccaacatgagcattggggccgcttcatttttccatcataatatcttgtaatgcccgcgcatctatctgttacccaggttaatcgcggagtagcttctccaccagacatatccatggacatcaccaagctaacccagatccttggtatcaagccaatatcatttcaagatggagtcagaagtacacttgatgcagaagacagtacatgacgcttcctcactggtttgcttgagttcttaagggggagttgtttgcattcaaatgtagtagtgtgacataaagaatcacatttgatttgcaaaatttcagtatcggtaaatttctgttgggtttatgtgaaatatgtaagttttgtacccactaaacaccaatgccaccatccgtgttactgcttgattctgcaccattatgaataaagatggtctccattttaaatcattttcttccagaagtatgtaactgtattgtgcatgtatattacaatttataattaatgttacccccatgtattttatttgtttggtactttcaagatttgtttctgtacggtgcataatctggattggattgcagaagtgcttggtttgccgatgcattgctgccctataatatttgttctcccaatattacttctcttctctttctggccgcatcccctaggcttcctgctaatcacggtttcctcaactctgactttcccgcgtaggcaagcatcgttgctggccacactagctagcagcatcgtcgccgggggcacagccacagcccacaggcatcggccacgagacggcaaggaggggcgtgcatgcattgatgcatgcatggcccgacgcctgcgccggtcggatcggttatgcactgcacgagagggaatatatgggggagagaggttgattagacacctgtatgttgggatgtttactggtttgttttgttgtgtcaagctaggaaaggaaaatgtgtgacctgtgctggttgtgtcatctcttaatagttacaattgctcaggatagcctcttttagctaccgggtctatttcttagttcaagattcctcttactaatttgaataaaagaattagtagatctgttccacccaaatgggggaatgggtgctagggttatgaacttataatcatagaatcaattcggtcaacagattataagttcattccataccggaccagatcgtgcacattcttattatgactaggggtcattcgagcctatggaaatagaatactgtgtttacatagaaatccctgcatccttacattatatttaggattaggattaggtgtaatcatatctgcttttgacatatatatcctatccttatttgggtaccatatgcacctctttgggcttctattgaatcaagaaattggattgtacatatttttttattttcatatcgattttgatacatataaggtgtcctacggataatgcaaatcgaagttatttgatacctctttgggcttctattgaagctatgtatatgaccgatcgatctaaatacttcaagactccacctttgtcatatatcccatatatcgcattcgatagatatcatattcatggaatacgattcactttcaagatgccttgacggtgaaatggtagacatgcgagactcaaaatctcgtgctaaagagtgtggaggtttgagtcctctttaaggcataatacagagaatgctccccgtagaagtattccagaaatctgcacctggcgctctcctttatcttctgaggtccttaaccatctcactgagaaaagtagaca

SEQ ID NO: 51921 - DNA, 1650 bp, Zea Mays
gataagctgcttttttaatgtaacccccaactcaaactacatggaaatatggagctagagacacccgtatgccgtatcacatgagcggcgccctcagttttggccagaacggaaacggacggagacaaacccgcggctcgcgaccgaattccattttccagcgcgcacggacgactgtacctcccccgcccttcgccactccgctccctcctccacctgtcatctcccgcgcgggagacctgcccgctccatggcgccgtcgcgaccgctcatgcgggggatccgcccgccgcgcgtcttcccgacccgcggcggccgcgcctcgccgtacaccgtcgcgctcaccgcgctacttctcgtctccgccgccctcctcgcgctcatagccttcggcgtcttctcgctccccgtgtccgcgccaaatgctgccgccaccaccggcactgcagccggaggggagaccgagtcggccgacgtccgcccccgcgcccgccgcgacctgggggaggggctgggagagcgcggtgcgcagtggaccgaggtcatctcgtgggagcccagggcatttgtctaccacaacttcctctctaaggatgagtgtgaatacctaattggattggccaagcctcacatggtaaaatcaacagttgtcgacagcactaccggcaaaagcaaggacagcagggtccggacaagttcaggcatgtttcttcaaagaggaagagacaaggttattcgagcaattgaaaagaggatagcagactataccttcatacccgtagatcatggtgagggactccaagtgctgcattatgaagtcgggcagaagtatgagcctcactttgattattttcttgatgagtttaacacaaagaatggtggtcagaggatagctactcttctgatgtatctatgttgaagaagggggcgagactattttccctgatgcaaatgtgaacgccagttctttaccatggtacaatgagctttcagattgtgccaaaagaggcctttctgtcaaaccaaagatgggagatgcgcttcttttctggagcatgaaaccagatgccactttggacccattaagcttgcatgggggttgtcctgtgattaaaggaaataaatggtcatcaaccaagtggatgcacatccatgagtacaaagcttgaggcttggagaatcaaatatatgctgttgaattgggtttgtaagatggatctttatgcatgtgacttggggatttctacgggattgacactcatgtatgctttacagacccactggagctgtattctttgctcctttgttggaggggagataatagggataagcaggggccttgctcatccttgcagttttttttttttttggctgatccttgctgacttggctttttttcacttttctttttcttccttgcagtaccccaactatagaggagttgtgtagtgcctatagagtttgagattttgtttttgtgtcatgcccctaatattagtacatgaatgttgtgttactatgatacttgtaagctttggtactaatgaatagtgaggtctagagctcaacattaatgaggctgttgtgctacctttttgtgtcctctctgttatgttgttcctgcttaattttgactgtacactgtctttt

SEQ ID NO: 51922 - DNA, 1717 bp, Zea Mays
gataagctgcttttttaatgtaacccccaactcaaactacatggaaatatggagctagagacacccgtatgccgtatcacatgagcggcgccctcagttttggccagaacggaaacggacggagacaaacccgcggctcgcgaccgaattccattttccagcgcgcacggacgactgtacctcccccgcccttcgccactccgctccctcctccacctgtcatctcccgcgcgggagacctgcccgctccatggcgccgtcgcgaccgctcatgcgggggatccgcccgccgcgcgtcttcccgacccgcggcggccgcgcctcgccgtacaccgtcgcgctcaccgcgctacttctcgtctccgccgccctcctcgcgctcatagccttcggcgtcttctcgctccccgtgtccgcgccaaatgctgccgccaccaccggcactgcagccggaggggagaccgagtcggccgacgtccgcccccgcgcccgccgcgacctgggggaggggctgggagagcgcggtgcgcagtggaccgaggtcatctcgtgggagcccagggcatttgtctaccacaacttcctctctaaggatgagtgtgaatacctaattggattggccaagcctcacatggtaaaatcaacagttgtcgacagcactaccggcaaaagcaaggacagcagggtccggacaagttcaggcatgtttcttcaaagaggaagagacaaggttattcgagcaattgaaaagaggatagcagactataccttcatacccgtagatcatggtgagggactccaagtgctgcattatgaagtcgggcagaagtatgagcctcactttgattattttcttgatgagtttaacacaaagaatggtggtcagaggatagctactcttctgatgtatctatcagatgttgaagaagggggcgagactattttccctgatgcaaatgtgaacgccagttctttaccatggtacaatgagctttcagattgtgccaaaagaggcctttctgtcaaaccaaagatgggagatgcgcttcttttctggagcatgaaaccagatgccactttggacccattaagcttgcatgggggttgtcctgtgattaaaggaaataaatggtcatcaaccaagtggatgcacatccatgagtacaaagcttgaggcttggagaatcaaatatatgctgttgaattgggtttgtaaggaccttggccatgtgaaggttttgcttgaagaattgataaagcgctctactttctcctgcagatggatctttatgcatgtgacttggggatttctacgggattgacactcatgtatgctttacagacccactggagctgtattctttgctcctttgttggaggggagataatagggataagcaggggccttgctcatccttgcagttttttttttttttggctgatccttgctgacttggctttttttcacttttctttttcttccttgcagtaccccaactatagaggagttgtgtagtgcctatagagtttgagattttgtttttgtgtcatgcccctaatattagtacatgaatgttgtgttactatgatacttgtaagctttggtactaatgaatagtgaggtctagagctcaacattaatgaggctgttgtgctacctttttgtgtcctctctgttatgttgttcctgcttaattttgactgtacactgtctttt

SEQ ID NO: 51923 - DNA, 1646 bp, Zea Mays
gataagctgcttttttaatgtaacccccaactcaaactacatggaaatatggagctagagacacccgtatgccgtatcacatgagcggcgccctcagttttggccagaacggaaacggacggagacaaacccgcggctcgcgaccgaattccattttccagcgcgcacggacgactgtacctcccccgcccttcgccactccgctccctcctccacctgtcatctcccgcgcgggagacctgcccgctccatggcgccgtcgcgaccgctcatgcgggggatccgcccgccgcgcgtcttcccgacccgcggcggccgcgcctcgccgtacaccgtcgcgctcaccgcgctacttctcgtctccgccgccctcctcgcgctcatagccttcggcgtcttctcgctccccgtgtccgcgccaaatgctgccgccaccaccggcactgcagccggaggggagaccgagtcggccgacgtccgcccccgcgcccgccgcgacctgggggaggggctgggagagcgcggtgcgcagtggaccgaggtcatctcgtgggagcccagggcatttgtctaccacaacttcctctctaaggatgagtgtgaatacctaattggattggccaagcctcacatggtaaaatcaacagttgtcgacagcactaccggcaaaagcaaggacagcagggtccggacaagttcaggcatgtttcttcaaagaggaagagacaaggttattcgagcaattgaaaagaggatagcagactataccttcatacccgtagatcatggtgagggactccaagtgctgcattatgaagtcgggcagaagtatgagcctcactttgattattttcttgatgagtttaacacaaagaatggtggtcagaggatagctactcttctgatgtatctatcagatgttgaagaagggggcgagactattttccctgatgcaaatgtgaacgccagttctttaccatggtacaatgagctttcagattgtgccaaaagaggcctttctgtcaaaccaaagatgggagatgcgcttcttttctggagcatgaaaccagatgccactttggacccattaagcttgcatgggggttgtcctgtgattaaaggaaataaatggtcatcaaccaagtggatgcacatccatgagtacaaagcttgaggcttggagaatcaaatatatgctgttgaattggatggatctttatgcatgtgacttggggatttctacgggattgacactcatgtatgctttacagacccactggagctgtattctttgctcctttgttggaggggagataatagggataagcaggggccttgctcatccttgcagttttttttttttttggctgatccttgctgacttggctttttttcacttttctttttcttccttgcagtaccccaactatagaggagttgtgtagtgcctatagagtttgagattttgtttttgtgtcatgcccctaatattagtacatgaatgttgtgttactatgatacttgtaagctttggtactaatgaatagtgaggtctagagctcaacattaatgaggctgttgtgctacctttttgtgtcctctctgttatgttgttcctgcttaattttgactgtacactgtctttt

SEQ ID NO: 51924 - DNA, 962 bp, Zea Mays
aagaaccacatgcatcgtcttttgcttcttgttgtgcgtcactattttgaaattctaaggatgagtgtgaatacctaattggattggccaagcctcacatggtaaaatcaacagttgtcgacagcactaccggcaaaagcaaggacagcagggtccggacaagttcaggcatgtttcttcaaagaggaagagacaaggttattcgagcaattgaaaagaggatagcagactataccttcatacccgtagatcatggtgagggactccaagtgctgcattatgaagtcgggcagaagtatgagcctcactttgattattttcttgatgagtttaacacaaagaatggtggtcagaggatagctactcttctgatgtatctatcagatgttgaagaagggggcgagactattttccctgatgcaaatgtgaacgccagttctttaccatggtacaatgagctttcagattgtgccaaaagaggcctttctgtcaaaccaaagatgggagatgcgcttcttttctggagcatgaaaccagatgccactttggacccattaagcttgcatgggggttgtcctgtgattaaaggaaataaatggtcatcaaccaagtggatgcacatccatgagtacaaagcttgaggcttggagaatcaaatatatgctgttgaattgggtttgtaagatggatctttatgcatgtgacttggggatttctacgggattgacactcattaccccaactatagaggagttgtgtagtgcctatagagtttgagattttgtttttgtgtcatgcccctaatattagtacatgaatgttgtgttactatgatacttgtaagctttggtactaatgaatagtgaggtctagagctcaacattaatgaggctgttgtgctacctttttgtgtcctctctgttatgttgttcctgcttaattttgactgtacactgtctttt

SEQ ID NO: 51925 - DNA, 3194 bp, Zea Mays
tgcagtcctagagtagtcaaacaggacggacgcacaggcgtcggcgcggcgcggcgcgtgagctcttttgcttgccgcggctgctcgccacgccacgcttcagaagatcacacggtgacggcgggcggacgcgctcccccaatttccctcccattttctactccctcccctttccttccttcaccggcatcggcataggcgtctctccctgatctacctggagtctctctcctcgtactccagcgccgcctgcccctccgaccaccgctgcggcagcgcaccgacttcccgcctgaaccccagatctcacccgcgccatacacgccgccagccccagcccagatctacggcgcgcccgccatggacgccggcgccggggccacggccatccgagtgccctaccgccacctccgcgacgccgagatggagctcgtcagcctcaacggcggcgctcccggaggggacacgggcccgcccccgccaccgcccaaggaccagccgcggagccgcgccgacaggaccaagctcgtgctcgcctgcatggtcgccgcgggcgtccagttcggatgggcgctgcagctctccctccttacgccatacatccagaccctaggaatagaccatgccatggcatcatttatttggctgtgtgggcctataactggttttgtggttcaaccttgtgttggtgtttggagtgataagtgccgttcaaagtatgggaggagaagaccatttattttggctggatgcataatgatatgtgctgctgtaactctaatcgggttttctgcagacctcggttacatcttaggggacaccactgagcactgcagaacatataaaggttcaaggtttcgagctgctattgttttcattctaggattctggatgttggacctggcaaacaatacagtgcaaggtcctgcgcgtgctcttctagctgatctttcaggtcctgatcagtgcaattctgcaaatgcaatattctgctcatggatggctgttgggaatattcttggtttttcagctggagcgagtggggaatggcacaagtggtttccatttctaacgacaagagcatgctgtgaagcttgcggtaatttgaaagcagctttcttagttgcagttgtatttcttttgttatgtatgtctgttaccctgtacttcgctgaagagagcccactagatccaaaagatacacaaggactatcagattctgctcctctgctgaacggttctagagatgctgcccatgcatcaaatgaaccaaataatgaaagatttcctaatggccatgtgggtttaaacaatgtgtcggctaacaacaacactgaggaatttacaaatgtgaattccaacacagagaaaggaggagtcttcaatgatgggccaggagcagttttggttaacattttgaccagaatgaggcatctacctcctgggatgcattcagtgcttctagttatggccctaacatggttgtcatggtttccctttttcctttttgacactgactggatgggacgcgaagtttaccatggggatccaaatggagatttgagtgagaggaaagcttatgacaatggtgtccgagaaggtgcatttggtttgctattgaattcagttgtccttggcgttggttcattccttgttgatccactatgccggatgattggtgcaagattagtttgggccattagcaacttcacggtgtttatttgcatgatggctacaacgatattaagttggatctcttctgatctgtactcaagcaaacttcatcacatcatcggggcaaataaaacagtcaagatcacggcattggttgttttctctcttctcggattgccactctccatcacttacagcgttccgttttctgtgactgctgagctgactgccggtacaggaggtggacaaggtttggccacaggagtcctaaatcttgctatcgtggttccccaggtccatgggacgctctgtatggaggagggaataccccggcgttcgtcttggcttcggtcttctccctggcagcaggtgtgctcgcagttctcaagctgccaaagctgtccaactcgtaccaatctgccgggttccatggatttggctgatgctcatgcccaaaacacccccgtctgccatgtaaaacatcacaccaacacttggccccattttgccattcgtttacagagaaatgattcttttttcctcgtacaactacagaataatgacagtgaaagtaggagtttaggtgagagagagagagaggctaggtaggttgatgtgaaggtgtaaaagctgtatcctcctttttttgtttttgtttttgtttttgacagtgtatgtaagagctgtccacaagaaaatttacaagtggtgtaacctgccctcgtttgtacattgtactactactacatgacaatcatatgtcctttgtctttatccaaggttgaagacgtaaactgaggccatctatttatcttgggccatgatatatttttgcacaaacacggagccatttcattagacggatgtgttttaatagctcaatatcaccttctgtatatgaccaccagcagcagctgcctttcttggatttgcttcatgagctccaggttgccgacgctatctatcaccgagaatggcaggcgttccacagcattaggaaacagcaggccgccatttggatttcgacaggaatgaaaacaagcaagaaacggacatccagccgacaaatagtgagcgaggcgtacttggcccatccggggtatgtgcagcggatgaggaggaggttgcagcggcaagggagggttttgaactcaatatttgctcctgtcgatcaagcgcaccaggaagccaaacaaacagaaaactaaggttaataaatgttgttagccaggcatcaaatttgtaacacatgatgctgtagaaatatcagagaacagaaaaggtccacaatcagaacaaataatgaacaacacctactacctacttcttacagaactgaatattgcaaaaaaaaaaagtttgaatgtttgatttgtgtctcatcaacaagctgattgtgattgagtggcttttgaatttggaaagtgaattcttagctttacatccatgcatgtgagtctgtgactgaaatactaatgatcataatcgaagcataatcaataggtgtaaggtaactcaag

SEQ ID NO: 51926 - DNA, 3168 bp, Zea Mays
tgcagtcctagagtagtcaaacaggacggacgcacaggcgtcggcgcggcgcggcgcgtgagctcttttgcttgccgcggctgctcgccacgccacgcttcagaagatcacacggtgacggcgggcggacgcgctcccccaatttccctcccattttctactccctcccctttccttccttcaccggcatcggcataggcgtctctccctgatctacctggagtctctctcctcgtactccagcgccgcctgcccctccgaccaccgctgcggcagcgcaccgacttcccgcctgaaccccagatctcacccgcgccatacacgccgccagccccagcccagatctacggcgcgcccgccatggacgccggcgccggggccacggccatccgagtgccctaccgccacctccgcgacgccgagatggagctcgtcagcctcaacggcggcgctcccggaggggacacgggcccgcccccgccaccgcccaaggaccagccgcggagccgcgccgacaggaccaagctcgtgctcgcctgcatggtcgccgcgggcgtccagttcggatgggcgctgcagctctccctccttacgccatacatccagaccctaggaatagaccatgccatggcatcatttatttggctgtgtgggcctataactggttttgtggttcaaccttgtgttggtgtttggagtgataagtgccgttcaaagtatgggaggagaagaccatttattttggctggatgcataatgatatgtgctgctgtaactctaatcgggttttctgcagacctcggttacatcttaggggacaccactgagcactgcagaacatataaaggttcaaggtttcgagctgctattgttttcattctaggattctggatgttggacctggcaaacaatacagtgcaaggtcctgcgcgtgctcttctagctgatctttcaggtcctgatcagtgcaattctgcaaatgcaatattctgctcatggatggctgttgggaatattcttggtttttcagctggagcgagtggggaatggcacaagtggtttccatttctaacgacaagagcatgctgtgaagcttgcggtaatttgaaagcagctttcttagttgcagttgtatttcttttgttatgtatgtctgttaccctgtacttcgctgaagagagcccactagatccaaaagatacacaaggactatcagattctgctcctctgctgaacggttctagagatgctgcccatgcatcaaatgaaccaaataatgaaagatttcctaatggccatgtgggtttaaacaatgtgtcggctaacaacaacactgaggaatttacaaatgtgaattccaacacagagaaaggaggagtcttcaatgatgggccaggagcagttttggttaacattttgaccagaatgaggcatctacctcctgggatgcattcagtgcttctagttatggccctaacatggttgtcatggtttccctttttcctttttgacactgactggatgggacgcgaagtttaccatggggatccaaatggagatttgagtgagaggaaagcttatgacaatggtgtccgagaaggttgtccttggcgttggttcattccttgttgatccactatgccggatgattggtgcaagattagtttgggccattagcaacttcacggtgtttatttgcatgatggctacaacgatattaagttggatctcttctgatctgtactcaagcaaacttcatcacatcatcggggcaaataaaacagtcaagatcacggcattggttgttttctctcttctcggattgccactctccatcacttacagcgttccgttttctgtgactgctgagctgactgccggtacaggaggtggacaaggtttggccacaggagtcctaaatcttgctatcgtggttccccaggtccatgggacgctctgtatggaggagggaataccccggcgttcgtcttggcttcggtcttctccctggcagcaggtgtgctcgcagttctcaagctgccaaagctgtccaactcgtaccaatctgccgggttccatggatttggctgatgctcatgcccaaaacacccccgtctgccatgtaaaacatcacaccaacacttggccccattttgccattcgtttacagagaaatgattcttttttcctcgtacaactacagaataatgacagtgaaagtaggagtttaggtgagagagagagagaggctaggtaggttgatgtgaaggtgtaaaagctgtatcctcctttttttgtttttgtttttgtttttgacagtgtatgtaagagctgtccacaagaaaatttacaagtggtgtaacctgccctcgtttgtacattgtactactactacatgacaatcatatgtcctttgtctttatccaaggttgaagacgtaaactgaggccatctatttatcttgggccatgatatatttttgcacaaacacggagccatttcattagacggatgtgttttaatagctcaatatcaccttctgtatatgaccaccagcagcagctgcctttcttggatttgcttcatgagctccaggttgccgacgctatctatcaccgagaatggcaggcgttccacagcattaggaaacagcaggccgccatttggatttcgacaggaatgaaaacaagcaagaaacggacatccagccgacaaatagtgagcgaggcgtacttggcccatccggggtatgtgcagcggatgaggaggaggttgcagcggcaagggagggttttgaactcaatatttgctcctgtcgatcaagcgcaccaggaagccaaacaaacagaaaactaaggttaataaatgttgttagccaggcatcaaatttgtaacacatgatgctgtagaaatatcagagaacagaaaaggtccacaatcagaacaaataatgaacaacacctactacctacttcttacagaactgaatattgcaaaaaaaaaaagtttgaatgtttgatttgtgtctcatcaacaagctgattgtgattgagtggcttttgaatttggaaagtgaattcttagctttacatccatgcatgtgagtctgtgactgaaatactaatgatcataatcgaagcataatcaataggtgtaaggtaactcaag

SEQ ID NO: 51927 - DNA, 3135 bp, Zea Mays
tgcagtcctagagtagtcaaacaggacggacgcacaggcgtcggcgcggcgcggcgcgtgagctcttttgcttgccgcggctgctcgccacgccacgcttcagaagatcacacggtgacggcgggcggacgcgctcccccaatttccctcccattttctactccctcccctttccttccttcaccggcatcggcataggcgtctctccctgatctacctggagtctctctcctcgtactccagcgccgcctgcccctccgaccaccgctgcggcagcgcaccgacttcccgcctgaaccccagatctcacccgcgccatacacgccgccagccccagcccagatctacggcgcgcccgccatggacgccggcgccggggccacggccatccgagtgccctaccgccacctccgcgacgccgagatggagctcgtcagcctcaacggcggcgctcccggaggggacacgggcccgcccccgccaccgcccaaggaccagccgcggagccgcgccgacaggaccaagctcgtgctcgcctgcatggtcgccgcgggcgtccagttcggatgggcgctgcagctctccctccttacgccatacatccagaccctaggaatagaccatgccatggcatcatttatttggctgtgtgggcctataactggttttgtggttcaaccttgtgttggtgtttggagtgataagtgccgttcaaagtatgggaggagaagaccatttattttggctggatgcataatgatatgtgctgctgtaactctaatcgggttttctgcagacctcggttacatcttaggggacaccactgagcactgcagaacatataaaggttcaaggtttcgagctgctattgttttcattctaggattctggatgttggacctggcaaacaatacagtgcaaggtcctgcgcgtgctcttctagctgatctttcaggtcctgatcagtgcaattctgcaaatgcaatattctgctcatggatggctgttgggaatattcttggtttttcagctggagcgagtggggaatggcacaagtggtttccatttctaacgacaagagcatgctgtgaagcttgcggtaatttgaaagcagctttcttagttgcagttgtatttcttttgttatgtatgtctgttaccctgtacttcgctgaagagagcccactagatccaaaagatacacaaggactatcagattctgctcctctgctgaacggttctagagatgctgcccatgcatcaaatgaaccaaataatgaaagatttcctaatggccatgtgggtttaaacaatgtgtcggctaacaacaacactgaggaatttacaaatgtgaattccaacacagagaaaggaggagtcttcaatgatgggccaggagcagttttggttaacattttgaccagaatgaggcatctacctcctgggatgcattcagtgcttctagttatggccctaacatggttgtcatggtttccctttttcctttttgacactgactggatgggacgcgaagtttaccatggggatccaaatggagatttgagtgagaggaaagcttatgacaatggtgtccgagaaggtgcatttggtttgctattgaattcagttgtccttggcgttggttcattccttgttgatccactatgccggatgattggtgcaagattagtttgggccattagcaacttcacggtgtttatttgcatgatggctacaacgatattaagttggatctcttctgatctgtactcaagcaaacttcatcacatcatcggggcaaataaaacagtcaagatcacggcattggttgttttctctcttctcggattgccactctccatcacttacagcgttccgttttctgtgactgctgagctgactgccggtacaggaggtggacaaggtttggccacaggagtcctaaatcttgctatcgtggttccccagatagtagtgtcgcttggagcaggtccatgggacgctctgtatggaggagggaataccccggcgttcgtcttggcttcggtcttctccctggcagcaggtgtgctcgcagttctcaagctgccaaagctgtccaactcgtaccaatctgccgggttccatggatttggctgatgctcatgcccaaaacacccccgtctgccataataatgacagtgaaagtaggagtttaggtgagagagagagagaggctaggtaggttgatgtgaaggtgtaaaagctgtatcctcctttttttgtttttgtttttgtttttgacagtgtatgtaagagctgtccacaagaaaatttacaagtggtgtaacctgccctcgtttgtacattgtactactactacatgacaatcatatgtcctttgtctttatccaaggttgaagacgtaaactgaggccatctatttatcttgggccatgatatatttttgcacaaacacggagccatttcattagacggatgtgttttaatagctcaatatcaccttctgtatatgaccaccagcagcagctgcctttcttggatttgcttcatgagctccaggttgccgacgctatctatcaccgagaatggcaggcgttccacagcattaggaaacagcaggccgccatttggatttcgacaggaatgaaaacaagcaagaaacggacatccagccgacaaatagtgagcgaggcgtacttggcccatccggggtatgtgcagcggatgaggaggaggttgcagcggcaagggagggttttgaactcaatatttgctcctgtcgatcaagcgcaccaggaagccaaacaaacagaaaactaaggttaataaatgttgttagccaggcatcaaatttgtaacacatgatgctgtagaaatatcagagaacagaaaaggtccacaatcagaacaaataatgaacaacacctactacctacttcttacagaactgaatattgcaaaaaaaaaaagtttgaatgtttgatttgtgtctcatcaacaagctgattgtgattgagtggcttttgaatttggaaagtgaattcttagctttacatccatgcatgtgagtctgtgactgaaatactaatgatcataatcgaagcataatcaataggtgtaaggtaactcaag

SEQ ID NO: 51928 - DNA, 1946 bp, Zea Mays
cgtcgatttgttgaggtcccctcctcctgtaggtgtccaacttgactacagccacctctcggctccattctgcccctcctccttctcagtcggcagccaccatgccaccgcacgcaaccaaggatcccgtcgccgcgcctgcagctgcctggcctcgccgccgtgctgcgcggcgcgggcgccggcgagtgctggcacaagcacggcacgttcctggcgcacctgctggacgtgcaccggatcctccgcctgtggggcgcgcccgacgccgtggcgcgctgcggcctctaccactccgcctactccaactcctacgtcaacctggccatcttccagcctgacaccgggcgcgcccacgtcgctgccgtggtcggcggacccgcggagcgccttgtccacctcttctgcgtcgtccccaggcagcagctcgtccacgacgacctgctcttccactactccgaccaggacctcgccgacgacctagccagctccgaggagtcggtccgggacgcccggcgcggcgtgttcgacgacgcccagccgtggcggcgcaagatccagcgcctcctcccggcggacggcatcacggtcaagcacatcagtgagctgcactgcaggacaggggaggatgtgtcactgtccaggcgcatcgcagcgacgttcctcctgatgaccatagccgacttcagcgaccagctgttcgactggcaggaccgcctcttcgacaacagcaacggccgcctcgagttcagcggcaacacctggacctccctctggcccggcaccggcaagcctggcctctgggtcacctctagctcccgcatggccgcgctctacaccctcatcgtccgcgaggaggagatacacatcacgcagcgagcgcgagatacacatggccgggacgaggacatggacctggtgatccccccggtgttcaacggctgcacccgattgctcaacgccgaggaccagaaggtggcacgagacctctactgggaggcggtatgcggcgaggaggcgtcggactggctcaaggtggagcagctcctccagcagagcattgccaagaacccgtttgtgggggaaccacacctggtgcttgcccaggtgtaccttaacatggagaggtacggcgaggcgcagatgcaggcagaggaaggtctgaggctgttgctggagtggggcagcagctgggacaagaggatgccatgggagggctgggtgtcctggggcagggcgatgctgaccaaggccaccgacaaggattggccgcatacctcattcgggatcctcagccttgggcttgtcaaatgatacatatattctcaccgtatgcatatgtatgtatttgtacgaaataataaacccaaggccagggggtcaagccaaacaataatttgatgtacttggaattcagatgtgttatcaaacacaacttgtctgccagtcctcttcagtcatagttaagttcatctgacatttaatttgggttgttcatatgtttggatatgttctgtgcgatctttacagcgtgttggagcttatagatgacaatctagattaagtcatgaagacttaaagttttggaatccaacatcgatctcaaacagactaaaaggagcaaaacaattaagaaggctaattatgcaggtttgagtgttaaaaatatgttgtatacaccttctactttgtatatggcacgttggttttgctctctaaccatgtttgtagagaaagtgtcatttggagcactgtttcaggtgaaacataagagctggagaaaatttgaaaagaggtatatttcctacacttagtcaattggattaagtgctaactatgtttgtctaagttgtagggaagctactaagaaaagccaaaaaggagttggagaagtttggctcttttgagccaaactttgactggtctagaaagcactgaacagtccg

SEQ ID NO: 51929 - DNA, 4871 bp, Zea Mays
tgttctctatttgccaggtgagagatgtgcttccgtaattattagatgatgacgacgacatggctgatctttatttgtctagaaagttggctggagcatcttcccctgttagtggttccggtggaccaaattggttctctgcatcccaactactggttcaaaaatatcaagaccaaattggttccctgaatgtgcttattatgctttgcttctatctatttgagtaggatacttctgaatgtgctgctaagcctttaagaatgaaagcttcgatttgatttcattatgcattgttgtctacagagatacttatttttgtttaagggcactttcaacagactgagcaaaatattttcttagcccttgttatttgactgtcgaatatcccttttacagactggtggtcaacatgttgtttggggcgtatggttgctggtggtaagtcacagcaccacacgcattgtaccattgctgcttgcaatggctttaatattttctagacaaatatttaatcgtttgcaagacaccgtttggacagccagagcttgatcacatttttcaattcaacaaattgttagtttctgttttgtgtttcaagaaatggggctacttgagattaaacatggagccatatcgcatgatgttactcacgccaccattcttctgcctttatagttttctgctcgtacctttcctgttgttgtcataatttatttgctctgtccttttcctattacaatcccaaagtttttgtgttctcttgttattttaacatagttgaccaaacttcaaaagtttaaactgatgagaagacactctttcgctgataaaactttaatacgtttagatctagtactattacaaacaaaaaagacacattttttgattggacaaaaagacacatttaaaagaaaaccatcgtaaacaaaaccgaaaacagactatgtaaaagaatctctctttttttttaaaagagagagagagagagagcccgacacatggcctatattggttattggaacaattggatctataccattaaaagatccaaactttagatatataccatggaccccacatgtcattgactcagctggacccacatgtaagtgagatagtaatggtatgaatccaaagtggtgatcttttaatggtatggatccaaatttcccttggttatttgggcatctccaccctttccgggcctgatctagtactagttccgtagaggttagcccatgaaaaagagaggcccaattaacaacaacccgggcaactcctcccgtccggccattccattccccatattccgccgcatcacaatctcacgtgtccgtcgccggcgatggaccggcagccgcccaccgcctcgctctcggcgcacgagtgggagcagctcctcgacgatttcgcttcctcttcgaacccctctcgccgcgaccgatggctccacctcccgctcctggacctcgccgtctcctcgctgctccgccgcgacctcccctcccatctcaagcctcacctcctctccttagtagacgaccacctgctcccgccctcctcgaccagcctccccgccctccttgcctccttcctctccttcccaccggaccatccgctccgcgaccaccttctcgtcaccgtcgtctccgccttcgcctccgccctcgccgcgcccgtctccagggaccacgaggccccgcacctcgccgccctcgttgacgcgctcctcgtcaccgccaaccgccccaaccacgcgcccgaccgcgccgcgcgcgcgctcgcctgcgacgccctgcgcgccatcgaagctgcgctaccgggtcttcttgccgaggtcctcggccacctctacgcgctcgccgccgcggagcgctcgccggccgcgcagtcctacctcctcctgctcgcctccgccgcgcgccacgccgtgcgcctcgggaggctcgcctctagcgcctccatcctgtcggtagcaggcccgcccacccccttcgctgtacccgctcacctgctcttgcctcccgccgcccctggcgcgtccatggcgccaccctcggaggtgaacatcagggacataaggaaggtgctcgctctgcttatggaccggccgcaggtgctcacgcccgcagcggccatggagatgatgtccatccttgccgaggtcgcgtcggctgtgctccagtgggcgccggcgattgcagcgcacattaaagtgcagttcggggggatggtgcattcgtccaacgccatgctgctacactcgctgctcacgctcttcctccagttcccggatgcctttggagctgaggacgagcgcacaatggcgcaccgcctggctttggctgcctgtgaggtgcaccgtccactcgcagtgcgattgctggctttgcattggctactcggctctggcaggttcagaaatctggtgcctggtctcgcccgatggttttaccctgccttgttcgatccccttgcgctcaaggccaagaagctggattgtctagcttatgttgctgctggtgttgatggggagaaggttgcagcagcaggcagagcgagcaagcgattgactgggctacttgacgatggtttggtttccgtctccgccttcaggtggctcccagcatggagtactgagacaggtgtggcgttccgagcgttgcacagtgtcttggttggtgcttctcctcacagaactgacggcacacgttgctccggggctggctatcttggttgatatggcatcagagcatcagggtttagtcccagtgattgctgatttcacgaaccgtctactagcatgcaactcacatcggtgggctggggagcgattgctccggacacttgatgagagtctgcttccaaggcttcagccaggctatcagcttgcttcatattaccctattttcgtgaagattgcacagaatgagacggtacctcagctccgcctaatagaattgctcaccgagcagatggtttctctcaccaagaagcatggaccggacacagagctgaagtcatggtctcagggaagcaaagttgtgggcatttgtcgtgtcatgttgaagcatcatcacagctctcatatctttcttcccctttcacaccttcttgtgctcactatcgagtccttccccgatctggaggttcgggaccatgccaggatttgcttgcggatgttatcttgtgttcctgggaagaaactgaggcatatcatgggagttggagaacaaccgtcaggtgtcacaccttctcatcctgattctttgtttgacatcccatcaccgtgtcctgctctagatcttaagagcatgcctgatctggcgtcttacattcatcttgaaagggttgggcctttagttgtgaagcaatcatgggccctcacattgcctaatttcagtgtccagagcagaccatctggttccattctaagtatacaggacgtcagctctgttccctcagagcaagaaaatccaactggacctacaattgagagaattggttatagacaagaaaccctacgtgtgatggatgctaaaggcgctgaaacattgcaaattctcagaaggtatttcgcgtgcattccagactatctacactcatctggtttcaagatacagatacagtgcacttttagattcgacacagagccatttaacaatgcgtgggggttagatttgccagtttcagattctgatggggctgatgagttgcctgccctttatgcagtgacaattacattttcatcaagtgcacagtttgggaaaattccatcatgtcatattcctttcattctaggggaacctccaggttctggtatggacatcgttcccgtagataatcagaacagggaagaatccggttactgtgcttcagtgatgatagaactggaacctcgagagccttcacctggtcttattgatgtttcagttgaagcaaacacagagaactgccatgtattatcagggccgcttaaacccattacagttggctttgaggacatgtttttaaaggccagcgtaccacctgatactccaagagagggtgtggctatgtactaccaggatctgtttcaagctttgtggcaggcctgtgatagctctactaacactggtcgagaaactttccctttgagtggagggaaagggtcagctgccattaacggaactcggtctgttaaacttttggaggtaactccaaaggttttgattggatctgttgaaagatatctggcttcctttgttgtcagtgtttctggagtttcacttgtaaccatcctgagaggaaacggaatcattaagaacgtcatgtgggaagaaaatgttgcagatgccagtgtaggtgctgacgcacttgttccgtactcaccggacagaaatctccagcttcagatcatagaagacgatgagattgggggtggtgctgagaggtatggccatggaagcaagagagagatgggtatcatgcgtgttatgatattcctaccacccaggtatcacctcctgtttctgatggaggtaggcagtgcctcaacattggtcaggataaggaccgatcattggccatgccttgcatatgtcgacgaatacttggaagcattgatttcttagagactttctgtggtcaatggtgtgcagtttttgtaccaatgctgttcagttttgtaccttatgtaacactagagagtgaacattgggggtttacgctttttgaggcctcttttctctctaccattcagagttgggagcctgtaacttccggtagagagcagttttgttcactggtattatcaaaaatacacaattatatatgcagaaactaaatccccatcgcatgtgtttggctgcaatttcgttcctttattattt

SEQ ID NO: 51930 - DNA, 1140 bp, Zea Mays
gctcttcgtcgtagcttctgcaagcaagcacatctttagtaactcctccaaagtagatggtcagagttaagtagcaaacacacatgcatgatagatgggaatatatctaatgcaaaccatattttggtgcaaactctatacaaacctactaaaaaaagttccgaaaatttctgaaaaagaacatgaatgtacatctgaggttacatcatatatacacaaaattttatggtcaaattcatcttactctagcagatacaaaaaaaaaacaaaaaatctgacaaacaataatagttcaaatgcaccaaaatttgtcttttttttgtaactgctagagtaagatgaatttgaccatgaaattttgcatatagataagataagcttagatgtacatttatgtttttttaagatttttttaaaacttttttagtagatttgcacgggatttacaacaaaacatggtttgtattcgatatgttcccttcgtacttaccatgaaattaggacgaccaggtatctattgttcataagcgtttccttcccatagctcttgctgcatcctcatgtacaacaattgcttctcccacagcaactcgaaagggattcacataccatcaaaagatccaactatcaacaagtggttgtgaggtctgaatcccatgttggtgctgtgtgggattcaactatcaactattttttaaaaggtacttagtgaccgcaagttacagccattccatgcaaaacccgagcctaattgacaacgagcatgaggctggtaagtagcaacaggccgaacgagtaggtaggcaggctatgtagatggatggctgttaggatgtgttgtctgacatcaattcaaacgtcgccggaatattgattatcccacaatgactagttaaagcatccggtctcatgggtagtttgagcaattgtctgccatcccacaatgactaaacataagctcgggcagggcaaggtaatatgcgggtagcaaggacaattaagctccgcgtggtatggtatgaagcacgaaggcggcggaccagatccaaaagttggagatccagatcgagagagggcaggccgcggggaaatggaatggaagaggagctgaccgaatctgaggaggaagtcgaagaggcg

SEQ ID NO: 51931 - DNA, 4764 bp, Zea Mays
gtagctctctcacccccaaccccaatggtcagcccgtgagggtgaggccgtgaccatttaaaagtcgttctctctccctctctctccaccacaccagccaatgggtgaacctaaacccccacgccccactcagtccagccgaccagccaccctcaccatgcctcgccgcgcaggagccgcctggccatgcttcctcctgctccacattatcgcccacctacacctcgccgtcaacgccgccgacgccgacgctctgctcaccttcaagtcctccctcgaccgctccgaccgcctcccgtggcgccccgacacggcgcccgctttctgcgcctcctggcccggcgtgcgccagtgcgcccccgccggccgcgtcaccaagctcgtcctcgagggcctcaacctgacgggctccctcaccgccgcgctcctcgccccgctggccgagctgcgggtcctcagcctcaagtccaacgccctcacaggccccatcccggaggccctcccgcgcgcgctcccaaatctcaagctgctgtacctcgccgacaaccgcctccagggccgcgtccccgccaccctcgccatgctccaccgggccaccgtcatcgtcctctccggcaaccgactcacgggccagatcccgccctccctcgccgccctgccacgcctgacctcgctgctcctcgaccgcaacctgctcaccggcgccgtgccgccgctggcgcagcgcacgctcagggcgctcaacgtctcggccaaccgcctgtcgggggagatcccgcgctcgctcgccgccaggttcaacgcctcgtcgttcctccccaatgccggcctctgcggcgctcctctagccgtccgctgcgtcgctggtggcccgagccccgcgccgctcaccgcggccacggcggctttcgcgcccctgcccccgccccggaccaaggcacgacgcggcaagaacgccgccgtcgtggccggagccacggtggcaggggtggtggtgctggccatcctagtggcggcggcgctcatggcgtcgcggagagggaggaacaagcgcgtcgccggcgacgtcgacaagggcaacgccggtacagtggcggcggaggcggagcaccagacagcacaggcacagcagcagcatattcatgcatcctccgcggcgccggccgcaaccacagccgggggcgtcggtggccgggagttctcgtgggagcgcgagggaatcggcaagctggtgttctgcggcggcgtggcggagatgtacagcctggaggagctgctgcgcgcgtcggccgagacgctggggcgtggcgaggtaggcagcacgtacaaggcggtcatggagacggggttcatcgtgacggtgaagcggatgcgcgacccgtcggcgggcggggtgggggccgccgagttcgggcggcgcgccgaggagctggggcgggtgcggcaccccaacgcagtggcgctgcgggcctacttccaggccaaggaggagcggctgctggtgtacgactactacccaaacggaagcctcttctccctcgtgcacgggtcgaggccgtccagcaagggcaagccactgcactggacatcgtgcatgaagatcgcagaggacgttgcggcggggctggtgcacctccaccagtggagcatcgtccacggcaacctgaagccctccaacgtcctcctaggccccgacttcgagtcgtgtctcaccgactacggcctgctgccgacgctgctaccctccaacgccgagctccactcctcgagctccctgttctaccgcgccccagaggtacgcggcgcccacgccacgtccttggaattattcacgcccgcgacagacgtgtacagcttcggggtgctcctgctggagctcctgacgggccggacaccgttccaggacctcatggagctgcatggcgacgacatccccagctgggttcgcgcggtgcgtgaggaggagagggagacggagtctgtgtccgccggtggaggtggagccgaggagaagctcacggcgctgatcaacatcgccgcgacgtgcgtggctgcggacccggccaggcgccccaccacggcggagctgctccggatggtgagggaggcgagggccgaggccatgtcatcgtcaaacagcagcgaccggtcaccagctcggtggtcggatgccatgctgggcgtaccactgccacgggatcaggccgcggaaagcttcacggacagggagaggctagactagaagaagcttccttgcttgcatcactgtgatgagatattgagatggatggtttggattgggttttgtttgtttgtttgttgtgcattttttttctttttaaatcagagactgatgatgatgagacaccaaagcaaagcaatgcaatgcaagcaagctatagatgctgccagtgttttatgttaatcttccagtcaatgattatctacaacatagtacgtatttgttttgaattactactatatatatggcatacaacatctgctattgatgtctgtataaataaataaatgaacctcaatcagcagttgaacctgctttgtcttctcaaaacgttgttacttcttcttcagaagacaccaccccttccggccttgtaaacaacaagacaaggcccagaccagcccatctcacagagcaccctgtgacgcacgcagaggaaaaatttgcaaaaaagaccaggcgcaggcggcaaaaccaacagaacaggcctatgttcccatcgagtcgagacgagaccgtcctccgcccgagtctcgctcgctagctagggtttccaccaatggcggcgcccaccacctcccgccgcggccccggcggcgcccgcaacatggacgacgagaacctcaccttcgagacctccccgggggtcgaggtcgtcagcagcttcgaccagatgggcatcaaggacgacctcctccgcggcatctacggctacggtttcgagaagccctccgccatccagcagcgcgccgtgctccccatcatcaacggccgcgacgtcatcgcgcaggcccagtccggtaccggcaagacgtccatgatctccctcaccgtctgccagatcgtcgacaccgccgtgcgcgaggtgcaggctttgattctctcgcctactagggagcttgcttcccaaacagagagagttatgctggctattggggaccacctcaacgtccaagtgcacgcttgcattggtggaaagagtattggtgaggacatcaggaggctcgagaatggggtgcatgtcgtctctggaactccaggcagagtctgtgatatgatcaagaggaggacactgcggaccagagccatcaagcttctagttctggatgaagctgatgagatgttgagtagaggctttaaggatcagatttacgatgtctacagatatctccctccagaacttcaggtggttttgatctctgcaactcttcctcatgagatcttggagatgactagtaagttcatgaccgaaccggttaggatccttgtgaagcgtgatgagctgaccctggagggcatcaaacaattctttgttgctgttgagaaagaggagtggaagtttgatacactttgtgatctttatgatacactcaccatcacccaagctgttattttctgcaatactaagagaaaggtggattggctcactgaaaaaatgcgtacaaataacttcaccgtatcagctatgcacggtgacatgccccaacaagaaagggatgccattatgggtgagttcaggtctggcgcaactcgtgtgctaataactacagatgtttgggctcgaggactggacgttcagcaggtttcacttgtcataaattatgatctcccaaataatcgtgagctttacatccatcgcattggtcgttctggtcgttttgggcgcaagggtgtggcgatcaatttcgtgcgcaaggatgacatccgtatactgagagatatagagcagtactacagcacacaaattgacgagatgccaatgaatgttgctgatcttatttgagcagcaagaggatcgggaggggagcttcttgtgttggcttgaggcccttggcgcgagtgtggctgtggactggagcagatgggctttgtagttgggtgtggagcagagattatttccgtttttgccatggcatgaactgtatatattttagctcgctccagctcatgtaacactttgttgctgcgtttgtgcttgggatacgaagacctgtgttgatggcttcgttagtgtgacactgatttggcgtcggatttttgtttgtcatctgtcattcctgtgctgatctgaattgctgtttgtttattattattattattacaattactatcaattattatggttgactggtattacaattactatcaattattatggttttgactggttgcagagccgagaattgtgattctgtgcttattacatgaacctatgcttttcgtagcaggatttattattactaggggcgccctatccagcattgggaaagcatgaacaagtaattatacatgctatatttaaattagttaattagttagaggatgattgaatcttcaacaaaacagtttaatctggagaggaagaaagcaaatatcaaacaacacacacacgcttatgcttgataggaaacacattatgattgaatgaatgcaggttcttgatttcaaatacttatgctcggcagtagaaatccatacttatgctcggcattagaaatcctcggcacacgctgggtcgaacc

SEQ ID NO: 51932 - DNA, 1264 bp, Zea Mays
cccaatccctccgtgcacccccgcttcgctcgctatggcaagactaccgcggccgccctccacccccgatgcatccatttaaagggtctgatttgtggacatcacaacaatggaggcgctccatcctcccaggcatctccgccggcgactggtactgtccatcctatgaatccaggttgcagtgagtcaattggaagaatattctgaaacgagcgggcacttagtgcacaccaaggttgcattttttttgatgggttatcttttttccatccttcattttcaacttatgatccgattatcagagaacaccttgatggctcacctatcaacgtttcttccagcgcttatggatgctaaggtggttaagaaggtacagacaaagaaggcgcctgctcccaagattgctaaacaagagtccagtgatgatgacaccagcgacgagacctctgaatctgatgaggaacatgcaaagaagcctgctgctaaacccttggctacagttgcgaaaaatggttcgaagacggtcaagcaagagagcagcagcgatgaggacagttctgaagatgagtcggatgacaacagtgatgatgaacctgcaaagaaggctgctgctaaaccttgggtgccgttgctaaaaatggtttgaagaaaggcaagcaagaaaccagcagggatgagaccagttctgatgatgagtcagacgatgatgttaaacctgctgccccactaaagaaaacatatgtggctgttgcacaaaagaaaaagggagattcttcttgagagtgactctgatgatgactcggatgaggaagtgcctccaaagtcaaaggctccagcagcaactatcaaaaagaaagattccagtgaaagtgagtccgagagtgattctgaggttgaggatgcaagtaaaactcatcctaccaagagagctgcttcaaaaatgaaagatgaatcaagtgatgactcagacactgatgatgatgaagaacctcctcaaaagaagtagaaggaagcactttcagctgcaaaaaaagaaagcagcagtgaggatgaagatgacagtagtgaggaaagttcggatgatgagccaacaaaagttgaagaaaagaaggatccaaaagtatcagaaaacattggatctgaggatgaatcttctaaagacgagagtgataaagacagtgaagagcctgctaatactccaaagaaggctccagtgcacacctctgaaaagcaaactgctaccaaaagaagtatgcacatgtga

SEQ ID NO: 51933 - DNA, 1281 bp, Zea Mays
atgcatccatttaaagggtctgatttgtggacatcacaacaatggaggcgctccatcctcccaggcatctccgccggcgactggtactgtccatcctatgaatccaggattttccctctaaattatggacttgcaagattaaaaacatctcctactataggttatcttaggatttttcatggacttgcatcctcttttgttgcagtgagtcaattggaagaatattctgaaacgagcgggcacttagtgcacaccaaggttgcattttttttgatgggttatcttttttccatccttcattttcaacttatgatccgattatcagagaacaccttgatggctcacctatcaacgtttcttccagcgcttatggatgctaaggtggttaagaaggtacagacaaagaaggcgcctgctcccaagattgctaaacaagagtccagtgatgatgacaccagcgacgagacctctgaatctgatgaggaacatgcaaagaagcctgctgctaaacccttggctacagttgcgaaaaatggttcgaagacggtcaagcaagagagcagcagcgatgaggacagttctgaagatgagtcggatgacaacagtgatgatgaacctgcaaagaaggctgctgctaaaccttgggtgccgttgctaaaaatgttttacccttccagtgctatagaacagaagggcaaaactgagcaaaaagaaccactaagggtaaaactgagcacatcaccaaaatagagggcaccaccttaaaaaacccaaagaaaaagggagattcttcttgagagtgactctgatgatgactcggatgaggaagtgcctccaaagtcaaaggctccagcagcaactatcaaaaagaaagattccagtgaaagtgagtccgagagtgattctgaggttgaggatgcaagtaaaactcatcctaccaagagagctgcttcaaaaatgaaagatgaatcaagtgatgactcagacactgatgatgatgaagaacctcctcaaaagaagtagaaggaagcactttcagctgcaaaaaaagaaagcagcagtgaggatgaagatgacagtagtgaggaaagttcggatgatgagccaacaaaagttgaagaaaagaaggatccaaaagtatcagaaaacattggatctgaggatgaatcttctaaagacgagagtgataaagacagtgaagagcctgctaatactccaaagaaggctccagtgcacacctctgaaaagcaaactgctaccaaaagaagtatgcacatgtga

SEQ ID NO: 51934 - DNA, 1449 bp, Zea Mays
atgcatccatttaaagggtctgatttgtggacatcacaacaatggaggcgctccatcctcccaggcatctccgccggcgactggtactgtccatcctatgaatccaggattttccctctaaattatggacttgcaagattaaaaacatctcctactataggttatcttaggatttttcatggacttgcatcctcttttgttgcagtgagtcaattggaagaatattctgaaacgagcgggcacttagtgcacaccaaggttgcattttttttgatgggttatcttttttccatccttcattttcaacttatgatccgattatcagagaacaccttgatggctcacctatcaacgtttcttccagcgcttatggatgctaaggtggtagagccgtcgatatagaggtcatatatgatcgacagagagcacaccgtggtggagctgcaagttgttgtaggctgtgatgtgcgtgtgacgaaaaagggaggaggtgggagcaggcccggctaggccgtgtccacgaatgcgagcgaccgctgactgctggttaagaaggtacagacaaagaaggcgcctgctcccaagattgctaaacaagagtccagtgatgatgacaccagcgacgagacctctgaatctgatgaggaacatgcaaagaagcctgctgctaaacccttggctacagttgcgaaaaatggttcgaagacggtcaagcaagagagcagcagcgatgaggacagttctgaagatgagtcggatgacaacagtgatgatgaacctgcaaagaaggctgctgctaaaccttgggtgccgttgctaaaaatggtttgaagaaaggcaagcaagaaaccagcagggatgagaccagttctgatgatgagtcagacgatgatgttaaacctgctgccccactaaagaaaacatatgtggctgttgcacaaaagaaaaagggagattcttcttgagagtgactctgatgatgactcggatgaggaagtgcctccaaagtcaaaggctccagcagcaactatcaaaaagaaagattccagtgaaagtgagtccgagagtgattctgaggttgaggatgcaagtaaaactcatcctaccaagagagctgcttcaaaaatgaaagatgaatcaagtgatgactcagacactgatgatgatgaagaacctcctcaaaagaagtagaaggaagcactttcagctgcaaaaaaagaaagcagcagtgaggatgaagatgacagtagtgaggaaagttcggatgatgagccaacaaaagttgaagaaaagaaggatccaaaagtatcagaaaacattggatctgaggatgaatcttctaaagacgagagtgataaagacagtgaagagcctgctaatactccaaagaaggctccagtgcacacctctgaaaagcaaactgctaccaaaagaagtatgcacatgtga

SEQ ID NO: 51935 - DNA, 385 bp, Zea Mays
cccaaagtgaactgaaacagcattgatggatctttccagaaggctgctcggggtaacaacatctcaatatttatctggggctttgataaaaatatttcagaggatgagatctggagctctctcgaacaacattttagtgattgtggtgagatgacaagggtctctatcccgactgatcatgagcctggtgcaataaaagggtgagttctgctacatgaaacaccaacataaggtgtaactaggatggcttgtaccttactacgagagagacagaaagagagcaagagagattttgttgtgcttccactataaggtgcacttgctatcctgagaatggttaaatatgagccactcaaatgatctttttctcttagtaccactgtct

SEQ ID NO: 51936 - DNA, 2307 bp, Zea Mays
aaacaatcataacaaatcattagattatttatatccttattttataaacatgaatgaacattaatgatatatatattacatttataccttcgacttaatagaaggtggaaaagcaagagtgacccaagagtgattagaattcagcgtgaacagcacggtgttattgttcatctatttataggcacaggacgtagcctgcacaaaattacattcatgtccccgacatttactgttgaccataaggcaagccgtcgaggactaagcagtcttttcttctttaggtcggtttcatctttcaccatcgtcctcgtgctaagccgaagcttcttcagccacaactttggagctaatttatccttcctccagactgcaccttcataccatgcacaccttattctcaaagctgaagcctcctgtgacagtctttcttctcgacgcagttgtggtcgcggcagcaggcgtcgaggtcgtgcaggtgcagggctcctcgccgtcgcagccgctccatcccacaccgcagtacttaccgtagcggatcccaacggctgcagcaaagaagcgttaaaccgggtcagatcgccgtcccgacggaatcgatgaggatggctgaagggggtcgcaattgagggccgcgcaagagcggctgcggcgggggctggggcgccgaggacggcggcggcgaggagcgtccgccgcggcgacaacgcttcgtattccgcatcgcagtttgttgaccggattggctggatgggccgaaccaggtcaagtggagatggagagagtcctggtgtggtgcgggccgcaagtgtgagtgagacgtcaccatcgaatcccaccacaaaagctcctttcgtcacaccggccagcacccagcttctcctctcctcacccccacgccccaccccaccaaacaatggcgccggcggcgacttccacagcctctgcgccctcctccttccactccaccggtaggcatagggccagggtcggggcccggccatcgctcgtctctctccgcgtcagagcagccaatcccaacgttaccgccgatcccgcaccggccttccagtccgtcacgaccttcgcgccagccaccgtcgccaacctcggcccgggcttcgacttcctcggatgcgccgtcgccgacgcctccctctccctgggtgacaccgtcaccgcaaccctggacccgtcactcccgcccgccaccgtctccatcgcctccgtcacatccccgtcccgccccaacctcgccgagcgcctctctagggacccgctccgcaactgcgcgggcgtcgccgccatcgccgcgctccgcgccctcggcgtccgctcccacgccgtgtccatccacctcaccaagggcctgccgctcggctcggggctcggctcctccgcggcctccgccgccgccgccgccaaggccgtcgacgccctcttcggctcgcgcctcggccgcgacgacctcgtcctcgcgggactcgagtcggagaaggccgtcagcggcttccacgccgacaacatcgcccccgccatcctcggcggcttcgtcctcgtccgcagctacgacccctttcacctcgtcccgctttccttcccgccagcgctccgcctccacttcgtcctggtcacccccgacttcgaggcgcccacgagcaagatgcgcgccgcgctgcccaggcaggtcgacgtccagcagcacgtgcgcaactccagccaggcagcggcgctcgtggcggcggtgctgcagggggacgcgggcctcatcggctccgcgatgtcgtccgacggcatcgtggagcccaccagggcacccctcatacctggcatggcggccgtaaaggcggcggccctgcaagctggagcgctgggctgcacaattagcggcgcgggccccacagtggtggccgtcatccaaggggaggaaaggggggaggaggttgcccgcaagatggtggacgcgttctggagcgcaggcaagctcaaggcgacagcaaccgtcgcgcagctcgatacccttggtgccagggtcatcgccacgtcatccttgaactagcaaaagattcggaaagtggtactgcaattgtatcaccaaacaaggaagaatgaaggggaaccccatggatttgtatgttttctcttctttcttgcatctttaggtggttaattggctttggaataaatgagatggaggacatcgctagaacaattctgttccgtgggctgtaatttcaatttgggctggtttctttatcatgccatggataattatgaataaatttgaggtagtttgttacctgtcgtcct

SEQ ID NO: 51937 - DNA, 1676 bp, Zea Mays
ctttcttctcgacgcagttgtggtcgcggcagcaggcgtcgaggtcgtgcaggagcgtccgccgcggcgacaacgcttcgtattccgcatcgcagtttgttgaccggattggctggatgggccgaaccaggtcaagtggagatggagagagtcctggtgtggtgcgggccgcaagtgtgagtgagacgtcaccatcgaatcccaccacaaaagctcctttcgtcacaccggccagcacccagcttctcctctcctcacccccacgccccaccccaccaaacaatggcgccggcggcgacttccacagcctctgcgccctcctccttccactccaccggtaggcatagggccagggtcggggcccggccatcgctcgtctctctccgcgtcagagcagccaatcccaacgttaccgccgatcccgcaccggccttccagtccgtcacgaccttcgcgccagccaccgtcgccaacctcggcccgggcttcgacttcctcggatgcgccgtcgccgacgcctccctctccctgggtgacaccgtcaccgcaaccctggacccgtcactcccgcccgccaccgtctccatcgcctccgtcacatccccgtcccgccccaacctcgccgagcgcctctctagggacccgctccgcaactgcgcgggcgtcgccgccatcgccgcgctccgcgccctcggcgtccgctcccacgccgtgtccatccacctcaccaagggcctgccgctcggctcggggctcggctcctccgcggcctccgccgccgccgccgccaaggccgtcgacgccctcttcggctcgcgcctcggccgcgacgacctcgtcctcgcgggactcgagtcggagaaggccgtcagcggcttccacgccgacaacatcgcccccgccatcctcggcggcttcgtcctcgtccgcagctacgacccctttcacctcgtcccgctttccttcccgccagcgctccgcctccacttcgtcctggtcacccccgacttcgaggcgcccacgagcaagatgcgcgccgcgctgcccaggcaggtcgacgtccagcagcacgtgcgcaactccagccaggcagcggcgctcgtggcggcggtgctgcagggggacgcgggcctcatcggctccgcgatgtcgtccgacggcatcgtggagcccaccagggcacccctcatacctggcatggcggccgtaaaggcggcggccctgcaagctggagcgctgggctgcacaattagcggcgcgggccccacagtggtggccgtcatccaaggggaggaaaggggggaggaggttgcccgcaagatggtggacgcgttctggagcgcaggcaagctcaaggcgacagcaaccgtcgcgcagctcgatacccttggtgccagggtcatcgccacgtcatccttgaactagcaaaagattcggaaagtggtactgcaattgtatcaccaaacaaggaagaatgaaggggaaccccatggatttgtatgttttctcttctttcttgcatctttaggtggttaattggctttggaataaatgagatggaggacatcgctagaacaattctgttccgtgggctgtaatttcaatttgggctggtttctttatcatgccatggataattatgaataaatttgaggtagtttgttacctgtcgtcct

SEQ ID NO: 51938 - DNA, 1909 bp, Zea Mays
gcagcacccaccgcaccgccactgggctgctgccttgcaaaaagtggggcgagtgaagaaagcaggcagccatgcttttcgggagaaggggaagggaaaagcagccagccagccagccaccacactaccacagcaaagcaaagctcgcacctcgctgcgcactcccactgcgcttctcttcctcgcaccagcagtccagaccaaggagggacgcggcgggggcagcacctttcctcttcctcctcccccagaaatcaattcctcttcccacacgatccatccggaggcgatccagctcttcgcgccctctcttccccaaacaggatacatgagtggggaggccgcggagagagctgattgatcgggaagaagaagaagaacatcgcaattcacttgctcctgcggcggctgtactagggtagccgagaacccgcccatacccatggcatcctcctcggggggcggcggaggccgtaggatgacccccggaggagactcctctgcctccgccggcggcaggaggatctaccgcacccagaccgccggcaacctcggcgactccatattcgacagcgaggtcgtcccgtcgtcgcttgtcgacatcgcccccatcctgcgtgtggccaacgaggtggaggccagcaacccgcgagtagcctacctctgccgcttctacgccttcgagaaggcgcatcgcctcgaccccacctccagcggccgtggtgtccgccagttcaaaactgcgctgttgcagaggctcgagagggagaacgatcccacgctcaagggcagggtcaagcagagtgacgccagagaaatgcagagcttctaccagctctactacaagaagtacattcaggcgcttcaaaaagttgctgataaagccgacagggctcagctcaccaaagcctatcaaactgcagccgtgctcttcgaggtcctcagagccgtcaatgtctcccagaaaatcgaagtcgataagtcgattctggagacgcacaaccaggtcgaggaaaagaagaagctataccttccttacaatatcctcccgcttgatcctgacagtgccaaccagcctatcatgctctatcctgagatccaagctgctttccatgctcttcgtaacactagaggtctgccatggcccaaggaacacgaaaagaagcgtgatgcacccaaggaacacgaaaagaagcgtgatgcagatcttcttgcctggcttcaggccatgtttggattccagataacgtatccaaccaaagggagcatctcatactcttgcttgccaacgtgcacataagacagattcccaaatctgaccaacaaccaaagttggatgaccgagcactggatacagtaatgaagaagctatttaagaattacaagaggtggtgcaagtatcttggtcgcaaaagcagcttatggttgccgactatccaacaggaggtgcaacaacgcaaacttctctatatgggtctttatctgctcatatggggcgaggcagctaacctgagattcatgccagaatgtctttgctacatctatcatcatatggcctttgaactctatggtatgttggctggaaatgtgagcccgacgactggtgaaaatgttaaaccagcttatggtggagaagaagaagccttcttgaaaagagttgtgactccaatctacaaagttatagagaaggaagtagagaggagcaagaccatgaaatcaaagcactcacactggagaaactacgatgatcttaatgagtacttttggtcaagagattgcttccgattgggatggcctatgcgatctgatgcagattttttcaagactccaaatgttcctcttcaccatgtggatggagtatgtaccttgtgacaatgaatatacttacggcatttgtcaaatcaattag

SEQ ID NO: 51939 - DNA, 1916 bp, Zea Mays
gcagcacccaccgcaccgccactgggctgctgccttgcaaaaagtggggcgagtgaagaaagcaggcagccatgcttttcgggagaaggggaagggaaaagcagccagccagccagccaccacactaccacagcaaagcaaagctcgcacctcgctgcgcactcccactgcgcttctcttcctcgcaccagcagtccagaccaaggagggacgcggcgggggcagcacctttcctcttcctcctcccccagaaatcaattcctcttcccacacgatccatccggaggcgatccagctcttcgcgccctctcttccccaaacaggatacatgagtggggaggccgcggagagagctgattgatcgggaagaagaagaagaacatcgcaattcacttgctcctgcggcggctgtactagggtagccgagaacccgcccatacccatggcatcctcctcggggggcggcggaggccgtaggatgacccccggaggagactcctctgcctccgccggcggcaggaggatctaccgcacccagaccgccggcaacctcggcgactccatattcgacagcgaggtcgtcccgtcgtcgcttgtcgacatcgcccccatcctgcgtgtggccaacgaggtggaggccagcaacccgcgagtagcctacctctgccgcttctacgccttcgagaaggcgcatcgcctcgaccccacctccagcggccgtggtgtccgccagttcaaaactgcgctgttgcagaggctcgagagggagaacgatcccacgctcaagggcagggtcaagcagagtgacgccagagaaatgcagagcttctaccagctctactacaagaagtacattcaggcgcttcaaaaagttgctgataaagccgacagggctcagctcaccaaagcctatcaaactgcagccgtgctcttcgaggtcctcagagccgtcaatgtctcccagaaaatcgaagtcgataagtcgattctggagacgcacaaccaggtcgaggaaaagaagaagctataccttccttacaatatcctcccgcttgatcctgacagtgccaaccagcctatcatgctctatcctgagatccaagctgctttccatgctcttcgtaacactagaggtctgccatggcccaaggaacacgaaaagaagcgtgatgcacccaaggaacacgaaaagaagcgtgatgcagatcttcttgcctggcttcaggccatgtttggattccagaaagataacgtatccaaccaaagggagcatctcatactcttgcttgccaacgtgcacataagacagattcccaaatctgaccaacaaccaaagttggatgaccgagcactggatacagtaatgaagaagctatttaagaattacaagaggtggtgcaagtatcttggtcgcaaaagcagcttatggttgccgactatccaacaggaggtgcaacaacgcaaacttctctatatgggtctttatctgctcatatggggcgaggcagctaacctgagattcatgccagaatgtctttgctacatctatcatcatatggcctttgaactctatggtatgttggctggaaatgtgagcccgacgactggtgaaaatgttaaaccagcttatggtggagaagaagaagccttcttgaaaagagttgtgactccaatctacaaagttatagagaaggaggaagtagagaggagcaagaccatgaaatcaaagcactcacactggagaaactacgatgatcttaatgagtacttttggtcaagagattgcttccgattgggatggcctatgcgatctgatgcagattttttcaagactccaaatgttcctcttcaccatgtggatggagtatgtaccttgtgacaatgaatatacttacggcatttgtcaaatcaattag

SEQ ID NO: 51940 - DNA, 1914 bp, Zea Mays
gcagcacccaccgcaccgccactgggctgctgccttgcaaaaagtggggcgagtgaagaaagcaggcagccatgcttttcgggagaaggggaagggaaaagcagccagccagccagccaccacactaccacagcaaagcaaagctcgcacctcgctgcgcactcccactgcgcttctcttcctcgcaccagcagtccagaccaaggagggacgcggcgggggcagcacctttcctcttcctcctcccccagaaatcaattcctcttcccacacgatccatccggaggcgatccagctcttcgcgccctctcttccccaaacaggatacatgaggggaggccgcggagagagctgattgatcgggaagaagaagaagaacatcgcaattcacttgctcctgcggcggctgtactagggtagccgagaacccgcccatacccatggcatcctcctcggggggcggcggaggccgtaggatgacccccggaggagactcctctgcctccgccggcggcaggaggatctaccgcacccagaccgccggcaacctcggcgactccatattcgacagcgaggtcgtcccgtcgtcgcttgtcgacatcgcccccatcctgcgtgtggccaacgaggtggaggccagcaacccgcgagtagcctacctctgccgcttctacgccttcgagaaggcgcatcgcctcgaccccacctccagcggccgtggtgtccgccagttcaaaactgcgctgttgcagaggctcgagagggagaacgatcccacgctcaagggcagggtcaagcagagtgacgccagagaaatgcagagcttctaccagctctactacaagaagtacattcaggcgcttcaaaaagttgctgataaagccgacagggctcagctcaccaaagcctatcaaactgcagccgtgctcttcgaggtcctcagagccgtcaatgtctcccagaaaatcgaagtcgataagtcgattctggagacgcacaaccaggtcgaggaaaagaagaagctataccttccttacaatatcctcccgcttgatcctgacagtgccaaccagcctatcatgctctatcctgagatccaagctgctttccatgctcttcgtaacactagaggtctgccatggcccaaggaacacgaaaagaagcgtgatgcacccaaggaacacgaaaagaagcgtgatgcagatcttcttgcctggcttcaggccatgtttggattccagaaagataacgtatccaaccaaagggagcatctcatactcttgcttgccaacgtgcacataagacagattcccaaatctgaccaacaaccaaagttggatgaccgagcactggatacagtaatgaagaagctatttaagaattacaagaggtggtgcaagtatcttggtcgcaaaagcagcttatggttgccgactatccaacaggaggtgcaacaacgcaaacttctctatatgggtctttatctgctcatatggggcgaggcagctaacctgagattcatgccagaatgtctttgctacatctatcatcatatggcctttgaactctatggtatgttggctggaaatgtgagcccgacgactggtgaaaatgttaaaccagcttatggtggagaagaagaagccttcttgaaaagagttgtgactccaatctacaaagttatagagaaggaggaagtagagaggagcaagaccatgaaatcaaagcactcacactggagaaactacgatgatcttaatgagtacttttggtcaagagattgcttccgattgggatggcctatgcgatctgatgcagattttttcaagactccaaatgttcctcttcaccatgtggatggagtatgtaccttgtgacaatgaatatacttacggcatttgtcaaatcaattag

SEQ ID NO: 51941 - DNA, 1913 bp, Zea Mays
gcagcacccaccgcaccgccactgggctgctgccttgcaaaaagtggggcgagtgaagaaagcaggcagccatgcttttcgggagaaggggaagggaaaagcagccagccagccagccaccacactaccacagcaaagcaaagctcgcacctcgctgcgcactcccactgcgcttctcttcctcgcaccagcagtccagaccaaggagggacgcggcgggggcagcacctttcctcttcctcctcccccagaaatcaattcctcttcccacacgatccatccggaggcgatccagctcttcgcgccctctcttccccaaacaggatacatgagtggggaggccgcggagagagctgattgatcgggaagaagaagaagaacatcgcaattcacttgctcctgcggcggctgtactagggtagccgagaacccgcccatacccatggcatcctcctcggggggcggcggaggccgtaggatgacccccggaggagactcctctgcctccgccggcggcaggaggatctaccgcacccagaccgccggcaacctcggcgactccatattcgacagcgaggtcgtcccgtcgtcgcttgtcgacatcgcccccatcctgcgtgtggccaacgaggtggaggccagcaacccgcgagtagcctacctctgccgcttctacgccttcgagaaggcgcatcgcctcgaccccacctccagcggccgtggtgtccgccagttcaaaactgcgctgttgcagaggctcgagagggagaacgatcccacgctcaagggcagggtcaagcagagtgacgccagagaaatgcagagcttctaccagctctactacaagaagtacattcaggcgcttcaaaaagttgctgataaagccgacagggctcagctcaccaaagcctatcaaactgcagccgtgctcttcgaggtcctcagagccgtcaatgtctcccagaaaatcgaagtcgataagtcgattctggagacgcacaaccaggtcgaggaaaagaagaagctataccttccttacaatatcctcccgcttgatcctgacagtgccaaccagcctatcatgctctatcctgagatccaagctgctttccatgctcttcgtaacactagaggtctgccatggcccaaggaacacgaaaagaagcgtgatgcacccaaggaacacgaaaagaagcgtgatgcagatcttcttgcctggcttcaggccatgtttggattccagaaagataacgtatccaaccaaagggagcatctcatactcttgcttgccaacgtgcacataagacagattcccaaatctgaccaacaaccaaagttggatgaccgagcactggatacagtaatgaagaagctatttaagaattacaagaggtggtgcaagtatcttggtcgcaaaagcagcttatggttgccgactatccaacaggaggtgcaacaacgcaaacttctctatatgggtctttatctgctcatatggggcgaggcagctaacctgagattcatgccagaatgtctttgctacatctatcatcatatggcctttgaactctatggtatgttggctggaaatgtgagcccgacgactggtgaaaatgttaaaccagcttatggtggagaagaagaagccttcttgaaaagagttgtgactccaatctacaaagttatagagaaggaagtagagaggagcaagaccatgaaatcaaagcactcacactggagaaactacgatgatcttaatgagtacttttggtcaagagattgcttccgattgggatggcctatgcgatctgatgcagattttttcaagactccaaatgttcctcttcaccatgtggatggagtatgtaccttgtgacaatgaatatacttacggcatttgtcaaatcaattag

SEQ ID NO: 51942 - DNA, 2246 bp, Zea Mays
agattcgtcactgcggctatactgaaactgggtcaagcaatcttggatatcatcttgagctggaaagcaagaagaaacatgtctcttgttgttaagctacgatacatcttgaagttactatcagctgcttcttgggttgtgattttgcctgtaacttatgcatacacttggaagaatccaactggtcttgcaagagcaattaaaagttggcttggtgatggtcagaatcagccatcattatacattttggcagttgtgatttatttggcaccaaacttgctgtccgctacactatttcttttccctgtaattaggagagctcttgagagatcaaatcttaaagtcgtaacattcataatgtggtggtcgcagcctcgcttatttgttggaagaggaatgcatgagggcgcattctcccttttcaagtatacaatgttctgggtcttgcttttggccactaaattggttgtgagcttctatgtggagatcaaaccacttgtgcagccaacaaaagatataatgaaggagccaatacgaacatttaagtggcatgagtttttcccccatgcaaataacaacattggtgttgtcattgcgctttgggctcctattattcttgtctatttcatggatactcaaatttggtatgcaattttctcaacgctaattggtggtgtctatggggcttgtcgccgtcttggtgagataaggacattggggatgttgagatctcggttcgaatccctgcctaaggctttcaatcaatgcttgattccatctgacacaagcaaaaggagaggattccgggctgctttctccaaaccttctaagacatctgaggataccagagaacaagaaaaaatagccgcaagatttgctcagatttggaatttaattatcacaagcttccgtgaggaagatttgatagacgacagagagaaggacttgttacttgttccatactgcaaagatcgtgatatggatataatccaatggccaccattcctgcttgccagcaagattccaatagcattggatatggccgcagatagtggtggaaaagatcgtgatctaaagaagaggatgaaatcggatccatattttacttatgctatcaaggaatgctatgcttctttcaaaaacatcatatatgaactagtgatcgattcacgagagagaggttacatacaaaagatcttcgatgcggtggatgagcacatagcagaagagactttgataaaggagctgaacatgagtaaccttcctaccctaagcaagaagttcattgagctgcttgacttactggaaagtaacaacaaagaagatcatgatcagatcatcatattgttccaagacatgcttgaagtggttacaagggacataatggttgaccagctcagcgaactactggaattgatacatggtgcaaataataaaagatctgaaggaatgacatcacttgaccaacaagatcagttgttcacgaaagctattgattttcctgtaaagaaaacccaagcatggaatgaaaagataaaaaggcttcgacttttactcacggtgaaggaatcggctatggatgtccctacaaacctggatgctaggaggaggatatctttctttgctaattctctttttatgtcgatgccagatgctccaaaagtgcggcaaatgttgcccttctctgtcttgactccttattataaagaagatgttcttttctcttcacaagcactagcagaacagaatgaggacggagtttccatccttttttatttgcaaaaaatctacccagatgaatggaaaaattttcttgaaagggtgcattgtgagagtgaagatcaactccacgagactgagcattctgaagagcagcttcgcctttgggcatcataccggggacaaactttgacaagaactgtaagagggatgatgtactacagacaagctttagtccttcaggcttcccttgatatggccagagatgatgaccttatggagggttttagagcagctgacctgttatctgaatctgatgaatcaccactattgactcaatgcaaagctatagctgatatgaaattcacatatgttgtatcatgccagcaatacggtattcagaaacgttctggtgatccacatgcacaggatattctgagattgatgaccacttaacaaagtaatcgaggttgaggtggaggcggttgaagtcgtggagggagcagccactgctacccgaaggcggg

SEQ ID NO: 51943 - DNA, 4480 bp, Zea Mays
agattcgtcactgcggctatactgaaactgggtcaagcaatcttggatatcatcttgagctggaaagcaagaagaaacatgtctcttgttgttaagctacgatacatcttgaagttactatcagctgcttcttgggttgtgattttgcctgtaacttatgcatacacttggaagaatccaactggtcttgcaagagcaattaaaagttggcttggtgatggtcagaatcagccatcattatacattttggcagttgtgatttatttggcaccaaacttgctgtccgctacactatttcttttccctgtaattaggagagctcttgagagatcaaatcttaaagtcgtaacattcataatgtggtggtcgcagcctcgcttatttgttggaagaggaatgcatgagggcgcattctcccttttcaagtatacaatgttctgggtcttgcttttggccactaaattggttgtgagcttctatgtggagatcaaaccacttgtgcagccaacaaaagatataatgaaggagccaatacgaacatttaagtggcatgagtttttcccccatgcaaataacaacattggtgttgtcattgcgctttgggctcctattattcttgtctatttcatggatactcaaatttggtatgcaattttctcaacgctaattggtggtgtctatggggcttgtcgccgtcttggtgagacatctgaggataccagagaacaagaaaaaatagccgcaagatttgctcagatttggaatttaattatcacaagcttccgtgaggaagatttgatagacgacagagagaaggacttgttacttgttccatactgcaaagatcgtgatatggatataatccaatggccaccattcctgcttgccagcaagattccaatagcattggatatggccgcagatagtggtggaaaagatcgtgatctaaagaagaggatgaaatcggatccatattttacttatgctatcaaggaatgctatgcttctttcaaaaacatcatatatgaactagtgatcgattcacgagagagaggttacatacaaaagatcttcgatgcggtggatgagcacatagcagaagagactttgataaaggagctgaacatgagtaaccttcctaccctaagcaagaagttcattgagctgcttgacttactggaaagtaacaacaaagaagatcatgatcagatcatcatattgttccaagacatgcttgaagtggttacaagggacataatggttgaccagctcagcgaactactggaattgatacatggtgcaaataataaaagatctgaaggaatgacatcacttgaccaacaagatcagttgttcacgaaagctattgattttcctgtaaagaaaacccaagcatggaatgaaaagataaaaaggcttcgacttttactcacggtgaaggaatcggctatggatgtccctacaaacctggatgctaggaggaggatatctttctttgctaattctctttttatgtcgatgccagatgctccaaaagtgcggcaaatgttgcccttctctgtcttgactccttattataaagaagatgttcttttctcttcacaagcactagcagaacagaatgaggacggagtttccatccttttttatttgcaaaaaatctacccagatgaatggaaaaattttcttgaaagggtgcattgtgagagtgaagatcaactccacgagactgagcattctgaagagcagcttcgcctttgggcatcataccggggacaaactttgacaagaactgtaagagggatgatgtactacagacaagctttagtccttcaggcttcccttgatatggccagagatgatgaccttatggagggttttagagcagctgacctgttatctgaatctgatgaatcaccactattgactcaatgcaaagctatagctgatatgaaattcacatatgttgtatcatgccagcaatacggtattcagaaacgttctggtgatccacatgcacaggatattctgagattgatgaccacttatccttcacttagggttgcgtacatcgatgaagtcgaagagcctagcaaagacaaaaataagaaaatagagaaggtttactactccgcattggtgaaggcagcagtaacgaagcctgatgatcctggccagaaacttgatcagggatatatataggataaagcttccaggaaatgcaatgctaggtgaaggaaaaccagagaaccagaaccatgccataattttcacacgaggtgaaggtctccaaaccatcgacatgaatcaggaacattatatggaggagactttgaaaatgaggaatttgttgcaagagtttctgaagaaacatgatggtgtgagatatccatcaatacttggtgtaagagaacacatcttcaccggaagcgtgtcttctcttgcatggttcatgtcaaaccaagaaacaagttttgtgaccattggacaacgtgtacttgccaatcctttgagagttcgatttcattatgggcatcctgatatctttgatcgacttttccacctcacacgtggaggtgtaagcaaagcttctaagattatcaatcttagtgaagacatatttgctggatttaattcaacactgcgtgaaggaaatgttacacatcatgaatacatgcaagttggcaagggcagagatgttggtctcaaccagatctcactatttgaagcaaaaatagcaaatggtaatggtgaacagacgctgagccgtgacgtgtaccgtcttggacatcgttttgactttttcagaatgttgtcctgctactatactactattggtttttacttcagcacaatgataacagtttggaccgtttatgtattcctctacgggcgcctgtatcttgtcctaagtggccttgatgaagcattagccactggaaagaggtttatacacaacgagcctctccaggttgctctagcttcacagtcttttgtgcagcttgggttcttgatggcgctgcctatgatgatggaaattggtctagagagaggattcagaactgcattgagtgactttgtacttatgcagctccagttagcatctgtgttcttcacattctctcttgggaccaaaactcactactacggaaccacactgctacatggaggagctgaatatagagctacagggcgtggatttgtggtgttccatgccaagtttgctgagaattatcgattgtattcgcgaagccattttgtgaagggcattgaactgatgattttgcttattgtgtatgaaatatttgggcagtcataccgaggagctattgcgtacattttcatcacattttccatgtggtttatggttgtcacctggctctttgccccattcctgtttaatccttctgggttcgagtggcagaaaattgtggatgactggactgactggaataagtggatcagtaaccgtggaggtattggggtgccgccagagaaaagttgggagtcatggtgggaaaaagagcaggagcctcttaggcattctggaaagcgtggcactgttcttgaaatagtgctttcgttgcgcttctttatttaccagtatggtcttgtttatcatttgaacatcaccactcacacgaagagcgttctggtttattgcatctcgtgggtcataatctttgtcattttgctcgtgatgaagactgtatcagttggcaggaggaaattcagtgcagagttccagcttgtgttccggctgatcaaggggctgatattcataacgtttatctctattatcataatcttgatagcaatcccacacatgacagttcaggacatctttgtttgcatccttgcgttcatgccaactggatggggtttgcttctgatagcacaaactatgaggtcagctatttcacatatggggctatggggatcggtcaaggcgcttgcccgaggctatgagatcatcatgggcttgctgttgttcaccccgatcgcattcctcgcttggttcccgtttgtttcggagttccagacaaggatgctgttcaaccaggccttcagtagaggtctgcagatttctcgtatcctaggcggacacaagaaagaccgggctgcacggaacaaggagtgagtagccgagcagcgtgagcctggtagtgctgacctacatacaattcaaccatgccccacgtggcattatacttgtactggttattatgccaggttgtatattgcaaggaaaggaattcatctctgctaacgtgccagattgtatgtgtggcagcaggtactcgatcggtgagcactcctatagcttttttattattatttatgggtaaagtcaaagaaactaaggcactcgagtaaccaacatatacgaagacaatcacagaaaaatgaatctaatatattaagttcaacatatgtatcattttaaaaaaaacaataatagcagaatgctcattctgtc

SEQ ID NO: 51944 - DNA, 4692 bp, Zea Mays
agattcgtcactgcggctatactgaaactgggtcaaggtcaatattctacaccgtacaacatagcagggctaacatcttcatcaatatacacgtctttgagcattgatcctaaataatgaaagcaatcttggatatcatcttgagctggaaagcaagaagaaacatgtctcttgttgttaagctacgatacatcttgaagttactatcagctgcttcttgggttgtgattttgcctgtaacttatgcatacacttggaagaatccaactggtcttgcaagagcaattaaaagttggcttggtgatggtcagaatcagccatcattatacattttggcagttgtgatttatttggcaccaaacttgctgtccgctacactatttcttttccctgtaattaggagagctcttgagagatcaaatcttaaagtcgtaacattcataatgtggtggtcgcagcctcgcttatttgttggaagaggaatgcatgagggcgcattctcccttttcaagtatacaatgttctgggtcttgcttttggccactaaattggttgtgagcttctatgtggagatcaaaccacttgtgcagccaacaaaagatataatgaaggagccaatacgaacatttaagtggcatgagtttttcccccatgcaaataacaacattggtgttgtcattgcgctttgggctcctattattcttgtctatttcatggatactcaaatttggtatgcaattttctcaacgctaattggtggtgtctatggggcttgtcgccgtcttggtgagataaggacattggggatgttgagatctcggttcgaatccctgcctaaggctttcaatcaatgcttgattccatctgacacaagcaaaaggagaggattccgggctgctttctccaaaccttctaagacatctgaggataccagagaacaagaaaaaatagccgcaagatttgctcagatttggaatttaattatcacaagcttccgtgaggaagatttgatagacgacagagagaaggacttgttacttgttccatactgcaaagatcgtgatatggatataatccaatggccaccattcctgcttgccagcaagattccaatagcattggatatggccgcagatagtggtggaaaagatcgtgatctaaagaagaggatgaaatcggatccatattttacttatgctatcaaggaatgctatgcttctttcaaaaacatcatatatgaactagtgatcgattcacgagagagaggttacatacaaaagatcttcgatgcggtggatgagcacatagcagaagagactttgataaaggagctgaacatgagtaaccttcctaccctaagcaagaagttcattgagctgcttgacttactggaaagtaacaacaaagaagatcatgatcagatcatcatattgttccaagacatgcttgaagtggttacaagggacataatggttgaccagctcagcgaactactggaattgatacatggtgcaaataataaaagatctgaaggaatgacatcacttgaccaacaagatcagttgttcacgaaagctattgattttcctgtaaagaaaacccaagcatggaatgaaaagataaaaaggcttcgacttttactcacggtgaaggaatcggctatggatgtccctacaaacctggatgctaggaggaggatatctttctttgctaattctctttttatgtcgatgccagatgctccaaaagtgcggcaaatgttgcccttctctgtcttgactccttattataaagaagatgttcttttctcttcacaagcactagcagaacagaatgaggacggagtttccatccttttttatttgcaaaaaatctacccagatgaatggaaaaattttcttgaaagggtgcattgtgagagtgaagatcaactccacgagactgagcattctgaagagcagcttcgcctttgggcatcataccggggacaaactttgacaagaactgtaagagggatgatgtactacagacaagctttagtccttcaggcttcccttgatatggccagagatgatgaccttatggagggttttagagcagctgacctgttatctgaatctgatgaatcaccactattgactcaatgcaaagctatagctgatatgaaattcacatatgttgtatcatgccagcaatacggtattcagaaacgttctggtgatccacatgcacaggatattctgagattgatgaccacttatccttcacttagggttgcgtacatcgatgaagtcgaagagcctagcaaagacaaaaataagaaaatagagaaggtttactactccgcattggtgaaggcagcagtaacgaagcctgatgatcctggccagaaacttgatcagggatatatataggataaagcttccaggaaatgcaatgctaggtgaaggaaaaccagagaaccagaaccatgccataattttcacacgaggtgaaggtctccaaaccatcgacatgaatcaggaacattatatggaggagactttgaaaatgaggaatttgttgcaagagtttctgaagaaacatgatggtgtgagatatccatcaatacttggtgtaagagaacacatcttcaccggaagcgtgtcttctcttgcatggttcatgtcaaaccaagaaacaagttttgtgaccattggacaacgtgtacttgccaatcctttgagagttcgatttcattatgggcatcctgatatctttgatcgacttttccacctcacacgtggaggtgtaagcaaagcttctaagattatcaatcttagtgaagacatatttgctggatttaattcaacactgcgtgaaggaaatgttacacatcatgaatacatgcaagttggcaagggcagagatgttggtctcaaccagatctcactatttgaagcaaaaatagcaaatggtaatggtgaacagacgctgagccgtgacgtgtaccgtcttggacatcgttttgactttttcagaatgttgtcctgctactatactactattggtttttacttcagcacaatgataacagtttggaccgtttatgtattcctctacgggcgcctgtatcttgtcctaagtggccttgatgaagcattagccactggaaagaggtttatacacaacgagcctctccaggttgctctagcttcacagtcttttgtgcagcttgggttcttgatggcgctgcctatgatgatggaaattggtctagagagaggattcagaactgcattgagtgactttgtacttatgcagctccagttagcatctgtgttcttcacattctctcttgggaccaaaactcactactacggaaccacactgctacatggaggagctgaatatagagctacagggcgtggatttgtggtgttccatgccaagtttgctgagaattatcgattgtattcgcgaagccattttgtgaagggcattgaactgatgattttgcttattgtgtatgaaatatttgggcagtcataccgaggagctattgcgtacattttcatcacattttccatgtggtttatggttgtcacctggctctttgccccattcctgtttaatccttctgggttcgagtggcagaaaattgtggatgactggactgactggaataagtggatcagtaaccgtggaggtattggggtgccgccagagaaaagttgggagtcatggtgggaaaaagagcaggagcctcttaggcattctggaaagcgtggcactgttcttgaaatagtgctttcgttgcgcttctttatttaccagtatggtcttgtttatcatttgaacatcaccactcacacgaagagcgttctggtttattgcatctcgtgggtcataatctttgtcattttgctcgtgatgaagactgtatcagttggcaggaggaaattcagtgcagagttccagcttgtgttccggctgatcaaggggctgatattcataacgtttatctctattatcataatcttgatagcaatcccacacatgacagttcaggacatctttgtttgcatccttgcgttcatgccaactggatggggtttgcttctgatagcacaaactatgaggtcagctatttcacatatggggctatggggatcggtcaaggcgcttgcccgaggctatgagatcatcatgggcttgctgttgttcaccccgatcgcattcctcgcttggttcccgtttgtttcggagttccagacaaggatgctgttcaaccaggccttcagtagaggtctgcagatttctcgtatcctaggcggacacaagaaagaccgggctgcacggaacaaggagtgagtagccgagcagcgtgagcctggtagtgctgacctacatacaattcaaccatgccccacgtggcattatacttgtactggttattatgccaggttgtatattgcaaggaaaggaattcatctctgctaacgtgccagattgtatgtgtggcagcaggtactcgatcggtgagcactcctatagcttttttattattatttatgggtaaagtcaaagaaactaaggcactcgagtaaccaacatatacgaagacaatcacagaaaaatgaatctaatatattaagttcaacatatgtatcattttaaaaaaaacaataatagcagaatgctcattctgtc

SEQ ID NO: 51945 - DNA, 4713 bp, Zea Mays
agattcgtcactgcggctatactgaaactgggtcaagcaatcttggatatcatcttgagctggaaagcaagaagaaacatgtctcttgttgttaagctacgatacatcttgaagttactatcagctgcttcttgggttgtgattttgcctgtaacttatgcatacacttggaagaatccaactggtcttgcaagagcaattaaaagttggcttggtgatggtcagaatcagccatcattatacattttggcagttgtgatttatttggcaccaaacttgctgtccgctacactatttcttttccctgtaattaggagagctcttgagagatcaaatcttaaagtcgtaacattcataatgtggtggtcgcagcctcgcttatttgttggaagaggaatgcatgagggcgcattctcccttttcaagtatacaatgttctgggtcttgcttttggccactaaattggttgtgagcttctatgtggagatcaaaccacttgtgcagccaacaaaagatataatgaaggagccaatacgaacatttaagtggcatgagtttttcccccatgcaaataacaacattggtgttgtcattgcgctttgggctcctattattcttgtctatttcatggatactcaaatttggtatgcaattttctcaacgctaattggtggtgtctatggggcttgtcgccgtcttggtgagataaggacattggggatgttgagatctcggttcgaatccctgcctaaggctttcaatcaatgcttgattccatctgacacaagcaaaaggagaggattccgggctgctttctccaaaccttctaagacatctgaggataccagagaacaagaaaaaatagccgcaagatttgctcagatttggaatttaattatcacaagcttccgtgaggaagatttgatagacgacagagagaaggacttgttacttgttccatactgcaaagatcgtgatatggatataatccaatggccaccattcctgcttgccagcaagattccaatagcattggatatggccgcagatagtggtggaaaagatcgtgatctaaagaagaggatgaaatcggatccatattttacttatgctatcaaggaatgctatgcttctttcaaaaacatcatatatgaactagtgatcgattcacgagagagaggttacatacaaaagatcttcgatgcggtggatgagcacatagcagaagagactttgataaaggagctgaacatgagtaaccttcctaccctaagcaagaagttcattgagctgcttgacttactggaaagtaacaacaaagaagatcatgatcagatcatcatattgttccaagacatgcttgaagtggttacaagggacataatggttgaccagctcagcgagagaactgcacaccattgtattaagaagataaaggaagaataccaaaatacagaataccttaaaggcagaaataagcaaaagaaaaaaaacagaaaaagaagaaaagactactggaattgatacatggtgcaaataataaaagatctgaaggaatgacatcacttgaccaacaagatcagttgttcacgaaagctattgattttcctgtaaagaaaacccaagcatggaatgaaaagataaaaaggcttcgacttttactcacggtgaaggaatcggctatggatgtccctacaaacctggatgctaggaggaggatatctttctttgctaattctctttttatgtcgatgccagatgctccaaaagtgcggcaaatgttgcccttctctgtcttgactccttattataaagaagatgttcttttctcttcacaagcactagcagaacagaatgaggacggagtttccatccttttttatttgcaaaaaatctacccagatgaatggaaaaattttcttgaaagggtgcattgtgagagtgaagatcaactccacgagactgagcattctgaagagcagcttcgcctttgggcatcataccggggacaaactttgacaagaactgtaagagggatgatgtactacagacaagctttagtccttcaggcttcccttgatatggccagagatgatgaccttatggagggttttagagcagctgacctgttatctgaatctgatgaatcaccactattgactcaatgcaaagctatagctgatatgaaattcacatatgttgtatcatgccagcaatacggtattcagaaacgttctggtgatccacatgcacaggatattctgagattgatgaccacttatccttcacttagggttgcgtacatcgatgaagtcgaagagcctagcaaagacaaaaataagaaaatagagaaggtttactactccgcattggtgaaggcagcagtaacgaagcctgatgatcctggccagaaacttgatcagggatatatataggataaagcttccaggaaatgcaatgctaggtgaaggaaaaccagagaaccagaaccatgccataattttcacacgaggtgaaggtctccaaaccatcgacatgaatcaggaacattatatggaggagactttgaaaatgaggaatttgttgcaagagtttctgaagaaacatgatggtgtgagatatccatcaatacttggtgtaagagaacacatcttcaccggaagcgtgtcttctcttgcatggttcatgtcaaaccaagaaacaagttttgtgaccattggacaacgtgtacttgccaatcctttgagagttcgatttcattatgggcatcctgatatctttgatcgacttttccacctcacacgtggaggtgtaagcaaagcttctaagattatcaatcttagtgaagacatatttgctggatttaattcaacactgcgtgaaggaaatgttacacatcatgaatacatgcaagttggcaagggcagagatgttggtctcaaccagatctcactatttgaagcaaaaatagcaaatggtaatggtgaacagacgctgagccgtgacgtgtaccgtcttggacatcgttttgactttttcagaatgttgtcctgctactatactactattggtttttacttcagcacaatgataacagtttggaccgtttatgtattcctctacgggcgcctgtatcttgtcctaagtggccttgatgaagcattagccactggaaagaggtttatacacaacgagcctctccaggttgctctagcttcacagtcttttgtgcagcttgggttcttgatggcgctgcctatgatgatggaaattggtctagagagaggattcagaactgcattgagtgactttgtacttatgcagctccagttagcatctgtgttcttcacattctctcttgggaccaaaactcactactacggaaccacactgctacatggaggagctgaatatagagctacagggcgtggatttgtggtgttccatgccaagtttgctgagaattatcgattgtattcgcgaagccattttgtgaagggcattgaactgatgattttgcttattgtgtatgaaatatttgggcagtcataccgaggagctattgcgtacattttcatcacattttccatgtggtttatggttgtcacctggctctttgccccattcctgtttaatccttctgggttcgagtggcagaaaattgtggatgactggactgactggaataagtggatcagtaaccgtggaggtattggggtgccgccagagaaaagttgggagtcatggtgggaaaaagagcaggagcctcttaggcattctggaaagcgtggcactgttcttgaaatagtgctttcgttgcgcttctttatttaccagtatggtcttgtttatcatttgaacatcaccactcacacgaagagcgttctggtttattgcatctcgtgggtcataatctttgtcattttgctcgtgatgaagactgtatcagttggcaggaggaaattcagtgcagagttccagcttgtgttccggctgatcaaggggctgatattcataacgtttatctctattatcataatcttgatagcaatcccacacatgacagttcaggacatctttgtttgcatccttgcgttcatgccaactggatggggtttgcttctgatagcacaaactatgaggtcagctatttcacatatggggctatggggatcggtcaaggcgcttgcccgaggctatgagatcatcatgggcttgctgttgttcaccccgatcgcattcctcgcttggttcccgtttgtttcggagttccagacaaggatgctgttcaaccaggccttcagtagaggtctgcagatttctcgtatcctaggcggacacaagaaagaccgggctgcacggaacaaggagtgagtagccgagcagcgtgagcctggtagtgctgacctacatacaattcaaccatgccccacgtggcattatacttgtactggttattatgccaggttgtatattgcaaggaaaggaattcatctctgctaacgtgccagattgtatgtgtggcagcaggtactcgatcggtgagcactcctatagcttttttattattatttatgggtaaagtcaaagaaactaaggcactcgagtaaccaacatatacgaagacaatcacagaaaaatgaatctaatatattaagttcaacatatgtatcattttaaaaaaaacaataatagcagaatgctcattctgtc

SEQ ID NO: 51946 - DNA, 4606 bp, Zea Mays
agattcgtcactgcggctatactgaaactgggtcaagcaatcttggatatcatcttgagctggaaagcaagaagaaacatgtctcttgttgttaagctacgatacatcttgaagttactatcagctgcttcttgggttgtgattttgcctgtaacttatgcatacacttggaagaatccaactggtcttgcaagagcaattaaaagttggcttggtgatggtcagaatcagccatcattatacattttggcagttgtgatttatttggcaccaaacttgctgtccgctacactatttcttttccctgtaattaggagagctcttgagagatcaaatcttaaagtcgtaacattcataatgtggtggtcgcagcctcgcttatttgttggaagaggaatgcatgagggcgcattctcccttttcaagtatacaatgttctgggtcttgcttttggccactaaattggttgtgagcttctatgtggagatcaaaccacttgtgcagccaacaaaagatataatgaaggagccaatacgaacatttaagtggcatgagtttttcccccatgcaaataacaacattggtgttgtcattgcgctttgggctcctattattcttgtctatttcatggatactcaaatttggtatgcaattttctcaacgctaattggtggtgtctatggggcttgtcgccgtcttggtgagataaggacattggggatgttgagatctcggttcgaatccctgcctaaggctttcaatcaatgcttgattccatctgacacaagcaaaaggagaggattccgggctgctttctccaaaccttctaagacatctgaggataccagagaacaagaaaaaatagccgcaagatttgctcagatttggaatttaattatcacaagcttccgtgaggaagatttgatagacgacagagagaaggacttgttacttgttccatactgcaaagatcgtgatatggatataatccaatggccaccattcctgcttgccagcaagattccaatagcattggatatggccgcagatagtggtggaaaagatcgtgatctaaagaagaggatgaaatcggatccatattttacttatgctatcaaggaatgctatgcttctttcaaaaacatcatatatgaactagtgatcgattcacgagagagaggttacatacaaaagatcttcgatgcggtggatgagcacatagcagaagagactttgataaaggagctgaacatgagtaaccttcctaccctaagcaagaagttcattgagctgcttgacttactggaaagtaacaacaaagaagatcatgatcagatcatcatattgttccaagacatgcttgaagtggttacaagggacataatggttgaccagctcagcgaactactggaattgatacatggtgcaaataataaaagatctgaaggaatgacatcacttgaccaacaagatcagttgttcacgaaagctattgattttcctgtaaagaaaacccaagcatggaatgaaaagataaaaaggcttcgacttttactcacggtgaaggaatcggctatggatgtccctacaaacctggatgctaggaggaggatatctttctttgctaattctctttttatgtcgatgccagatgctccaaaagtgcggcaaatgttgcccttctctgtcttgactccttattataaagaagatgttcttttctcttcacaagcactagcagaacagaatgaggacggagtttccatccttttttatttgcaaaaaatctacccagatgaatggaaaaattttcttgaaagggtgcattgtgagagtgaagatcaactccacgagactgagcattctgaagagcagcttcgcctttgggcatcataccggggacaaactttgacaagaactgtaagagggatgatgtactacagacaagctttagtccttcaggcttcccttgatatggccagagatgatgaccttatggagggttttagagcagctgacctgttatctgaatctgatgaatcaccactattgactcaatgcaaagctatagctgatatgaaattcacatatgttgtatcatgccagcaatacggtattcagaaacgttctggtgatccacatgcacaggatattctgagattgatgaccacttatccttcacttagggttgcgtacatcgatgaagtcgaagagcctagcaaagacaaaaataagaaaatagagaaggtttactactccgcattggtgaaggcagcagtaacgaagcctgatgatcctggccagaaacttgatcagggatatatataggataaagcttccaggaaatgcaatgctaggtgaaggaaaaccagagaaccagaaccatgccataattttcacacgaggtgaaggtctccaaaccatcgacatgaatcaggaacattatatggaggagactttgaaaatgaggaatttgttgcaagagtttctgaagaaacatgatggtgtgagatatccatcaatacttggtgtaagagaacacatcttcaccggaagcgtgtcttctcttgcatggttcatgtcaaaccaagaaacaagttttgtgaccattggacaacgtgtacttgccaatcctttgagagttcgatttcattatgggcatcctgatatctttgatcgacttttccacctcacacgtggaggtgtaagcaaagcttctaagattatcaatcttagtgaagacatatttgctggatttaattcaacactgcgtgaaggaaatgttacacatcatgaatacatgcaagttggcaagggcagagatgttggtctcaaccagatctcactatttgaagcaaaaatagcaaatggtaatggtgaacagacgctgagccgtgacgtgtaccgtcttggacatcgttttgactttttcagaatgttgtcctgctactatactactattggtttttacttcagcacaatgataacagtttggaccgtttatgtattcctctacgggcgcctgtatcttgtcctaagtggccttgatgaagcattagccactggaaagaggtttatacacaacgagcctctccaggttgctctagcttcacagtcttttgtgcagcttgggttcttgatggcgctgcctatgatgatggaaattggtctagagagaggattcagaactgcattgagtgactttgtacttatgcagctccagttagcatctgtgttcttcacattctctcttgggaccaaaactcactactacggaaccacactgctacatggaggagctgaatatagagctacagggcgtggatttgtggtgttccatgccaagtttgctgagaattatcgattgtattcgcgaagccattttgtgaagggcattgaactgatgattttgcttattgtgtatgaaatatttgggcagtcataccgaggagctattgcgtacattttcatcacattttccatgtggtttatggttgtcacctggctctttgccccattcctgtttaatccttctgggttcgagtggcagaaaattgtggatgactggactgactggaataagtggatcagtaaccgtggaggtattggggtgccgccagagaaaagttgggagtcatggtgggaaaaagagcaggagcctcttaggcattctggaaagcgtggcactgttcttgaaatagtgctttcgttgcgcttctttatttaccagtatggtcttgtttatcatttgaacatcaccactcacacgaagagcgttctggtttattgcatctcgtgggtcataatctttgtcattttgctcgtgatgaagactgtatcagttggcaggaggaaattcagtgcagagttccagcttgtgttccggctgatcaaggggctgatattcataacgtttatctctattatcataatcttgatagcaatcccacacatgacagttcaggacatctttgtttgcatccttgcgttcatgccaactggatggggtttgcttctgatagcacaaactatgaggtcagctatttcacatatggggctatggggatcggtcaaggcgcttgcccgaggctatgagatcatcatgggcttgctgttgttcaccccgatcgcattcctcgcttggttcccgtttgtttcggagttccagacaaggatgctgttcaaccaggccttcagtagaggtctgcagatttctcgtatcctaggcggacacaagaaagaccgggctgcacggaacaaggagtgagtagccgagcagcgtgagcctggtagtgctgacctacatacaattcaaccatgccccacgtggcattatacttgtactggttattatgccaggttgtatattgcaaggaaaggaattcatctctgctaacgtgccagattgtatgtgtggcagcaggtactcgatcggtgagcactcctatagcttttttattattatttatgggtaaagtcaaagaaactaaggcactcgagtaaccaacatatacgaagacaatcacagaaaaatgaatctaatatattaagttcaacatatgtatcattttaaaaaaaacaataatagcagaatgctcattctgtc

SEQ ID NO: 51947 - DNA, 4410 bp, Zea Mays
agattcgtcactgcggctatactgaaactgggtcaagcaatcttggatatcatcttgagctggaaagcaagaagaaacatgtctcttgttgttaagctacgatacatcttgaagttactatcagctgcttcttgggttgtgattttgcctgtaacttatgcatacacttggaagaatccaactggtcttgcaagagcaattaaaagttggcttggtgatggtcagaatcagccatcattatacattttggcagttgtgatttatttggcaccaaacttgctgtccgctacactatttcttttccctgtaattaggagagctcttgagagatcaaatcttaaagtcgtaacattcataatgtggtggtcgcagcctcgcttatttgttggaagaggaatgcatgagggcgcattctcccttttcaagtatacaatgttctgggtcttgcttttggccactaaattggttgtgagcttctatgtggagatcaaaccacttgtgcagccaacaaaagatataatgaaggagccaatacgaacatttaagtggcatgagtttttcccccatgcaaataacaacattggtgttgtcattgcgctttgggctcctattattcttgtctatttcatggatactcaaatttggtatgcaattttctcaacgctaattggtggtgtctatggggcttgtcgccgtcttggtgagataaggacattggggatgttgagatctcggttcgaatccctgcctaaggctttcaatcaatgcttgattccatctgacacaagcaaaaggagaggattccgggctgctttctccaaaccttctaagacatctgaggataccagagaacaagaaaaaatagccgcaagatttgctcagatttggaatttaattatcacaagcttccgtgaggaagatttgatagacgacagagagaaggacttgttacttgttccatactgcaaagatcgtgatatggatataatccaatggccaccattcctgcttgccagcaagattccaatagcattggatatggccgcagatagtggtggaaaagatcgtgatctaaagaagaggatgaaatcggatccatattttacttatgctatcaaggaatgctatgcttctttcaaaaacatcatatatgaactagtgatcgattcacgagagagaggttacatacaaaagatcttcgatgcggtggatgagcacatagcagaagagactttgataaaggagctgaacatgagaaagtaacaacaaagaagatcatgatcagatcatcatattgttccaagacatgcttgaagtggttacaagggacataatggttgaccagctcagcgaactactggaattgatacatggtgcaaataataaaagatctgaaggaatgacatcacttgaccaacaagatcagttgttcacgaaagctattgattttcctgtaaagaaaacccaagcatggaatgaaaagataaaaaggcttcgacttttactcacggtgaaggaatcggctatggatgtccctacaaacctggatgctaggaggaggatatctttctttgctaattctctttttatgtcgatgccagatgctccaaaagtgcggcaaatgttgcccttctctgtcttgactccttattataaagaagatgttcttttctcttcacaagcactagcagaacagaatgaggacggagtttccatccttttttatttgcaaaaaatctacccagatgaatggaaaaattttcttgaaagggtgcattgtgagagtgaagatcaactccacgagactgagcattctgaagagcagcttcgcctttgggcatcataccggggacaaactttgacaagaactgtaagagggatgatgtactacagacaagctttagtccttcaggcttcccttgatatggccagagatgatgaccttatggagggttttagagcagctgacctgttatctgaatctgatgaatcaccactattgactcaatgcaaagctatagctgatatgaaattcacatatgttgtatcatgccagcaatacggtattcagaaacgttctggtgatccacatgcacaggatattctgagattgatgaccacgatatatataggataaagcttccaggaaatgcaatgctaggtgaaggaaaaccagagaaccagaaccatgccataattttcacacgaggtgaaggtctccaaaccatcgacatgaatcaggaacattatatggaggagactttgaaaatgaggaatttgttgcaagagtttctgaagaaacatgatggtgtgagatatccatcaatacttggtgtaagagaacacatcttcaccggaagcgtgtcttctcttgcatggttcatgtcaaaccaagaaacaagttttgtgaccattggacaacgtgtacttgccaatcctttgagagttcgatttcattatgggcatcctgatatctttgatcgacttttccacctcacacgtggaggtgtaagcaaagcttctaagattatcaatcttagtgaagacatatttgctggatttaattcaacactgcgtgaaggaaatgttacacatcatgaatacatgcaagttggcaagggcagagatgttggtctcaaccagatctcactatttgaagcaaaaatagcaaatggtaatggtgaacagacgctgagccgtgacgtgtaccgtcttggacatcgttttgactttttcagaatgttgtcctgctactatactactattggtttttacttcagcacaatgataacagtttggaccgtttatgtattcctctacgggcgcctgtatcttgtcctaagtggccttgatgaagcattagccactggaaagaggtttatacacaacgagcctctccaggttgctctagcttcacagtcttttgtgcagcttgggttcttgatggcgctgcctatgatgatggaaattggtctagagagaggattcagaactgcattgagtgactttgtacttatgcagctccagttagcatctgtgttcttcacattctctcttgggaccaaaactcactactacggaaccacactgctacatggaggagctgaatatagagctacagggcgtggatttgtggtgttccatgccaagtttgctgagaattatcgattgtattcgcgaagccattttgtgaagggcattgaactgatgattttgcttattgtgtatgaaatatttgggcagtcataccgaggagctattgcgtacattttcatcacattttccatgtggtttatggttgtcacctggctctttgccccattcctgtttaatccttctgggttcgagtggcagaaaattgtggatgactggactgactggaataagtggatcagtaaccgtggaggtattggggtgccgccagagaaaagttgggagtcatggtgggaaaaagagcaggagcctcttaggcattctggaaagcgtggcactgttcttgaaatagtgctttcgttgcgcttctttatttaccagtatggtcttgtttatcatttgaacatcaccactcacacgaagagcgttctggtttattgcatctcgtgggtcataatctttgtcattttgctcgtgatgaagactgtatcagttggcaggaggaaattcagtgcagagttccagcttgtgttccggctgatcaaggggctgatattcataacgtttatctctattatcataatcttgatagcaatcccacacatgacagttcaggacatctttgtttgcatccttgcgttcatgccaactggatggggtttgcttctgatagcacaaactatgaggtcagctatttcacatatggggctatggggatcggtcaaggcgcttgcccgaggctatgagatcatcatgggcttgctgttgttcaccccgatcgcattcctcgcttggttcccgtttgtttcggagttccagacaaggatgctgttcaaccaggccttcagtagaggtctgcagatttctcgtatcctaggcggacacaagaaagaccgggctgcacggaacaaggagtgagtagccgagcagcgtgagcctggtagtgctgacctacatacaattcaaccatgccccacgtggcattatacttgtactggttattatgccaggttgtatattgcaaggaaaggaattcatctctgctaacgtgccagattgtatgtgtggcagcaggtactcgatcggtgagcactcctatagcttttttattattatttatgggtaaagtcaaagaaactaaggcactcgagtaaccaacatatacgaagacaatcacagaaaaatgaatctaatatattaagttcaacatatgtatcattttaaaaaaaacaataatagcagaatgctcattctgtc

SEQ ID NO: 51948 - DNA, 4574 bp, Zea Mays
agattcgtcactgcggctatactgaaactgggtcaagcaatcttggatatcatcttgagctggaaagcaagaagaaacatgtctcttgttgttaagctacgatacatcttgaagttactatcagctgcttcttgggttgtgattttgcctgtaacttatgcatacacttggaagaatccaactggtcttgcaagagcaattaaaagttggcttggtgatggtcagaatcagccatcattatacattttggcagttgtgatttatttggcaccaaacttgctgtccgctacactatttcttttccctgtaattaggagagctcttgagagatcaaatcttaaagtcgtaacattcataatgtggtggtcgcagcctcgcttatttgttggaagaggaatgcatgagggcgcattctcccttttcaagtatacaatgttctgggtcttgcttttggccactaaattggttgtgagcttctatgtggagatcaaaccacttgtgcagccaacaaaagatataatgaaggagccaatacgaacatttaagtggcatgagtttttcccccatgcaaataacaacattggtgttgtcattgcgctttgggctcctattattcttgtctatttcatggatactcaaatttggtatgcaattttctcaacgctaattggtggtgtctatggggcttgtcgccgtcttggtgagataaggacattggggatgttgagatctcggttcgaatccctgcctaaggctttcaatcaatgcttgattccatctgacacaagcaaaaggagaggattccgggctgctttctccaaaccttctaagacatctgaggataccagagaacaagaaaaaatagccgcaagatttgctcagatttggaatttaattatcacaagcttccgtgaggaagatttgatagacgacagagagaaggacttgttacttgttccatactgcaaagatcgtgatatggatataatccaatggccaccattcctgcttgccagcaagattccaatagcattggatatggccgcagatagtggtggaaaagatcgtgatctaaagaagaggatgaaatcggatccatattttacttatgctatcaaggaatgctatgcttctttcaaaaacatcatatatgaactagtgatcgattcacgagagagaggttacatacaaaagatcttcgatgcggtggatgagcacatagcagaagagactttgataaaggagctgaacatgagtaaccttcctaccctaagcaagaagttcattgagctgcttgacttactggaaagtaacaacaaagaagatcatgatcagatcatcatattgttccaagacatgcttgaagtggttacaagggacataatggttgaccagctcagcgaactactggaattgatacatggtgcaaataataaaagatctgaaggaatgacatcacttgaccaacaagatcagttgttcacgaaagctattgattttcctgtaaagaaaacccaagcatggaatgaaaagataaaaaggcttcgacttttactcacggtgaaggaatcggctatggatgtccctacaaacctggatgctaggaggaggatatctttctttgctaattctctttttatgtcgatgccagatgctccaaaagtgcggcaaatgttgcccttctctgtcttgactccttattataaagaagatgttcttttctcttcacaagcactagcagaacagaatgaggacggagtttccatccttttttatttgcaaaaaatctacccagatgaatggaaaaattttcttgaaagggtgcattgtgagagtgaagatcaactccacgagactgagcattctgaagagcagcttcgcctttgggcatcataccggggacaaactttgacaagaactgtaagagggatgatgtactacagacaagctttagtccttcaggcttcccttgatatggccagagatgatgaccttatggagggttttagagcagctgacctgttatctgaatctgatgaatcaccactattgactcaatgcaaagctatagctgatatgaaattcacatatgttgtatcatgccagcaatacggtattcagaaacgttctggtgatccacatgcacaggatattctgagattgatgaccacttatccttcacttagggttgcgtacatcgatgaagtcgaagagcctagcaaagacaaaaataagaaaatagagaaggtttactactccgcattggtgaaggcagcagtaacgaagcctgatgatcctggccagaaacttgatcagggatatatataggataaagcttccaggaaatgcaatgctaggtgaaggaaaaccagagaaccagaaccatgccataattttcacacgaggtgaaggtctccaaaccatcgacatgaatcaggaatttgttgcaagagtttctgaagaaacatgatggtgtgagatatccatcaatacttggtgtaagagaacacatcttcaccggaagcgtgtcttctcttgcatggttcatgtcaaaccaagaaacaagttttgtgaccattggacaacgtgtacttgccaatcctttgagagttcgatttcattatgggcatcctgatatctttgatcgacttttccacctcacacgtggaggtgtaagcaaagcttctaagattatcaatcttagtgaagacatatttgctggatttaattcaacactgcgtgaaggaaatgttacacatcatgaatacatgcaagttggcaagggcagagatgttggtctcaaccagatctcactatttgaagcaaaaatagcaaatggtaatggtgaacagacgctgagccgtgacgtgtaccgtcttggacatcgttttgactttttcagaatgttgtcctgctactatactactattggtttttacttcagcacaatgataacagtttggaccgtttatgtattcctctacgggcgcctgtatcttgtcctaagtggccttgatgaagcattagccactggaaagaggtttatacacaacgagcctctccaggttgctctagcttcacagtcttttgtgcagcttgggttcttgatggcgctgcctatgatgatggaaattggtctagagagaggattcagaactgcattgagtgactttgtacttatgcagctccagttagcatctgtgttcttcacattctctcttgggaccaaaactcactactacggaaccacactgctacatggaggagctgaatatagagctacagggcgtggatttgtggtgttccatgccaagtttgctgagaattatcgattgtattcgcgaagccattttgtgaagggcattgaactgatgattttgcttattgtgtatgaaatatttgggcagtcataccgaggagctattgcgtacattttcatcacattttccatgtggtttatggttgtcacctggctctttgccccattcctgtttaatccttctgggttcgagtggcagaaaattgtggatgactggactgactggaataagtggatcagtaaccgtggaggtattggggtgccgccagagaaaagttgggagtcatggtgggaaaaagagcaggagcctcttaggcattctggaaagcgtggcactgttcttgaaatagtgctttcgttgcgcttctttatttaccagtatggtcttgtttatcatttgaacatcaccactcacacgaagagcgttctggtttattgcatctcgtgggtcataatctttgtcattttgctcgtgatgaagactgtatcagttggcaggaggaaattcagtgcagagttccagcttgtgttccggctgatcaaggggctgatattcataacgtttatctctattatcataatcttgatagcaatcccacacatgacagttcaggacatctttgtttgcatccttgcgttcatgccaactggatggggtttgcttctgatagcacaaactatgaggtcagctatttcacatatggggctatggggatcggtcaaggcgcttgcccgaggctatgagatcatcatgggcttgctgttgttcaccccgatcgcattcctcgcttggttcccgtttgtttcggagttccagacaaggatgctgttcaaccaggccttcagtagaggtctgcagatttctcgtatcctaggcggacacaagaaagaccgggctgcacggaacaaggagtgagtagccgagcagcgtgagcctggtagtgctgacctacatacaattcaaccatgccccacgtggcattatacttgtactggttattatgccaggttgtatattgcaaggaaaggaattcatctctgctaacgtgccagattgtatgtgtggcagcaggtactcgatcggtgagcactcctatagcttttttattattatttatgggtaaagtcaaagaaactaaggcactcgagtaaccaacatatacgaagacaatcacagaaaaatgaatctaatatattaagttcaacatatgtatcattttaaaaaaaacaataatagcagaatgctcattctgtc

SEQ ID NO: 51949 - DNA, 5005 bp, Zea Mays
aaaaccttttagtctcaagaaagttgggcaggctagagttgaaacccaagtacccaacaaaacccacaatttaaggttcgaacacatggatagctgttttccaggcactttattcaaggcaaaatctttgggacccccactacacactgatgtctttggaggtttctatttgacatgtccaaaccatctcaaccgatattggacaagcttttcttcaattggtgctacctctatcctatcacgtcaatattctacaccgtacaacatagcaggtctaagcgctgtcctataaaacttgccttttagcttgtgtggtaccctcttgtcataaagaacgccaaatgcttgacaccacttcatccactctactttgattctagggctaacatcttcatcaatatacacgtctttgagcattgatcctaaataatgaaagcaatcttggatatcatcttgagctggaaagcaagaagaaacatgtctcttgttgttaagctacgatacatcttgaagttactatcagctgcttcttgggttgtgattttgcctgtaacttatgcatacacttggaagaatccaactggtcttgcaagagcaattaaaagttggcttggtgatggtcagaatcagccatcattatacattttggcagttgtgatttatttggcaccaaacttgctgtccgctacactatttcttttccctgtaattaggagagctcttgagagatcaaatcttaaagtcgtaacattcataatgtggtggtcgcagcctcgcttatttgttggaagaggaatgcatgagggcgcattctcccttttcaagtatacaatgttctgggtcttgcttttggccactaaattggttgtgagcttctatgtggagatcaaaccacttgtgcagccaacaaaagatataatgaaggagccaatacgaacatttaagtggcatgagtttttcccccatgcaaataacaacattggtgttgtcattgcgctttgggctcctattattcttgtctatttcatggatactcaaatttggtatgcaattttctcaacgctaattggtggtgtctatggggcttgtcgccgtcttggtgagataaggacattggggatgttgagatctcggttcgaatccctgcctaaggctttcaatcaatgcttgattccatctgacacaagcaaaaggagaggattccgggctgctttctccaaaccttctaagacatctgaggataccagagaacaagaaaaaatagccgcaagatttgctcagatttggaatttaattatcacaagcttccgtgaggaagatttgatagacgacagagagaaggacttgttacttgttccatactgcaaagatcgtgatatggatataatccaatggccaccattcctgcttgccagcaagattccaatagcattggatatggccgcagatagtggtggaaaagatcgtgatctaaagaagaggatgaaatcggatccatattttacttatgctatcaaggaatgctatgcttctttcaaaaacatcatatatgaactagtgatcgattcacgagagagaggttacatacaaaagatcttcgatgcggtggatgagcacatagcagaagagactttgataaaggagctgaacatgagtaaccttcctaccctaagcaagaagttcattgagctgcttgacttactggaaagtaacaacaaagaagatcatgatcagatcatcatattgttccaagacatgcttgaagtggttacaagggacataatggttgaccagctcagcgaactactggaattgatacatggtgcaaataataaaagatctgaaggaatgacatcacttgaccaacaagatcagttgttcacgaaagctattgattttcctgtaaagaaaacccaagcatggaatgaaaagataaaaaggcttcgacttttactcacggtgaaggaatcggctatggatgtccctacaaacctggatgctaggaggaggatatctttctttgctaattctctttttatgtcgatgccagatgctccaaaagtgcggcaaatgttgcccttctctgtcttgactccttattataaagaagatgttcttttctcttcacaagcactagcagaacagaatgaggacggagtttccatccttttttatttgcaaaaaatctacccagatgaatggaaaaattttcttgaaagggtgcattgtgagagtgaagatcaactccacgagactgagcattctgaagagcagcttcgcctttgggcatcataccggggacaaactttgacaagaactgtaagagggatgatgtactacagacaagctttagtccttcaggcttcccttgatatggccagagatgatgaccttatggagggttttagagcagctgacctgttatctgaatctgatgaatcaccactattgactcaatgcaaagctatagctgatatgaaattcacatatgttgtatcatgccagcaatacggtattcagaaacgttctggtgatccacatgcacaggatattctgagattgatgaccacttatccttcacttagggttgcgtacatcgatgaagtcgaagagcctagcaaagacaaaaataagaaaatagagaaggtttactactccgcattggtgaaggcagcagtaacgaagcctgatgatcctggccagaaacttgatcagggatatatataggataaagcttccaggaaatgcaatgctaggtgaaggaaaaccagagaaccagaaccatgccataattttcacacgaggtgaaggtctccaaaccatcgacatgaatcaggaacattatatggaggagactttgaaaatgaggaatttgttgcaagagtttctgaagaaacatgatggtgtgagatatccatcaatacttggtgtaagagaacacatcttcaccggaagcgtgtcttctcttgcatggttcatgtcaaaccaagaaacaagttttgtgaccattggacaacgtgtacttgccaatcctttgagagttcgatttcattatgggcatcctgatatctttgatcgacttttccacctcacacgtggaggtgtaagcaaagcttctaagattatcaatcttagtgaagacatatttgctggatttaattcaacactgcgtgaaggaaatgttacacatcatgaatacatgcaagttggcaagggcagagatgttggtctcaaccagatctcactatttgaagcaaaaatagcaaatggtaatggtgaacagacgctgagccgtgacgtgtaccgtcttggacatcgttttgactttttcagaatgttgtcctgctactatactactattggtttttacttcagcacaatgataacagtttggaccgtttatgtattcctctacgggcgcctgtatcttgtcctaagtggccttgatgaagcattagccactggaaagaggtttatacacaacgagcctctccaggttgctctagcttcacagtcttttgtgcagcttgggttcttgatggcgctgcctatgatgatggaaattggtctagagagaggattcagaactgcattgagtgactttgtacttatgcagctccagttagcatctgtgttcttcacattctctcttgggaccaaaactcactactacggaaccacactgctacatggaggagctgaatatagagctacagggcgtggatttgtggtgttccatgccaagtttgctgagaattatcgattgtattcgcgaagccattttgtgaagggcattgaactgatgattttgcttattgtgtatgaaatatttgggcagtcataccgaggagctattgcgtacattttcatcacattttccatgtggtttatggttgtcacctggctctttgccccattcctgtttaatccttctgggttcgagtggcagaaaattgtggatgactggactgactggaataagtggatcagtaaccgtggaggtattggggtgccgccagagaaaagttgggagtcatggtgggaaaaagagcaggagcctcttaggcattctggaaagcgtggcactgttcttgaaatagtgctttcgttgcgcttctttatttaccagtatggtcttgtttatcatttgaacatcaccactcacacgaagagcgttctggtttattgcatctcgtgggtcataatctttgtcattttgctcgtgatgaagactgtatcagttggcaggaggaaattcagtgcagagttccagcttgtgttccggctgatcaaggggctgatattcataacgtttatctctattatcataatcttgatagcaatcccacacatgacagttcaggacatctttgtttgcatccttgcgttcatgccaactggatggggtttgcttctgatagcacaaactatgaggtcagctatttcacatatggggctatggggatcggtcaaggcgcttgcccgaggctatgagatcatcatgggcttgctgttgttcaccccgatcgcattcctcgcttggttcccgtttgtttcggagttccagacaaggatgctgttcaaccaggccttcagtagaggtctgcagatttctcgtatcctaggcggacacaagaaagaccgggctgcacggaacaaggagtgagtagccgagcagcgtgagcctggtagtgctgacctacatacaattcaaccatgccccacgtggcattatacttgtactggttattatgccaggttgtatattgcaaggaaaggaattcatctctgctaacgtgccagattgtatgtgtggcagcaggtactcgatcggtgagcactcctatagcttttttattattatttatgggtaaagtcaaagaaactaaggcactcgagtaaccaacatatacgaagacaatcacagaaaaatgaatctaatatattaagttcaacatatgtatcattttaaaaaaaacaataatagcagaatgctcattctgtc

SEQ ID NO: 51950 - DNA, 4603 bp, Zea Mays
gttgtttaggtgttctaccgtggatgcttttcagcaatcttggatatcatcttgagctggaaagcaagaagaaacatgtctcttgttgttaagctacgatacatcttgaagttactatcagctgcttcttgggttgtgattttgcctgtaacttatgcatacacttggaagaatccaactggtcttgcaagagcaattaaaagttggcttggtgatggtcagaatcagccatcattatacattttggcagttgtgatttatttggcaccaaacttgctgtccgctacactatttcttttccctgtaattaggagagctcttgagagatcaaatcttaaagtcgtaacattcataatgtggtggtcgcagcctcgcttatttgttggaagaggaatgcatgagggcgcattctcccttttcaagtatacaatgttctgggtcttgcttttggccactaaattggttgtgagcttctatgtggagatcaaaccacttgtgcagccaacaaaagatataatgaaggagccaatacgaacatttaagtggcatgagtttttcccccatgcaaataacaacattggtgttgtcattgcgctttgggctcctattattcttgtctatttcatggatactcaaatttggtatgcaattttctcaacgctaattggtggtgtctatggggcttgtcgccgtcttggtgagataaggacattggggatgttgagatctcggttcgaatccctgcctaaggctttcaatcaatgcttgattccatctgacacaagcaaaaggagaggattccgggctgctttctccaaaccttctaagacatctgaggataccagagaacaagaaaaaatagccgcaagatttgctcagatttggaatttaattatcacaagcttccgtgaggaagatttgatagacgacagagagaaggacttgttacttgttccatactgcaaagatcgtgatatggatataatccaatggccaccattcctgcttgccagcaagattccaatagcattggatatggccgcagatagtggtggaaaagatcgtgatctaaagaagaggatgaaatcggatccatattttacttatgctatcaaggaatgctatgcttctttcaaaaacatcatatatgaactagtgatcgattcacgagagagaggttacatacaaaagatcttcgatgcggtggatgagcacatagcagaagagactttgataaaggagctgaacatgagtaaccttcctaccctaagcaagaagttcattgagctgcttgacttactggaaagtaacaacaaagaagatcatgatcagatcatcatattgttccaagacatgcttgaagtggttacaagggacataatggttgaccagctcagcgaactactggaattgatacatggtgcaaataataaaagatctgaaggaatgacatcacttgaccaacaagatcagttgttcacgaaagctattgattttcctgtaaagaaaacccaagcatggaatgaaaagataaaaaggcttcgacttttactcacggtgaaggaatcggctatggatgtccctacaaacctggatgctaggaggaggatatctttctttgctaattctctttttatgtcgatgccagatgctccaaaagtgcggcaaatgttgcccttctctgtcttgactccttattataaagaagatgttcttttctcttcacaagcactagcagaacagaatgaggacggagtttccatccttttttatttgcaaaaaatctacccagatgaatggaaaaattttcttgaaagggtgcattgtgagagtgaagatcaactccacgagactgagcattctgaagagcagcttcgcctttgggcatcataccggggacaaactttgacaagaactgtaagagggatgatgtactacagacaagctttagtccttcaggcttcccttgatatggccagagatgatgaccttatggagggttttagagcagctgacctgttatctgaatctgatgaatcaccactattgactcaatgcaaagctatagctgatatgaaattcacatatgttgtatcatgccagcaatacggtattcagaaacgttctggtgatccacatgcacaggatattctgagattgatgaccacttatccttcacttagggttgcgtacatcgatgaagtcgaagagcctagcaaagacaaaaataagaaaatagagaaggtttactactccgcattggtgaaggcagcagtaacgaagcctgatgatcctggccagaaacttgatcagggatatatataggataaagcttccaggaaatgcaatgctaggtgaaggaaaaccagagaaccagaaccatgccataattttcacacgaggtgaaggtctccaaaccatcgacatgaatcaggaacattatatggaggagactttgaaaatgaggaatttgttgcaagagtttctgaagaaacatgatggtgtgagatatccatcaatacttggtgtaagagaacacatcttcaccggaagcgtgtcttctcttgcatggttcatgtcaaaccaagaaacaagttttgtgaccattggacaacgtgtacttgccaatcctttgagagttcgatttcattatgggcatcctgatatctttgatcgacttttccacctcacacgtggaggtgtaagcaaagcttctaagattatcaatcttagtgaagacatatttgctggatttaattcaacactgcgtgaaggaaatgttacacatcatgaatacatgcaagttggcaagggcagagatgttggtctcaaccagatctcactatttgaagcaaaaatagcaaatggtaatggtgaacagacgctgagccgtgacgtgtaccgtcttggacatcgttttgactttttcagaatgttgtcctgctactatactactattggtttttacttcagcacaatgataacagtttggaccgtttatgtattcctctacgggcgcctgtatcttgtcctaagtggccttgatgaagcattagccactggaaagaggtttatacacaacgagcctctccaggttgctctagcttcacagtcttttgtgcagcttgggttcttgatggcgctgcctatgatgatggaaattggtctagagagaggattcagaactgcattgagtgactttgtacttatgcagctccagttagcatctgtgttcttcacattctctcttgggaccaaaactcactactacggaaccacactgctacatggaggagctgaatatagagctacagggcgtggatttgtggtgttccatgccaagtttgctgagaattatcgattgtattcgcgaagccattttgtgaagggcattgaactgatgattttgcttattgtgtatgaaatatttgggcagtcataccgaggagctattgcgtacattttcatcacattttccatgtggtttatggttgtcacctggctctttgccccattcctgtttaatccttctgggttcgagtggcagaaaattgtggatgactggactgactggaataagtggatcagtaaccgtggaggtattggggtgccgccagagaaaagttgggagtcatggtgggaaaaagagcaggagcctcttaggcattctggaaagcgtggcactgttcttgaaatagtgctttcgttgcgcttctttatttaccagtatggtcttgtttatcatttgaacatcaccactcacacgaagagcgttctggtttattgcatctcgtgggtcataatctttgtcattttgctcgtgatgaagactgtatcagttggcaggaggaaattcagtgcagagttccagcttgtgttccggctgatcaaggggctgatattcataacgtttatctctattatcataatcttgatagcaatcccacacatgacagttcaggacatctttgtttgcatccttgcgttcatgccaactggatggggtttgcttctgatagcacaaactatgaggtcagctatttcacatatggggctatggggatcggtcaaggcgcttgcccgaggctatgagatcatcatgggcttgctgttgttcaccccgatcgcattcctcgcttggttcccgtttgtttcggagttccagacaaggatgctgttcaaccaggccttcagtagaggtctgcagatttctcgtatcctaggcggacacaagaaagaccgggctgcacggaacaaggagtgagtagccgagcagcgtgagcctggtagtgctgacctacatacaattcaaccatgccccacgtggcattatacttgtactggttattatgccaggttgtatattgcaaggaaaggaattcatctctgctaacgtgccagattgtatgtgtggcagcaggtactcgatcggtgagcactcctatagcttttttattattatttatgggtaaagtcaaagaaactaaggcactcgagtaaccaacatatacgaagacaatcacagaaaaatgaatctaatatattaagttcaacatatgtatcattttaaaaaaaacaataatagcagaatgctcattctgtc

SEQ ID NO: 51951 - DNA, 4289 bp, Zea Mays
gatatcatcttgagctggaaagcaagaagaaacatgtctcttgttgttaagctacgatacatcttgaagttactatcagctgcttcttgggttgtgattttgcctgtaacttatgcatacacttggaagaatccaactggtcttgcaagagcaattaaaagttggcttggtgatggtcagaatcagccatcattatacattttggcagttgtgatttatttggcaccaaacttgctgtccgctacactatttcttttccctgtaattaggagagctcttgagagatcaaatcttaaagtcgtaacattcataatgtggtggtcgcagcctcgcttatttgttggaagaggaatgcatgagggcgcattctcccttttcaagtatacaatgttctgggtcttgcttttggccactaaattggttgtgagcttctatgtggagatcaaaccacttgtgcagccaacaaaagatataatgaaggagccaatacgaacatttaagtggcatgagtttttcccccatgcaaataacaacattggtgttgtcattgcgctttgggctcctattattcttgtctatttcatggatactcaaatttggtatgcaattttctcaacgctaattggtggtgtctatggggcttgtcgccgtcttggtgagacatctgaggataccagagaacaagaaaaaatagccgcaagatttgctcagatttggaatttaattatcacaagcttccgtgaggaagatttgatagacgacagagagaaggacttgttacttgttccatactgcaaagatcgtgatatggatataatccaatggccaccattcctgcttgccagcaagattccaatagcattggatatggccgcagatagtggtggaaaagatcgtgatctaaagaagaggatgaaatcggatccatattttacttatgctatcaaggaatgctatgcttctttcaaaaacatcatatatgaactagtgatcgattcacgagagagaggttacatacaaaagatcttcgatgcggtggatgagcacatagcagaagagactttgataaaggagctgaacatgagtaaccttcctaccctaagcaagaagttcattgagctgcttgacttactggaaagtaacaacaaagaagatcatgatcagatcatcatattgttccaagacatgcttgaagtggttacaagggacataatggttgaccagctcagcgaactactggaattgatacatggtgcaaataataaaagatctgaaggaatgacatcacttgaccaacaagatcagttgttcacgaaagctattgattttcctgtaaagaaaacccaagcatggaatgaaaagataaaaaggcttcgacttttactcacggtgaaggaatcggctatggatgtccctacaaacctggatgctaggaggaggatatctttctttgctaattctctttttatgtcgatgccagatgctccaaaagtgcggcaaatgttgcccttctctgtcttgactccttattataaagaagatgttcttttctcttcacaagcactagcagaacagaatgaggacggagtttccatccttttttatttgcaaaaaatctacccagatgaatggaaaaattttcttgaaagggtgcattgtgagagtgaagatcaactccacgagactgagcattctgaagagcagcttcgcctttgggcatcataccggggacaaactttgacaagaactgtaagagggatgatgtactacagacaagctttagtccttcaggcttcccttgatatggccagagatgatgaccttatggagggttttagagcagctgacctgttatctgaatctgatgaatcaccactattgactcaatgcaaagctatagctgatatgaaattcacatatgttgtatcatgccagcaatacggtattcagaaacgttctggtgatccacatgcacaggatattctgagattgatgaccacgatatatataggataaagcttccaggaaatgcaatgctaggtgaaggaaaaccagagaaccagaaccatgccataattttcacacgaggtgaaggtctccaaaccatcgacatgaatcaggaacattatatggaggagactttgaaaatgaggaatttgttgcaagagtttctgaagaaacatgatggtgtgagatatccatcaatacttggtgtaagagaacacatcttcaccggaagcgtgtcttctcttgcatggttcatgtcaaaccaagaaacaagttttgtgaccattggacaacgtgtacttgccaatcctttgagagttcgatttcattatgggcatcctgatatctttgatcgacttttccacctcacacgtggaggtgtaagcaaagcttctaagattatcaatcttagtgaagacatatttgctggatttaattcaacactgcgtgaaggaaatgttacacatcatgaatacatgcaagttggcaagggcagagatgttggtctcaaccagatctcactatttgaagcaaaaatagcaaatggtaatggtgaacagacgctgagccgtgacgtgtaccgtcttggacatcgttttgactttttcagaatgttgtcctgctactatactactattggtttttacttcagcacaatgataacagtttggaccgtttatgtattcctctacgggcgcctgtatcttgtcctaagtggccttgatgaagcattagccactggaaagaggtttatacacaacgagcctctccaggttgctctagcttcacagtcttttgtgcagcttgggttcttgatggcgctgcctatgatgatggaaattggtctagagagaggattcagaactgcattgagtgactttgtacttatgcagctccagttagcatctgtgttcttcacattctctcttgggaccaaaactcactactacggaaccacactgctacatggaggagctgaatatagagctacagggcgtggatttgtggtgttccatgccaagtttgctgagaattatcgattgtattcgcgaagccattttgtgaagggcattgaactgatgattttgcttattgtgtatgaaatatttgggcagtcataccgaggagctattgcgtacattttcatcacattttccatgtggtttatggttgtcacctggctctttgccccattcctgtttaatccttctgggttcgagtggcagaaaattgtggatgactggactgactggaataagtggatcagtaaccgtggaggtattggggtgccgccagagaaaagttgggagtcatggtgggaaaaagagcaggagcctcttaggcattctggaaagcgtggcactgttcttgaaatagtgctttcgttgcgcttctttatttaccagtatggtcttgtttatcatttgaacatcaccactcacacgaagagcgttctggtttattgcatctcgtgggtcataatctttgtcattttgctcgtgatgaagactgtatcagttggcaggaggaaattcagtgcagagttccagcttgtgttccggctgatcaaggggctgatattcataacgtttatctctattatcataatcttgatagcaatcccacacatgacagttcaggacatctttgtttgcatccttgcgttcatgccaactggatggggtttgcttctgatagcacaaactatgaggtcagctatttcacatatggggctatggggatcggtcaaggcgcttgcccgaggctatgagatcatcatgggcttgctgttgttcaccccgatcgcattcctcgcttggttcccgtttgtttcggagttccagacaaggatgctgttcaaccaggccttcagtagaggtctgcagatttctcgtatcctaggcggacacaagaaagaccgggctgcacggaacaaggagtgagtagccgagcagcgtgagcctggtagtgctgacctacatacaattcaaccatgccccacgtggcattatacttgtactggttattatgccaggttgtatattgcaaggaaaggaattcatctctgctaacgtgccagattgtatgtgtggcagcaggtactcgatcggtgagcactcctatagcttttttattattatttatgggtaaagtcaaagaaactaaggcactcgagtaaccaacatatacgaagacaatcacagaaaaatgaatctaatatattaagttcaacatatgtatcattttaaaaaaaacaataatagcagaatgctcattctgtc

SEQ ID NO: 51952 - DNA, 4322 bp, Zea Mays
gatatcatcttgagctggaaagcaagaagaaacatgtctcttgttgttaagctacgatacatcttgaagttactatcagctgcttcttgggttgtgattttgcctgtaacttatgcatacacttggaagaatccaactggtcttgcaagagcaattaaaagttggcttggtgatggtcagaatcagccatcattatacattttggcagttgtgatttatttggcaccaaacttgctgtccgctacactatttcttttccctgtaattaggagagctcttgagagatcaaatcttaaagtcgtaacattcataatgtggtggtcgcagcctcgcttatttgttggaagaggaatgcatgagggcgcattctcccttttcaagtatacaatgttctgggtcttgcttttggccactaaattggttgtgagcttctatgtggagatcaaaccacttgtgcagccaacaaaagatataatgaaggagccaatacgaacatttaagtggcatgagtttttcccccatgcaaataacaacattggtgttgtcattgcgctttgggctcctattattcttgtctatttcatggatactcaaatttggtatgcaattttctcaacgctaattggtggtgtctatggggcttgtcgccgtcttggtgagacatctgaggataccagagaacaagaaaaaatagccgcaagatttgctcagatttggaatttaattatcacaagcttccgtgaggaagatttgatagacgacagagagaaggacttgttacttgttccatactgcaaagatcgtgatatggatataatccaatggccaccattcctgcttgccagcaagattccaatagcattggatatggccgcagatagtggtggaaaagatcgtgatctaaagaagaggatgaaatcggatccatattttacttatgctatcaaggaatgctatgcttctttcaaaaacatcatatatgaactagtgatcgattcacgagagagaggttacatacaaaagatcttcgatgcggtggatgagcacatagcagaagagactttgataaaggagctgaacatgagtaaccttcctaccctaagcaagaagttcattgagctgcttgacttactggaaagtaacaacaaagaagatcatgatcagatcatcatattgttccaagacatgcttgaagtggttacaagggacataatggttgaccagctcagcgaactactggaattgatacatggtgcaaataataaaagatctgaaggaatgacatcacttgaccaacaagatcagttgttcacgaaagctattgattttcctgtaaagaaaacccaagcatggaatgaaaagataaaaaggcttcgacttttactcacggtgaaggaatcggctatggatgtccctacaaacctggatgctaggaggaggatatctttctttgctaattctctttttatgtcgatgccagatgctccaaaagtgcggcaaatgttgcccttctctgtcttgactccttattataaagaagatgttcttttctcttcacaagcactagcagaacagaatgaggacggagtttccatccttttttatttgcaaaaaatctacccagatgaatggaaaaattttcttgaaagggtgcattgtgagagtgaagatcaactccacgagactgagcattctgaagagcagcttcgcctttgggcatcataccggggacaaactttgacaagaactgtaagagggatgatgtactacagacaagctttagtccttcaggcttcccttgatatggccagagatgatgaccttatggagggttttagagcagctgacctgttatctgaatctgatgaatcaccactattgactcaatgcaaagctatagctgatatgaaattcacatatgttgtatcatgccagcaatacggtattcagaaacgttctggtgatccacatgcacaggatattctgagattgatgaccacttatccttcacttagggttgcgtacatcgatgaagtcgaagagcctagcaaagacaaaaataagaaaatagagaaggtttactactccgcattggtgaaggcagcagtaacgaagcctgatgatcctggccagaaacttgatcagggatatatataggataaagcttccaggaaatgcaatgctaggtgaaggaaaaccagagaaccagaaccatgccataattttcacacgaggtgaaggtctccaaaccatcgacatgaatcaggaacattatatggaggagactttgaaaatgaggaatttgttgcaagagtttctgaagaaacatgatggtgtgagatatccatcaatacttggtgtaagagaacacatcttcaccggaagcgtgtcttctcttgcatggttcatgtcaaaccaagaaacaagttttgtgaccattggacaacgtgtacttgccaatcctttgagagttcgatttcattatgggcatcctgatatctttgatcgacttttccacctcacacgtggaggtgtaagcaaagcttctaagattatcaatcttagtgaagacatatttgctggatttaattcaacactgcgtgaaggaaatgttacacatcatgaatacatgcaagttggcaagggcagagatgttggtctcaaccagatctcactatttgaagcaaaaatagcaaatgataacagtttggaccgtttatgtattcctctacgggcgcctgtatcttgtcctaagtggccttgatgaagcattagccactggaaagaggtttatacacaacgagcctctccaggttgctctagcttcacagtcttttgtgcagcttgggttcttgatggcgctgcctatgatgatggaaattggtctagagagaggattcagaactgcattgagtgactttgtacttatgcagctccagttagcatctgtgttcttcacattctctcttgggaccaaaactcactactacggaaccacactgctacatggaggagctgaatatagagctacagggcgtggatttgtggtgttccatgccaagtttgctgagaattatcgattgtattcgcgaagccattttgtgaagggcattgaactgatgattttgcttattgtgtatgaaatatttgggcagtcataccgaggagctattgcgtacattttcatcacattttccatgtggtttatggttgtcacctggctctttgccccattcctgtttaatccttctgggttcgagtggcagaaaattgtggatgactggactgactggaataagtggatcagtaaccgtggaggtattggggtgccgccagagaaaagttgggagtcatggtgggaaaaagagcaggagcctcttaggcattctggaaagcgtggcactgttcttgaaatagtgctttcgttgcgcttctttatttaccagtatggtcttgtttatcatttgaacatcaccactcacacgaagagcgttctggtttattgcatctcgtgggtcataatctttgtcattttgctcgtgatgaagactgtatcagttggcaggaggaaattcagtgcagagttccagcttgtgttccggctgatcaaggggctgatattcataacgtttatctctattatcataatcttgatagcaatcccacacatgacagttcaggacatctttgtttgcatccttgcgttcatgccaactggatggggtttgcttctgatagcacaaactatgaggtcagctatttcacatatggggctatggggatcggtcaaggcgcttgcccgaggctatgagatcatcatgggcttgctgttgttcaccccgatcgcattcctcgcttggttcccgtttgtttcggagttccagacaaggatgctgttcaaccaggccttcagtagaggtctgcagatttctcgtatcctaggcggacacaagaaagaccgggctgcacggaacaaggagtgagtagccgagcagcgtgagcctggtagtgctgacctacatacaattcaaccatgccccacgtggcattatacttgtactggttattatgccaggttgtatattgcaaggaaaggaattcatctctgctaacgtgccagattgtatgtgtggcagcaggtactcgatcggtgagcactcctatagcttttttattattatttatgggtaaagtcaaagaaactaaggcactcgagtaaccaacatatacgaagacaatcacagaaaaatgaatctaatatattaagttcaacatatgtatcattttaaaaaaaacaataatagcagaatgctcattctgtc

SEQ ID NO: 51953 - DNA, 4192 bp, Zea Mays
atgtctcttgttgttaagctacgatacatcttgaagttactatcagctgcttcttgggttgtgattttgcctgtaacttatgcatacacttggaagaatccaactggtcttgcaagagcaattaaaagttggcttggtgatggagagctcttgagagatcaaatcttaaagtcgtaacattcataatgtggtggtcgcagcctcgcttatttgttggaagaggaatgcatgagggcgcattctcccttttcaagtatacaatgttctgggtcttgcttttggccactaaattggttgtgagcttctatgtggagatcaaaccacttgtgcagccaacaaaagatataatgaaggagccaatacgaacatttaagtggcatgagtttttcccccatgcaaataacaacattggtgttgtcattgcgctttgggctcctattattcttgtctatttcatggatactcaaatttggtatgcaattttctcaacgctaattggtggtgtctatggggcttgtcgccgtcttggtgagacatctgaggataccagagaacaagaaaaaatagccgcaagatttgctcagatttggaatttaattatcacaagcttccgtgaggaagatttgatagacgacagagagaaggacttgttacttgttccatactgcaaagatcgtgatatggatataatccaatggccaccattcctgcttgccagcaagattccaatagcattggatatggccgcagatagtggtggaaaagatcgtgatctaaagaagaggatgaaatcggatccatattttacttatgctatcaaggaatgctatgcttctttcaaaaacatcatatatgaactagtgatcgattcacgagagagaggttacatacaaaagatcttcgatgcggtggatgagcacatagcagaagagactttgataaaggagctgaacatgagtaaccttcctaccctaagcaagaagttcattgagctgcttgacttactggaaagtaacaacaaagaagatcatgatcagatcatcatattgttccaagacatgcttgaagtggttacaagggacataatggttgaccagctcagcgaactactggaattgatacatggtgcaaataataaaagatctgaaggaatgacatcacttgaccaacaagatcagttgttcacgaaagctattgattttcctgtaaagaaaacccaagcatggaatgaaaagataaaaaggcttcgacttttactcacggtgaaggaatcggctatggatgtccctacaaacctggatgctaggaggaggatatctttctttgctaattctctttttatgtcgatgccagatgctccaaaagtgcggcaaatgttgcccttctctgtcttgactccttattataaagaagatgttcttttctcttcacaagcactagcagaacagaatgaggacggagtttccatccttttttatttgcaaaaaatctacccagatgaatggaaaaattttcttgaaagggtgcattgtgagagtgaagatcaactccacgagactgagcattctgaagagcagcttcgcctttgggcatcataccggggacaaactttgacaagaactgtaagagggatgatgtactacagacaagctttagtccttcaggcttcccttgatatggccagagatgatgcaatacggtattcagaaacgttctggtgatccacatgcacaggatattctgagattgatgaccacttatccttcacttagggttgcgtacatcgatgaagtcgaagagcctagcaaagacaaaaataagaaaatagagaaggtttactactccgcattggtgaaggcagcagtaacgaagcctgatgatcctggccagaaacttgatcagggatatatataggataaagcttccaggaaatgcaatgctaggtgaaggaaaaccagagaaccagaaccatgccataattttcacacgaggtgaaggtctccaaaccatcgacatgaatcaggaacattatatggaggagactttgaaaatgaggaatttgttgcaagagtttctgaagaaacatgatggtgtgagatatccatcaatacttggtgtaagagaacacatcttcaccggaagcgtgtcttctcttgcatggttcatgtcaaaccaagaaacaagttttgtgaccattggacaacgtgtacttgccaatcctttgagagttcgatttcattatgggcatcctgatatctttgatcgacttttccacctcacacgtggaggtgtaagcaaagcttctaagattatcaatcttagtgaagacatatttgctggatttaattcaacactgcgtgaaggaaatgttacacatcatgaatacatgcaagttggcaagggcagagatgttggtctcaaccagatctcactatttgaagcaaaaatagcaaatggtaatggtgaacagacgctgagccgtgacgtgtaccgtcttggacatcgttttgactttttcagaatgttgtcctgctactatactactattggtttttacttcagcacaatgataacagtttggaccgtttatgtattcctctacgggcgcctgtatcttgtcctaagtggccttgatgaagcattagccactggaaagaggtttatacacaacgagcctctccaggttgctctagcttcacagtcttttgtgcagcttgggttcttgatggcgctgcctatgatgatggaaattggtctagagagaggattcagaactgcattgagtgactttgtacttatgcagctccagttagcatctgtgttcttcacattctctcttgggaccaaaactcactactacggaaccacactgctacatggaggagctgaatatagagctacagggcgtggatttgtggtgttccatgccaagtttgctgagaattatcgattgtattcgcgaagccattttgtgaagggcattgaactgatgattttgcttattgtgtatgaaatatttgggcagtcataccgaggagctattgcgtacattttcatcacattttccatgtggtttatggttgtcacctggctctttgccccattcctgtttaatccttctgggttcgagtggcagaaaattgtggatgactggactgactggaataagtggatcagtaaccgtggaggtattggggtgccgccagagaaaagttgggagtcatggtgggaaaaagagcaggagcctcttaggcattctggaaagcgtggcactgttcttgaaatagtgctttcgttgcgcttctttatttaccagtatggtcttgtttatcatttgaacatcaccactcacacgaagagcgttctggtttattgcatctcgtgggtcataatctttgtcattttgctcgtgatgaagactgtatcagttggcaggaggaaattcagtgcagagttccagcttgtgttccggctgatcaaggggctgatattcataacgtttatctctattatcataatcttgatagcaatcccacacatgacagttcaggacatctttgtttgcatccttgcgttcatgccaactggatggggtttgcttctgatagcacaaactatgaggtcagctatttcacatatggggctatggggatcggtcaaggcgcttgcccgaggctatgagatcatcatgggcttgctgttgttcaccccgatcgcattcctcgcttggttcccgtttgtttcggagttccagacaaggatgctgttcaaccaggccttcagtagaggtctgcagatttctcgtatcctaggcggacacaagaaagaccgggctgcacggaacaaggagtgagtagccgagcagcgtgagcctggtagtgctgacctacatacaattcaaccatgccccacgtggcattatacttgtactggttattatgccaggttgtatattgcaaggaaaggaattcatctctgctaacgtgccagattgtatgtgtggcagcaggtactcgatcggtgagcactcctatagcttttttattattatttatgggtaaagtcaaagaaactaaggcactcgagtaaccaacatatacgaagacaatcacagaaaaatgaatctaatatattaagttcaacatatgtatcattttaaaaaaaacaataatagcagaatgctcattctgtc

SEQ ID NO: 51954 - DNA, 4382 bp, Zea Mays
atgtctcttgttgttaagctacgatacatcttgaagttactatcagctgcttcttgggttgtgattttgcctgtaacttatgcatacacttggaagaatccaactggtcttgcaagagcaattaaaagttggcttggtgatggtcagaatcagccatcattatacattttggcagttgtgatttatttggcaccaaacttgctgtccgctacactatttcttttccctgtaattaggagagctcttgagagatcaaatcttaaagtcgtaacattcataatgtggtggtcgcagcctcgcttatttgttggaagaggaatgcatgagggcgcattctcccttttcaagtatacaatgttctgggtcttgcttttggccactaaattggttgtgagcttctatgtggagatcaaaccacttgtgcagccaacaaaagatataatgaaggagccaatacgaacatttaagtggcatgagtttttcccccatgcaaataacaacattggtgttgtcattgcgctttgggctcctattattcttgtctatttcatggatactcaaatttggtatgcaattttctcaacgctaattggtggtgtctatggggcttgtcgccgtcttggtgagataaggacattggggatgttgagatctcggttcgaatccctgcctaaggctttcaatcaatgcttgattccatctgacacaagcaaaaggagaggattccgggctgctttctccaaaccttctaagacatctgaggataccagagaacaagaaaaaatagccgcaagatttgctcagatttggaatttaattatcacaagcttccgtgaggaagatttgatagacgacagagagaaggacttgttacttgttccatactgcaaagatcgtgatatggatataatccaatggccaccattcctgcttgccagcaagattccaatagcattggatatggccgcagatagtggtggaaaagatcgtgatctaaagaagaggatgaaatcggatccatattttacttatgctatcaaggaatgctatgcttctttcaaaaacatcatatatgaactagtgatcgattcacgagagagaggttacatacaaaagatcttcgatgcggtggatgagcacatagcagaagagactttgataaaggagctgaacatgagaaagtaacaacaaagaagatcatgatcagatcatcatattgttccaagacatgcttgaagtggttacaagggacataatggttgaccagctcagcgaactactggaattgatacatggtgcaaataataaaagatctgaaggaatgacatcacttgaccaacaagatcagttgttcacgaaagctattgattttcctgtaaagaaaacccaagcatggaatgaaaagataaaaaggcttcgacttttactcacggtgaaggaatcggctatggatgtccctacaaacctggatgctaggaggaggatatctttctttgctaattctctttttatgtcgatgccagatgctccaaaagtgcggcaaatgttgcccttctctgtcttgactccttattataaagaagatgttcttttctcttcacaagcactagcagaacagaatgaggacggagtttccatccttttttatttgcaaaaaatctacccagatgaatggaaaaattttcttgaaagggtgcattgtgagagtgaagatcaactccacgagactgagcattctgaagagcagcttcgcctttgggcatcataccggggacaaactttgacaagaactgtaagagggatgatgtactacagacaagctttagtccttcaggcttcccttgatatggccagagatgatgaccttatggagggttttagagcagctgacctgttatctgaatctgatgaatcaccactattgactcaatgcaaagctatagctgatatgaaattcacatatgttgtatcatgccagcaatacggtattcagaaacgttctggtgatccacatgcacaggatattctgagattgatgaccacttatccttcacttagggttgcgtacatcgatgaagtcgaagagcctagcaaagacaaaaataagaaaatagagaaggtttactactccgcattggtgaaggcagcagtaacgaagcctgatgatcctggccagaaacttgatcaggataaagcttccaggaaatgcaatgctaggtgaaggaaaaccagagaaccagaaccatgccataattttcacacgaggtgaaggtctccaaaccatcgacatgaatcaggaacattatatggaggagactttgaaaatgaggaatttgttgcaagagtttctgaagaaacatgatggtgtgagatatccatcaatacttggtgtaagagaacacatcttcaccggaagagttcgatttcattatgggcatcctgatatctttgatcgacttttccacctcacacgtggaggtgtaagcaaagcttctaagattatcaatcttagtgaagacatatttgctggatttaattcaacactgcgtgaaggaaatgttacacatcatgaatacatgcaagttggcaagggcagagatgttggtctcaaccagatctcactatttgaagcaaaaatagcaaatggtaatggtgaacagacgctgagccgtgacgtgtaccgtcttggacatcgttttgactttttcagaatgttgtcctgctactatactactattggtttttacttcagcacaatgataacagtttggaccgtttatgtattcctctacgggcgcctgtatcttgtcctaagtggccttgatgaagcattagccactggaaagaggtttatacacaacgagcctctccaggttgctctagcttcacagtcttttgtgcagcttgggttcttgatggcgctgcctatgatgatggaaattggtctagagagaggattcagaactgcattgagtgactttgtacttatgcagctccagttagcatctgtgttcttcacattctctcttgggaccaaaactcactactacggaaccacactgctacatggaggagctgaatatagagctacagggcgtggatttgtggtgttccatgccaagtttgctgagaattatcgattgtattcgcgaagccattttgtgaagggcattgaactgatgattttgcttattgtgtatgaaatatttgggcagtcataccgaggagctattgcgtacattttcatcacattttccatgtggtttatggttgtcacctggctctttgccccattcctgtttaatccttctgggttcgagtggcagaaaattgtggatgactggactgactggaataagtggatcagtaaccgtggaggtattggggtgccgccagagaaaagttgggagtcatggtgggaaaaagagcaggagcctcttaggcattctggaaagcgtggcactgttcttgaaatagtgctttcgttgcgcttctttatttaccagtatggtcttgtttatcatttgaacatcaccactcacacgaagagcgttctggtttattgcatctcgtgggtcataatctttgtcattttgctcgtgatgaagactgtatcagttggcaggaggaaattcagtgcagagttccagcttgtgttccggctgatcaaggggctgatattcataacgtttatctctattatcataatcttgatagcaatcccacacatgacagttcaggacatctttgtttgcatccttgcgttcatgccaactggatggggtttgcttctgatagcacaaactatgaggtcagctatttcacatatggggctatggggatcggtcaaggcgcttgcccgaggctatgagatcatcatgggcttgctgttgttcaccccgatcgcattcctcgcttggttcccgtttgtttcggagttccagacaaggatgctgttcaaccaggccttcagtagaggtctgcagatttctcgtatcctaggcggacacaagaaagaccgggctgcacggaacaaggagtgagtagccgagcagcgtgagcctggtagtgctgacctacatacaattcaaccatgccccacgtggcattatacttgtactggttattatgccaggttgtatattgcaaggaaaggaattcatctctgctaacgtgccagattgtatgtgtggcagcaggtactcgatcggtgagcactcctatagcttttttattattatttatgggtaaagtcaaagaaactaaggcactcgagtaaccaacatatacgaagacaatcacagaaaaatgaatctaatatattaagttcaacatatgtatcattttaaaaaaaacaataatagcagaatgctcattctgtc

SEQ ID NO: 51955 - DNA, 2390 bp, Zea Mays
agggttgcgtacatcgatgaagtcgaagagcctagcaaagacaaaaataagaaaatagagaaggtttactactccgcattggtgaaggcagcagtaacgaagcctgatgatcctggccagaaacttgatcagggatatatataggataaagcttccaggaaatgcaatgctaggtgaaggaaaaccagagaaccagaaccatgccataattttcacacgaggaacattatatggaggagactttgaaaatgaggaatttgttgcaagagtttctgaagaaacatgatggtgtgagatatccatcaatacttggtgtaagagaacacatcttcaccggaagcgtgtcttctcttgcatggttcatgtcaaaccaagaaacaagttttgtgaccattggacaacgtgtacttgccaatcctttgagagttcgatttcattatgggcatcctgatatctttgatcgacttttccacctcacacgtggaggtgtaagcaaagcttctaagattatcaatcttagtgaagacatatttgctggatttaattcaacactgcgtgaaggaaatgttacacatcatgaatacatgcaagttggcaagggcagagatgttggtctcaaccagatctcactatttgaagcaaaaatagcaaatggtaatggtgaacagacgctgagccgtgacgtgtaccgtcttggacatcgttttgactttttcagaatgttgtcctgctactatactactattggtttttacttcagcacaatgataacagtttggaccgtttatgtattcctctacgggcgcctgtatcttgtcctaagtggccttgatgaagcattagccactggaaagaggtttatacacaacgagcctctccaggttgctctagcttcacagtcttttgtgcagcttgggttcttgatggcgctgcctatgatgatggaaattggtctagagagaggattcagaactgcattgagtgactttgtacttatgcagctccagttagcatctgtgttcttcacattctctcttgggaccaaaactcactactacggaaccacactgctacatggaggagctgaatatagagctacagggcgtggatttgtggtgttccatgccaagtttgctgagaattatcgattgtattcgcgaagccattttgtgaagggcattgaactgatgattttgcttattgtgtatgaaatatttgggcagtcataccgaggagctattgcgtacattttcatcacattttccatgtggtttatggttgtcacctggctctttgccccattcctgtttaatccttctgggttcgagtggcagaaaattgtggatgactggactgactggaataagtggatcagtaaccgtggaggtattggggtgccgccagagaaaagttgggagtcatggtgggaaaaagagcaggagcctcttaggcattctggaaagcgtggcactgttcttgaaatagtgctttcgttgcgcttctttatttaccagtatggtcttgtttatcatttgaacatcaccactcacacgaagagcgttctggtttattgcatctcgtgggtcataatctttgtcattttgctcgtgatgaagactgtatcagttggcaggaggaaattcagtgcagagttccagcttgtgttccggctgatcaaggggctgatattcataacgtttatctctattatcataatcttgatagcaatcccacacatgacagttcaggacatctttgtttgcatccttgcgttcatgccaactggatggggtttgcttctgatagcacaaactatgaggtcagctatttcacatatggggctatggggatcggtcaaggcgcttgcccgaggctatgagatcatcatgggcttgctgttgttcaccccgatcgcattcctcgcttggttcccgtttgtttcggagttccagacaaggatgctgttcaaccaggccttcagtagaggtctgcagatttctcgtatcctaggcggacacaagaaagaccgggctgcacggaacaaggagtgagtagccgagcagcgtgagcctggtagtgctgacctacatacaattcaaccatgccccacgtggcattatacttgtactggttattatgccaggttgtatattgcaaggaaaggaattcatctctgctaacgtgccagattgtatgtgtggcagcaggtactcgatcggtgagcactcctatagcttttttattattatttatgggtaaagtcaaagaaactaaggcactcgagtaaccaacatatacgaagacaatcacagaaaaatgaatctaatatattaagttcaacatatgtatcattttaaaaaaaacaataatagcagaatgctcattctgtc

SEQ ID NO: 51956 - DNA, 1452 bp, Zea Mays
ctcattcccatgttctgttctgtctttctcattcctccctccccgcaaagcccattctcattccctcgtacatcccacgtctagctaaaattaaaaaaatctcattccctcgtacatcccaagtctagctaaaattaaaaaaaaacacatgtcctcaaggggatttgaacccgtgatctcttaagcaaaggccaagagtagctaccgctacaccacatgtgtgtttatgtctacatctatgacaggaaacacatctactacatctctcaccaagctcacttgctacccttgcacaatacgtagtagtagataagtatcatcgagattcttgaattatatttttggatggaggtaatattatttaaagaggagctttgcatgcaatttttttgtttgaataatgtattatacttaaattcccttttttgcatgtgtgatattttttcttcataatatttttttccatggatcagacttgtgagtcattttcataaaccaacgacaagcattaatccatgtttcttacttaaaactccgaacaaacaccatcagcaggaggcactcgcgttggcgtcgctaatcgatgacgagaagaagcttggcgactgtcagttcgacctctagaagcagtcctacgtggtcgcatgcgtcgctgtgtacgacaagctcccacgaagccactgtttggacgcggtccagagcagctgcaccgcgctgtccatcgttaagaggggggcctcatggttgtctccaatgtcgacgactgttgggttgttctggacatcgcatccgacgacgacgccatcacgcgatccagctcatcgtccacctaaagcccaacctgctacgtaagtcgctactgaccggacatgaattcttgtgcattgggacgatgctgacgttgtgtgagtgtcctcgaacatgatgtatgtagtggagtagcgcatccggtgatgcaacggccaagtgtactacctcactgatgagcccggggtgcacttcgtttggcagcccaaccaagagtcatcggtactcgtcatgtcgtgcgcgtttgacgactactatatcgagaattgtggcgtcatcttggcgctggaggtgacgcagaggaggatcgacaacagtgaccagttcgtcatcctcgccaccgtcagggtagcttttgtgtcggtctgactttaattttcttcgcaaacacacacacttacttttttgtttaagcaagagcgtatggtggtgcgtgtctgatgactaacgatgtacgagagaatttcttccggcatgtgtggaacgtgctctccaatgataagaccatacaaatcgtggcatatatcgaagtctgcatgatactgatggttgcaatgtattggtgaaacaactagattaaaataacaaaatttatgtatggctaggatcacaaattgattatgaaacatttttctcataacaata

SEQ ID NO: 51957 - DNA, 1423 bp, Zea Mays
aaaacaaggccaaagtacaaacgagagaggaacagcgatagccgatagcatagcgatagccgatagagaagaggaaaacgagatacgaacagcgtgagtcgaatcgcgtggtggggtaccgcaataatgggatggctcgtggctttggttagctgaggtcaggagagaagaggagtcgcatttcgcgtggtcgagtccgtccgtgtctgtcctccgctgtccgctggctgcgatagtgctgcctgctgctctaacccaatccaaggaggatgccgaggagcccgcagctgagcctgagcggctgcagctctctcttctccctgtccagcaccagtacgagccgcgacagcgccgccctgaaggcgccggtgccagcgccaccggcaggcgcggtgcccccacggcgcacccctctcctgtcgctcagcgtcggcgaggaggaagaggacgagggtgaggacgaggaggagtacctgctgggggccggcgccctggatctgcagctgacggggcccggtggcggcagcaacagcagcggcggctacgacgacgagcggaagaacatccggatgatgaggaacagggagtctgcgctgcgctccagggcaaggaagagggagctggagaaggaggttcgtcgcctggtgaatgagaacctcaagctcaagaggcagtgcaaacaactgaaactagatatggctgcactggtccagcaaagcagcagcaagagcagctcccacatcagaagaacctcctcatccactcagctctaggctgctaccaataggaatatgtatgtgaatttaaagccatatatgaccaaggaagaatgggaggaagacgaacaaagctagctagactagactgcagcccctctaatccatggccattcgctgattaatacgataatatctcttatttgttggcttcttctagcttgcttcaatttcctagtacagcagtttatgtagtatttcctagattgttagcgcaaagctgcctttttcacccatggcatccactctagtggtgtccaggtagtgtcgatccaattttagtatagaggtcactcaaacctctctccatgacagagctttttattcgtttcctgtcttttttttattgttctaatcataataagatacgcacacattcacctgtatgggctacgaccatatacgactaatagttttctctagacagagaaaggcaaaggcgatatttgaatctctttagtatatgcccctgaccaagaaaggagagaagcaaaagtactagccctaatctgctagaataaccaatctgctcaaggattttagtcttttttatgcacttggttgtagcgttgtaatcatctgctataatattctaacatcagtatgcaataagctgggttaccagcacagacaattaaaagtgttca

SEQ ID NO: 51958 - DNA, 1863 bp, Zea Mays
aaacacgactagagtgggtgggagactgggaaagacgagacagcgagacaccactgagacgagagtcagccggcaggtgagacatcgcaggggaaccagctctcaagacggccgacggccggcttgcctacctgctcccatccttcccgagggaccgagaaagataagaaaggcggtggtcaacttgtgtcctgaggtgcccgtagaagcccaaggacaagaaacaaggagaagagtagatctacatctactccaccgatgagcgcgtctcggttcatcaagtgcgtcaccgtgggggacggtgccgtcggaaagacctgcatgctcatctcctacacatccaacactttccccactgacaagaagattacaatagactgcgtccgttgagctatcgtggtgctgatgtttttctgctcgccttttctcttatcagcaaagcaagctatgagaatgtctctaagaagtgggttcctgaattaaggcactatgctcctggcgtgcccataatccttgttgggacaaaacttgatctgcgtgatgataagcagttttttgttgatcaccctggtgctgttccaatttccactgcccagggcgaagagctgaggaagctaattggtgctgccgcctacatcgaatgcagttcaaaaacccagcagaacataaaagcagtgtttgacgcagcaattaaggtggttctccagccaccaaagcaaaagaagaggaagaagaaggtgcagaagggatgcaccattttgtaactacaaacggtagagggcaacagtctggctgcggcgctgctgccaatgataaccatcgcctccttgctgtataatatatcgcctgatcatgccaccagcatgcacaagggagatggtggttttaggatccttgtcctactgtgttgtgtagaccaccgggtgtagttgactgtatctggttgtttgtatgtatgtacaagacaaaactagcactgcagatggtatggtaaggcgtaagcaaatacaatatgacactggtccagttccaggaatgaatggaatatgacattggtccgagatttgcaatacaatacaatatcatcatccaggaagctcatagctgctgctagtaggatactccggtcggagtagctaggtggagacaaggcaacggaagagcagcacagccgccgctgcggtaatggtgcacatgagctggccggggcgcggcggcgtggcgttgcacgaggggcgatccggagcgctgaagcagccatgggtctggtcgatgcccttgccgccggcctccaggagaaaggtggagttggggctgccgctgctgaagaggaggcaccagaagaagggcccgcggcggtcgaagccggcgcccacctgggtgtgctccttgccgcggatcaccgagagcgcggtggctgatgccagcgcgtcctccgggccgtcgcggtcccggtggcagccgaagaggcggccggagatgacgtccaccgtggggagctccacgccgcagttggcggcgtagacctccgtgatgtgggcctcgggggtctggcacgccatcgtgttgccgctgctgcaggcggcgccgcccgtggtggccgccatgcactcggagatgtactgcagcgccatgcacccgaggcctctgctgttgcgcagcgcaggcagcctgctcgcctccctcttgccgttgatgagggccacgaggtcgttggctgggttccctgccaccaccaccaccgccgattcaatttgagcactggcaaatcgattgagctctgatccagatatttttaccatggatctttgcagaggatacgcccgccggcagcgtcctggtgcagagcagcagaagaatcac

SEQ ID NO: 51959 - DNA, 2122 bp, Zea Mays
aaacacgactagagtgggtgggagactgggaaagacgagacagcgagacaccactgagacgagagtcagccggcaggtgagacatcgcaggggaaccagctctcaagacggccgacggccggcttgcctacctgctcccatccttcccgagggaccgagaaagataagaaaggcggtggtcaacttgtgtcctgaggtgcccgtagaagcccaaggacaagaaacaaggagaagagtagatctacatctactccaccgatgagcgcgtctcggttcatcaagtgcgtcaccgtgggggacggtgccgtcggaaagacctgcatgctcatctcctacacatccaacactttccccactgactatgttccaactgtgttcgacaacttcagtgccaatgttgtggttgacgggagcactgtcaacttgggtctgtgggatacagcaggacaagaagattacaatagactgcgtccgttgagctatcgtggtgctgatgtttttctgctcgccttttctcttatcagcaaagcaagctatgagaatgtctctaagaagtgggttcctgaattaaggcactatgctcctggcgtgcccataatccttgttgggacaaaacttgatctgcgtgatgataagcagttttttgttgatcaccctggtgctgttccaatttccactgcccagggcgaagagctgaggaagctaattggtgctgccgcctacatcgaatgcagttcaaaaacccagcagaacataaaagcagtgtttgacgcagcaattaaggtggttctccagccaccaaagcaaaagaagaggaagaagaaggtgcagaagggatgcaccattttgtaactacaaacggtagagggcaacagtctggctgcggcgctgctgccaatgataaccatcgcctccttgctgtataatatatcgcctgatcatgccaccagcatgcacaagggagatggtggttttaggatccttgtcctactgtgttgtgtagaccaccgggtgtagttgactgtatctggttgtttgtatgtatgtacaagacaaaactagcactgcagatggtaccagcgaaatccatagctttgatgaatcaagtccctcgggcaatgactacctagctgaggtgtgcagagaatgggaggccacggcatgccaagtaaaccaggaggatgttaggcttgtacttctccggattggggttgttcttggcaaggacggcggtgctctaggttgctgtgtttcatttaattccttttctcccctcttgtccttttattttccttcctcaagagaaggaccattccaatctacgctgcttattcacctggttcatctgtccatctgcagcaaagatgatacccctttttatgatgtttgctggtggtcctctggggacgggacgccaatggttgcttctctctcttgtgctacagacttatagtatacgctgggatcctagtcattctgttttcagacagatgggatttgatcgttagtacattcaacttcagcatattgtaccaattaattgattatctgattgctaggttttcttggattcatctggatgacctagtcaacctcatctatgaatctctaacgaaccctacatacaaaggtgtaatcaatggaactgcacctaatcctgtgcgtttgtctgagctatgcgaacgtctggggcgaatcgttgggcggccctcttggttgcccgtgccgggatttgcgctcaaagcggtgctaggagaaggcgcttctgtggtgttggaaggacaaaaggttgttccggcgaaggccaaggatctgggcttctcctatagatacccctatgttgaagacgctctaaaggccattgcccgagacctatagagctaggttgaggacgatacaggcaacttaatttaattatttcttatcttaactaggaacgtgcccgtgcgatgctacggaatacaaattgcgaccctttaatagacttagggccctgacgacgtgcggcgtgagtacaatagtgacggcaaaatatgtgattgttaaacatagatatagaacgatataaataagtctacccaaatagattgaaatggaatcacacaaatagtttataaagagt

SEQ ID NO: 51960 - DNA, 327 bp, Zea Mays
attgatttctacccaatcatcatctagacaggataggactatgttccaactgtgttcgacaacttcagtgccaatgttgtggttgacgggagcactgtcaacttgggtctgtgggatacagcaggacaagaagattacaatagactgcgtccgttgagctatcgtggtgctgatgtttttctgctcgccttttctcttatcagcaaagcaagctatgagaatgtctctaagaagtgggttcctgaattaaggcactatgctcctggcgtgcccataatccttgttgggacaaaacttgccacgatagggttctggattctggaaata

SEQ ID NO: 51961 - DNA, 352 bp, Zea Mays
gtcggtttagggtttacaaattgattgggtctccatagaaattgaaggtggtaaaggaaagaaaaaagtatctggaaatgaaaatgaaaatgagagaaagatactaagaggaaagataaagtgcccaaattgtggtcaactaggtcatcggaaagcaagcccaaaatgcccccttaatggaactaaaaagagaaaacgaaaaccaaggatgaataccacaaaacagtggtttcccaaagaaaacatggctggtcctgttcctagtgttgttgctggtgctgttcctagtgctgttccaggtgtcaacaccccaactgcagaagctggcctttcatcgcctccaagaaagatt

SEQ ID NO: 51962 - DNA, 1823 bp, Zea Mays
cgaatggaatcctcgggtccgtccggccacgcaagcggcggcaccaccattcatctacgaatccatgggaggagattggagtggggccagctaacggatcggagtcggagtccttcttgtgcttctcctgctctgctggtgccgctgccatgggtttccccagcacccccaacctgaagctggagcctcgccctcgcacgcggaggctcctgcgctgcgccctcagctctgagcctgtgcagcctcccatgactgtttccatcactggagccacaggtttcattggacgcagattggttcacaagcttctatcggatgatcacaaggtttgcatcttaacaaggtctgcctccaaggctgcgtcagtttttcctgcttccacctatcctggactcacaatagcccagcaaggggattgggaggcatgcgtcagaggctccactgctgttgtcaacctggcaggcatgcccataagcactagatggtcacccgagattaagcaggaaatcaaacagagccgggtcaatgttacatcaaaggtgtgcagagaatgggaggccacggcatgccaagtaaaccaggaggatgttaggcttgtacttctccggattggggttgttcttggcaaggacggcggtgctctaggttgctgtgtttcatttaattccttttctcccctcttgtccttttattttccttcctcaagagaaggaccattccaatctacgctgcttattcacctggttcatctgtccatctgcagcaaagatgatacccctttttatgatgtttgctggtggtcctctggggacgggacgccaatggttgcttctctctcttgtgctacagacttatagtatacgctgggatcctagtcattctgttttcagacagatgggatttgatcgttagtacattcaacttcagcatattgtaccaattaattgattatctgattgctaggttttcttggattcatctggatgacctagtcaacctcatctatgaatctctaacgaaccctacatacaaaggtgaactcacacattctctgacccccccccccccgcccatgtgttacagactaggtatgctgctagaagccatgcaaacaccctactgcaagcaaaacaacttatgaatttcatgaattgtaagataatggtatggatatcagttgaatgcaagacactttatggtgcgatactgcaatgaattcatattgtggtagcattcaagtaatgacgtagtgctagctgactttggagtacatgatacactttatggcatgattttgtatattgagagcagcctcacattctgtttattaggtgtaatcaatggaactgcacctaatcctgtgcgtttgtctgagctatgcgaacgtctggggcgaatcgttgggcggccctcttggttgcccgtgccgggatttgcgctcaaagcggtgctaggagaaggcgcttctgtggtgttggaaggacaaaaggttgttccggcgaaggccaaggatctgggcttctcctatagatacccctatgttgaagacgctctaaaggccattgcccgagacctatagagctaggttgaggacgatacaggcaacttaatttaattatttcttatcttaactaggaacgtgcccgtgcgatgctacggaatacaaattgcgaccctttaatagacttagggccctgacgacgtgcggcgtgagtacaatagtgacggcaaaatatgtgattgttaaacatagatatagaacgatataaataagtctacccaaatagattgaaatggaatcacacaaatagtttataaagagt

SEQ ID NO: 51963 - DNA, 1656 bp, Zea Mays
cgaatggaatcctcgggtccgtccggccacgcaagcggcggcaccaccattcatctacgaatccatgggaggagattggagtggggccagctaacggatcggagtcggagtccttcttgtgcttctcctgctctgctggtgccgctgccatgggtttccccagcacccccaacctgaagctggagcctcgccctcgcacgcggaggctcctgcgctgcgccctcagctctgagcctgtgcctcccatgactgtttccatcactggagccacaggtttcattggacgcagattggttcacaagcttctatcggatgatcacaaggtttgcatcttaacaaggtctgcctccaaggctgcgtcagtttttcctggtgtgcagagaatgggaggccacggcatgccaagtaaaccaggaggatgttaggcttgtacttctccggattggggttgttcttggcaaggacggcggtgctctaggttgctgtgtttcatttaattccttttctcccctcttgtccttttattttccttcctcaagagaaggaccattccaatctacgctgcttattcacctggttcatctgtccatctgcagcaaagatgatacccctttttatgatgtttgctggtggtcctctggggacgggacgccaatggttgcttctctctcttgtgctacagacttatagtatacgctgggatcctagtcattctgttttcagacagatgggatttgatcgttagtacattcaacttcagcatattgtaccaattaattgattatctgattgctaggttttcttggattcatctggatgacctagtcaacctcatctatgaatctctaacgaaccctacatacaaaggtgaactcacacattctctgacccccccccccccgcccatgtgttacagactaggtatgctgctagaagccatgcaaacaccctactgcaagcaaaacaacttatgaatttcatgaattgtaagataatggtatggatatcagttgaatgcaagacactttatggtgcgatactgcaatgaattcatattgtggtagcattcaagtaatgacgtagtgctagctgactttggagtacatgatacactttatggcatgattttgtatattgagagcagcctcacattctgtttattaggtgtaatcaatggaactgcacctaatcctgtgcgtttgtctgagctatgcgaacgtctggggcgaatcgttgggcggccctcttggttgcccgtgccgggatttgcgctcaaagcggtgctaggagaaggcgcttctgtggtgttggaaggacaaaaggttgttccggcgaaggccaaggatctgggcttctcctatagatacccctatgttgaagacgctctaaaggccattgcccgagacctatagagctaggttgaggacgatacaggcaacttaatttaattatttcttatcttaactaggaacgtgcccgtgcgatgctacggaatacaaattgcgaccctttaatagacttagggccctgacgacgtgcggcgtgagtacaatagtgacggcaaaatatgtgattgttaaacatagatatagaacgatataaataagtctacccaaatagattgaaatggaatcacacaaatagtttataaagagt

SEQ ID NO: 51964 - DNA, 1523 bp, Zea Mays
cgaatggaatcctcgggtccgtccggccacgcaagcggcggcaccaccattcatctacgaatccatgggaggagattggagtggggccagctaacggatcggagtcggagtccttcttgtgcttctcctgctctgctggtgccgctgccatgggtttccccagcacccccaacctgaagctggagcctcgccctcgcacgcggaggctcctgcgctgcgccctcagctctgagcctgtgcctcccatgactgtttccatcactggagccacaggtttcattggacgcagattggttcacaagcttctatcggatgatcacaaggtttgcatcttaacaaggtctgcctccaaggctgcgtcagtttttcctgcttccacctatcctggactcacaatagcccagcaaggggattgggaggcatgcgtcagaggctccactgctgttgtcaacctggcaggcatgcccataagcactagatggtcacccgagattaagcaggaaatcaaacagagccgggtcaatgttacatcaaaggtgtgcagagaatgggaggccacggcatgccaagtaaaccaggaggatgttaggcttgtacttctccggattggggttgttcttggcaaggacggcggtgctctaggttgctgtgtttcatttaattccttttctcccctcttgtccttttattttccttcctcaagagaaggaccattccaatctacgctgcttattcacctggttcatctgtccatctgcagcaaagatgatacccctttttatgatgtttgctggtggtcctctggggacgggacgccaatggttgcttctctctcttgtgctacagacttatagtatacgctgggatcctagtcattctgttttcagacagatgggatttgatcgttagtacattcaacttcagcatattgtaccaattaattgattatctgattgctaggttttcttggattcatctggatgacctagtcaacctcatctatgaatctctaacgaaccctacatacaaaggtgtaatcaatggaactgcacctaatcctgtgcgtttgtctgagctatgcgaacgtctggggcgaatcgttgggcggccctcttggttgcccgtgccgggatttgcgctcaaagcggtgctaggagaaggcgcttctgtggtgttggaaggacaaaaggttgttccggcgaaggccaaggatctgggcttctcctatagatacccctatgttgaagacgctctaaaggccattgcccgagacctatagagctaggttgaggacgatacaggcaacttaatttaattatttcttatcttaactaggaacgtgcccgtgcgatgctacggaatacaaattgcgaccctttaatagacttagggccctgacgacgtgcggcgtgagtacaatagtgacggcaaaatatgtgattgttaaacatagatatagaacgatataaataagtctacccaaatagattgaaatggaatcacacaaatagtttataaagagt

SEQ ID NO: 51965 - DNA, 1387 bp, Zea Mays
cgaatggaatcctcgggtccgtccggccacgcaagcggcggcaccaccattcatctacgaatccatgggaggagattggagtggggccagctaacggatcggagtcggagtccttcttgtgcttctcctgctctgctggtgccgctgccatgggtttccccagcacccccaacctgaagctggagcctcgccctcgcacgcggaggctcctgcgctgcgccctcagctctgagcctgtgcagcctcccatgactgtttccatcactggagccacaggtttcattggacgcagattggttcacaagcttctatcggatgatcacaaggtttgcatcttaacaaggtctgcctccaaggctgcgtcagtttttcctgcttccacctatcctggactcacaatagcccagcaaggggattgggaggcatgcgtcagaggctccactgctgttgtcaacctggcaggcatgcccataagcactagatggtcacccgagattaagcaggaaatcaaacagagccgggtcaatgttacatcaaaggtgtgcagagaatgggaggccacggcatgccaagtaaaccaggaggatgttaggcttgtacttctccggattggggttgttcttggcaaggacggcggtgctctaggttgctgtgtttcatttaattccttttctcccctcttgtccttttattttccttcctcaagagaaggaccattccaatctacgctgcttattcacctggttcatctgtccatctgcagcaaagatgatacccctttttatgatgtttgctggtggtcctctggggacgggacgccaatggttttcttggattcatctggatgacctagtcaacctcatctatgaatctctaacgaaccctacatacaaaggtgtaatcaatggaactgcacctaatcctgtgcgtttgtctgagctatgcgaacgtctggggcgaatcgttgggcggccctcttggttgcccgtgccgggatttgcgctcaaagcggtgctaggagaaggcgcttctgtggtgttggaaggacaaaaggttgttccggcgaaggccaaggatctgggcttctcctatagatacccctatgttgaagacgctctaaaggccattgcccgagacctatagagctaggttgaggacgatacaggcaacttaatttaattatttcttatcttaactaggaacgtgcccgtgcgatgctacggaatacaaattgcgaccctttaatagacttagggccctgacgacgtgcggcgtgagtacaatagtgacggcaaaatatgtgattgttaaacatagatatagaacgatataaataagtctacccaaatagattgaaatggaatcacacaaatagtttataaagagt

SEQ ID NO: 51966 - DNA, 1820 bp, Zea Mays
cgaatggaatcctcgggtccgtccggccacgcaagcggcggcaccaccattcatctacgaatccatgggaggagattggagtggggccagctaacggatcggagtcggagtccttcttgtgcttctcctgctctgctggtgccgctgccatgggtttccccagcacccccaacctgaagctggagcctcgccctcgcacgcggaggctcctgcgctgcgccctcagctctgagcctgtgcctcccatgactgtttccatcactggagccacaggtttcattggacgcagattggttcacaagcttctatcggatgatcacaaggtttgcatcttaacaaggtctgcctccaaggctgcgtcagtttttcctgcttccacctatcctggactcacaatagcccagcaaggggattgggaggcatgcgtcagaggctccactgctgttgtcaacctggcaggcatgcccataagcactagatggtcacccgagattaagcaggaaatcaaacagagccgggtcaatgttacatcaaaggtgtgcagagaatgggaggccacggcatgccaagtaaaccaggaggatgttaggcttgtacttctccggattggggttgttcttggcaaggacggcggtgctctaggttgctgtgtttcatttaattccttttctcccctcttgtccttttattttccttcctcaagagaaggaccattccaatctacgctgcttattcacctggttcatctgtccatctgcagcaaagatgatacccctttttatgatgtttgctggtggtcctctggggacgggacgccaatggttgcttctctctcttgtgctacagacttatagtatacgctgggatcctagtcattctgttttcagacagatgggatttgatcgttagtacattcaacttcagcatattgtaccaattaattgattatctgattgctaggttttcttggattcatctggatgacctagtcaacctcatctatgaatctctaacgaaccctacatacaaaggtgaactcacacattctctgacccccccccccccgcccatgtgttacagactaggtatgctgctagaagccatgcaaacaccctactgcaagcaaaacaacttatgaatttcatgaattgtaagataatggtatggatatcagttgaatgcaagacactttatggtgcgatactgcaatgaattcatattgtggtagcattcaagtaatgacgtagtgctagctgactttggagtacatgatacactttatggcatgattttgtatattgagagcagcctcacattctgtttattaggtgtaatcaatggaactgcacctaatcctgtgcgtttgtctgagctatgcgaacgtctggggcgaatcgttgggcggccctcttggttgcccgtgccgggatttgcgctcaaagcggtgctaggagaaggcgcttctgtggtgttggaaggacaaaaggttgttccggcgaaggccaaggatctgggcttctcctatagatacccctatgttgaagacgctctaaaggccattgcccgagacctatagagctaggttgaggacgatacaggcaacttaatttaattatttcttatcttaactaggaacgtgcccgtgcgatgctacggaatacaaattgcgaccctttaatagacttagggccctgacgacgtgcggcgtgagtacaatagtgacggcaaaatatgtgattgttaaacatagatatagaacgatataaataagtctacccaaatagattgaaatggaatcacacaaatagtttataaagagt

SEQ ID NO: 51967 - DNA, 959 bp, Zea Mays
cgaatggaatcctcgggtccgtccggccacgcaagcggcggcaccaccattcatctacgaatccatgggaggagattggagtggggccagctaacggatcggagtcggagtccttcttgtgcttctcctgctctgctggtgccgctgccatgggtttccccagcacccccaacctgaagctggagcctcgccctcgcacgcggaggctcctgcgctgcgccctcagctctgagcctgtgcctcccatgactgtttccatcactggagccacaggtttcattggacgcagattggttcacaagcttctatcggatgatcacaaggtttgcatcttaacaaggtctgcctccaaggctgcgtcagtttttcctgcttccacctatcctggactcacaatagcccagcaaggggattgggaggcatgcgtcagaggctccactgctgttgtcaacctggcaggcatgcccataagcactagatggtcacccgagattaagcaggaaatcaaacagagccgggtcaatgttacatcaaaggtggtgaagtacatcaaccatgctggaaacgctgatactcgaccctcagtgtttgtgagcgcaacagccattggctattatggtaccagcgaaatccatagctttgatgaatcaagtccctcgggcaatgactacctagctgaggtgtgcagagaatgggaggccacggcatgccaagtaaaccaggaggatgttaggcttgtacttctccggattggggttgttcttggcaaggacggcggtgctctagcaaagatgatacccctttttatgatgtttgctggtggtcctctggggacgggacgccaatggttttcttggattcatctggatgacctagtcaacctcatctatgaatctctaacgaaccctacatacaaagctatgcgaacgtctggggcgaatcgttgggcggccctcttg

SEQ ID NO: 51968 - DNA, 2086 bp, Zea Mays
gtcatcatgtgcctcgagactggaggattttcagtggctaacatgttgcatataaagctgacagttgatttacggagtacaaattatttttgggttccttttcaatcctctcatttgggccgagagaaggatagtgtcgtcgtagcccatgtcaattttgaggtcaaaagcatcggtccgtccactatccaagccccgaattacgtcacattctccaaaatggctgcgggtcgcacccggcgctcgtccctccctgccgcaaccaacgccaccgcttcggcgcttacccatcagatcagacagacaaacaaggcaaacgagaccctagcgcagcatggcttggacggctgcgggcacagtttgctggcgcctcctccgcctcccctccgtccgctgccctctctcgtcccgggcccggtgttccgctgcgcagagcctagacgccgtggacaaggagtatgccgacctcaacctccggcctctgtaccccaacaggggccatcacatgcgcatacggtagcacgtgaacccgctcagctcatccttctcggagcccacggggccgccagagtggaaggaggtgttcgacgaccccttgcttcccctcatggtcgacatcggctgcgggaatcttgatgtccagggagtgggaggttcttgatttggcacgcgaagaattctggcaagagtcaaaactaccttgggctagaaatccgccaaaagttggtggagcgggcacagttctgggtgaatgaattggagcttatctattttatgtttgcaaatgcaacgatgtcttttgagaaaatcatatcgtcataccctggtcccctgtcacttgtttcaatactgtgtcctgatccacacttcaaaaagagacatcacaaaagaagagttctgcagcaaccattggtcgattcaatcataaataatctatgtttaggcggacaggttttcatacaatcagatgtactggaagtagcggtagacatgagggaaaggtttgatgggtactctggtattttggcacatgttaattatgtcgatcaagatcttcagtgtgacaatgaaggatggcttctggacaacccaatgggaatccggacagagcgagaaatccatgcagagcttgaaggagcaacgatatacaggagggtgtaccaaaaggttagagatgcttctttctagctgtttatcagctacagaagttgtccgaggagtaaggtttccaagaatgttcattgcatgtatttcattaagagaagttgggaaaaaacaaagcatccaagtacaaagcctggcgaaccaaaacgaagagaagcccaagcagtaacacacctgatgtcttcctgcttgaaccatgccacaagttgcctttactacatcaagctgcattacatttctgacagtgcgcttgtgcacatctaatctttttttttcacctgatgcaatgagtcagattagccaatgcttttgatgaagatgacaactggcaaaagtgttcctttgttggtcaaattgtacttatggtgtttagcatcaggtgttgtcttcgttctgtccataattcaggtctggaattggtcaccatctatcggtatgcagagagtttgtagaggcaatccagatgaggcaatttgatgtgcgctaggattgttcaaactttggtccgctcaacgttctcttgacttggtagatatacaagaatggacaacgttttcttgacttggtaaagtttggtcattagtttgtgaaacagaatgctgcattgctcttggcatttgataagtgacaggtggataagacgacaccgaggtgtgggcactttttagtgtttgatgtttgctaagtcctctaccatcaggtcaatacatatgttaatcaatttgaataactccttaattgaaattttgttgctaatggtatcgaattaactcaccattgtattcggcgaataatgtttcgttgcaacacagtcatattgtactagtgatagctgatattgttgggttgcccgtgtattttgtaataagacacataaatatatgttctattggttagatgagtgtgaatgctaacaatcaag

SEQ ID NO: 51969 - DNA, 2630 bp, Zea Mays
gtcatcatgtgcctcgagactggaggattttcagtggctaacatgttgcatataaagctgacagttgatttacggagtacaaattatttttgggttccttttcaatcctctcatttgggccgagagaaggatagtgtcgtcgtagcccatgtcaattttgaggtcaaaagcatcggtccgtccactatccaagccccgaattacgtcacattctccaaaatggctgcgggtcgcacccggcgctcgtccctccctgccgcaaccaacgccaccgcttcggcgcttacccatcagatcagacagacaaacaaggcaaacgagaccctagcgcagcatggcttggacggctgcgggcacagtttgctggcgcctcctccgcctcccctccgtccgctgccctctctcgtcccgggcccggtgttccgctgcgcagagcctagacgccgtggacaaggagtatgccgacctcaacctccggcctctgtaccccaacgtctgtcgtcacccttcttctcttcgtccctacccccggtgctattccaatcttaccactgattcatctatgtacgcagaggggccatcacatgcgcatacggagcccacggggccgccagagtggaaggaggtgttcgacgaccccttgcttcccctcatggtcgacatcggctgcgggagtgggaggttcttgatttggcacgcgaagaattctggcaagagtcaaaactaccttgggctagaaatccgccaaaaggttttattggttttaggttttagcttgttaatttggtttctggattggatgatttttcctttttttaatgtataaatgcccggatctctgactttcagtttaagagagaaaagagaagatcagaacagttttagaaacaaagcactgggaacctcaagctcaagcagccccccgccccaaagcatgacacagcacacagactgcaccctcataacacggaacaaagataatgaactgcagaatcgcatgccatcatttcgctttcaaagacacttgctttgctgtttggaacaattctcgaagatgattcagtttcattctttcctgagtcccacattacatagattgccaggccgttgaaatattttggcataaaagatataagcgtatgccagtatcacacggtccattgcgcataatgcaattatcttgatgtggccagccccttaaatccaagttgtctgctgcagaattttgtcttgtataagtgtccaagcaaaccatttaaatgtgcctttgaactgcacccggtacttatgcattgttaaatttgtagtttggtgacactctacttgttttgtttctgtagttggtggagcgggcacagttctgggtgaatgaattggagcttatgtacgtgtaggttgcctggcatccgaatttggcacttgctctttcttatcagtgcagtaatgtagcatcacttgaaattattctctttcaacagctattttatgtttgcaaatgcaacgatgtcttttgagaaaatcatatcgtcataccctggtcccctgtcacttgtttcaatactgtgagatttcagatgtctattcgctggttttgtagtgtcctgatccacacttcaaaaagagacatcacaaaagaagagttctgcagcaaccattggtcgattcaatcataaataatctatgtttaggcggacaggttttcatacaatcagatgtactggaagtagcggtagacatgagggaaaggatggcttctggacaacccaatgggaatccggacagagcgagaaatccatgcagagcttgaaggagcaacgatatacaggagggtgtaccaaaaggttagagatgcttctttctagctgtttatcagctacagaagttgtccgaggagtaaggtttccaagaatgttcattgcatgtatttcattaagagaagttgggaaaaaacaaagcatccaagtacaaagcctggcgaaccaaaacgaagagaagcccaagcaattagccaatgcttttgatgaagatgacaactggcaaaagtgttcctttgttggtcaaattgtacttatggtgtttagcatcaggtgttgtcttcgttctgtccataattcaggtctggaattggtcaccatctatcggtatgcagagagtttgtagaggcaatccagatgaggcaatttgatgtgcgctaggattgttcaaactttggtccgctcaacgttctcttgacttggtagatatacaagaatggacaacgttttcttgacttggtaaagtttggtcattagtttgtgaaacagaatgctgcattgctcttggcatttgataagtgacaggtggataagacgacaccgaggtgtgggcactttttagtgtttgatgtttgctaagtcctctaccatcaggtcaatacatatgttaatcaatttgaataactccttaattgaaattttgttgctaatggtatcgaattaactcaccattgtattcggcgaataatgtttcgttgcaacacagtcatattgtactagtgatagctgatattgttgggttgcccgtgtattttgtaataagacacataaatatatgttctattggttagatgagtgtgaatgctaacaatcaag

SEQ ID NO: 51970 - DNA, 2174 bp, Zea Mays
gtcatcatgtgcctcgagactggaggattttcagtggctaacatgttgcatataaagctgacagttgatttacggagtacaaattatttttgggttccttttcaatcctctcatttgggccgagagaaggatagtgtcgtcgtagcccatgtcaattttgaggtcaaaagcatcggtccgtccactatccaagccccgaattacgtcacattctccaaaatggctgcgggtcgcacccggcgctcgtccctccctgccgcaaccaacgccaccgcttcggcgcttacccatcagatcagacagacaaacaaggcaaacgagaccctagcgcagcatggcttggacggctgcgggcacagtttgctggcgcctcctccgcctcccctccgtccgctgccctctctcgtcccgggcccggtgttccgctgcgcagagcctagacgccgtggacaaggagtatgccgacctcaacctccggcctctgtaccccaacgtctgtcgtcacccttcttctcttcgtccctacccccggtgctattccaatcttaccactgattcatctatgtacgcagaggggccatcacatgcgcatacggagcccacggggccgccagagtggaaggaggtgttcgacgaccccttgcttcccctcatggtcgacatcggctgcgggagtgggaggttcttgatttggcacgcgaagaattctggcaagagtcaaaactaccttgggctagaaatccgccaaaagaattttgtcttgtataagtgtccaagcaaaccatttaaatgtgcctttgaactgcacccgttggtggagcgggcacagttctgggtgaatgaattggagcttatctattttatgtttgcaaatgcaacgatgtcttttgagaaaatcatatcgtcataccctggtcccctgtcacttgtttcaatactgtgtcctgatccacacttcaaaaagagacatcacaaaagaagagttctgcagcaaccattggtcgattcaatcataaataatctatgtttaggcggacaggttttcatacaatcagatgtactggaagtagcggtagacatgagggaaaggtttgatgggtactctggtattttggcacatgttaattatgtcgatcaagatcttcagtgtgacaatgaaggatggcttctggacaacccaatgggaatccggacagagcgagaaatccatgcagagcttgaaggagcaacgatatacaggagggtgtaccaaaaggttagagatgcttctttctagctgtttatcagctacagaagttgtccgaggagtaaggtttccaagaatgttcattgcatgtatttcattaagagaagttgggaaaaaacaaagcatccaagtacaaagcctggcgaaccaaaacgaagagaagcccaagcagtaacacacctgatgtcttcctgcttgaaccatgccacaagttgcctttactacatcaagctgcattacatttctgacagtgcgcttgtgcacatctaatctttttttttcacctgatgcaatgagtcagattagccaatgcttttgatgaagatgacaactggcaaaagtgttcctttgttggtcaaattgtacttatggtgtttagcatcaggtgttgtcttcgttctgtccataattcaggtctggaattggtcaccatctatcggtatgcagagagtttgtagaggcaatccagatgaggcaatttgatgtgcgctaggattgttcaaactttggtccgctcaacgttctcttgacttggtagatatacaagaatggacaacgttttcttgacttggtaaagtttggtcattagtttgtgaaacagaatgctgcattgctcttggcatttgataagtgacaggtggataagacgacaccgaggtgtgggcactttttagtgtttgatgtttgctaagtcctctaccatcaggtcaatacatatgttaatcaatttgaataactccttaattgaaattttgttgctaatggtatcgaattaactcaccattgtattcggcgaataatgtttcgttgcaacacagtcatattgtactagtgatagctgatattgttgggttgcccgtgtattttgtaataagacacataaatatatgttctattggttagatgagtgtgaatgctaacaatcaag

SEQ ID NO: 51971 - DNA, 2543 bp, Zea Mays
gtcatcatgtgcctcgagactggaggattttcagtggctaacatgttgcatataaagctgacagttgatttacggagtacaaattatttttgggttccttttcaatcctctcatttgggccgagagaaggatagtgtcgtcgtagcccatgtcaattttgaggtcaaaagcatcggtccgtccactatccaagccccgaattacgtcacattctccaaaatggctgcgggtcgcacccggcgctcgtccctccctgccgcaaccaacgccaccgcttcggcgcttacccatcagatcagacagacaaacaaggcaaacgagaccctagcgcagcatggcttggacggctgcgggcacagtttgctggcgcctcctccgcctcccctccgtccgctgccctctctcgtcccgggcccggtgttccgctgcgcagagcctagacgccgtggacaaggagtatgccgacctcaacctccggcctctgtaccccaacgtctgtcgtcacccttcttctcttcgtccctacccccggtgctattccaatcttaccactgattcatctatgtacgcagaggggccatcacatgcgcatacggagcccacggggccgccagagtggaaggaggtgttcgacgaccccttgcttcccctcatggtcgacatcggctgcgggaatcttgatgtccagggagtgggaggttcttgatttggcacgcgaagaattctggcaagagtcaaaactaccttgggctagaaatccgccaaaaggttttattggttttaggttttagcttgttaatttggtttctggattggatgatttttcctttttttaatgtataaatgcccggatctctgactttcagtttaagagagaaaagagaagatcagaacagttttagaaacaaagcactgggaacctcaagctcaagcagccccccgccccaaagcatgacacagcacacagactgcaccctcataacacggaacaaagataatgaactgcagaatcgcatgccatcatttcgctttcaaagacacttgctttgctgtttggaacaattctcgaagatgattcagtttcattctttcctgagtcccacattacatagattgccaggccgttgaaatattttggcataaaagatataagcgtatgccagtatcacacggtccattgcgcataatgcaattatcttgatgtggccagccccttaaatccaagttgtctgctgcagaattttgtcttgtataagtgtccaagcaaaccatttaaatgtgcctttgaactgcacccggtacttatgcattgttaaatttgtagtttggtgacactctacttgttttgtttctgtagttggtggagcgggcacagttctgggtgaatgaattggagcttatgtacgttgtcctgatccacacttcaaaaagagacatcacaaaagaagagttctgcagcaaccattggtcgattcaatcataaataatctatgtttaggcggacaggttttcatacaatcagatgtactggaagtagcggtagacatgagggaaaggtttgatgggtactctggtattttggcacatgttaattatgtcgatcaagatcttcagtgtgacaatgaaggatggcttctggacaacccaatgggaatccggacagagcgagaaatccatgcagagcttgaaggagcaacgatatacaggagggtgtaccaaaagttgggaaaaaacaaagcatccaagtacaaagcctggcgaaccaaaacgaagagaagcccaagcagtaacacacctgatgtcttcctgcttgaaccatgccacaagttgcctttactacatcaagctgcattacatttctgacagtgcgcttgtgcacatctaatctttttttttcacctgatgcaatgagtcagattagccaatgcttttgatgaagatgacaactggcaaaagtgttcctttgttggtcaaattgtacttatggtgtttagcatcaggtgttgtcttcgttctgtccataattcaggtctggaattggtcaccatctatcggtatgcagagagtttgtagaggcaatccagatgaggcaatttgatgtgcgctaggattgttcaaactttggtccgctcaacgttctcttgacttggtagatatacaagaatggacaacgttttcttgacttggtaaagtttggtcattagtttgtgaaacagaatgctgcattgctcttggcatttgataagtgacaggtggataagacgacaccgaggtgtgggcactttttagtgtttgatgtttgctaagtcctctaccatcaggtcaatacatatgttaatcaatttgaataactccttaattgaaattttgttgctaatggtatcgaattaactcaccattgtattcggcgaataatgtttcgttgcaacacagtcatattgtactagtgatagctgatattgttgggttgcccgtgtattttgtaataagacacataaatatatgttctattggttagatgagtgtgaatgctaacaatcaag

SEQ ID NO: 51972 - DNA, 2416 bp, Zea Mays
gtcatcatgtgcctcgagactggaggattttcagtggctaacatgttgcatataaagctgacagttgatttacggagtacaaattatttttgggttccttttcaatcctctcatttgggccgagagaaggatagtgtcgtcgtagcccatgtcaattttgaggtcaaaagcatcggtccgtccactatccaagccccgaattacgtcacattctccaaaatggctgcgggtcgcacccggcgctcgtccctccctgccgcaaccaacgccaccgcttcggcgcttacccatcagatcagacagacaaacaaggcaaacgagaccctagcgcagcatggcttggacggctgcgggcacagtttgctggcgcctcctccgcctcccctccgtccgctgccctctctcgtcccgggcccggtgttccgctgcgcagagcctagacgccgtggacaaggagtatgccgacctcaacctccggcctctgtaccccaacgtctgtcgtcacccttcttctcttcgtccctacccccggtgctattccaatcttaccactgattcatctatgtacgcagaggggccatcacatgcgcatacggagcccacggggccgccagagtggaaggaggtgttcgacgaccccttgcttcccctcatggtcgacatcggctgcgggagtgggaggttcttgatttggcacgcgaagaattctggcaagagtcaaaactaccttgggctagaaatccgccaaaaggttttattggttttaggttttagcttgttaatttggtttctggattggatgatttttcctttttttaatgtataaatgcccggatctctgactttcagtttaagagagaaaagagaagatcagaacagttttagaaacaaagcactgggaacctcaagctcaagcagccccccgccccaaagcatgacacagcacacagactgcaccctcataacacggaacaaagataatgaactgcagaatcgcatgccatcatttcgctttcaaagacacttgctttgctgtttggaacaattctcgaagatgattcagtttcattctttcctgagtcccacattacatagattgccaggccgttgaaatattttggcataaaagatataagcgtatgccagtatcacacggtccattgcgcataatgcaattatcttgatgtggccagccccttaaatccaagttgtctgctgcagaattttgtcttgtataagtgtccaagcaaaccatttaaatgtgcctttgaactgcacccgttggtggagcgggcacagttctgggtgaatgaattggagcttatctattttatgtttgcaaatgcaacgatgtcttttgagaaaatcatatcgtcataccctggtcccctgtcacttgtttcaatactgtgtcctgatccacacttcaaaaagagacatcacaaaagaagagttctgcagcaaccattggtcgattcaatcataaataatctatgtttaggcggacaggttttcatacaatcagatgtactggaagtagcggtagacatgagggaaaggtttgatgggtactctggtattttggcacatgttaattatgtcgatcaagatcttcagtgtgacaatgaaggatggcttctggacaacccaatgggaatccggacagagcgagaaatccatgcagagcttgaaggagcaacgatatacaggagggtgtaccaaaagttgggaaaaaacaaagcatccaagtacaaagcctggcgaaccaaaacgaagagaagcccaagcaattagccaatgcttttgatgaagatgacaactggcaaaagtgttcctttgttggtcaaattgtacttatggtgtttagcatcaggtgttgtcttcgttctgtccataattcaggtctggaattggtcaccatctatcggtatgcagagagtttgtagaggcaatccagatgaggcaatttgatgtgcgctaggattgttcaaactttggtccgctcaacgttctcttgacttggtagatatacaagaatggacaacgttttcttgacttggtaaagtttggtcattagtttgtgaaacagaatgctgcattgctcttggcatttgataagtgacaggtggataagacgacaccgaggtgtgggcactttttagtgtttgatgtttgctaagtcctctaccatcaggtcaatacatatgttaatcaatttgaataactccttaattgaaattttgttgctaatggtatcgaattaactcaccattgtattcggcgaataatgtttcgttgcaacacagtcatattgtactagtgatagctgatattgttgggttgcccgtgtattttgtaataagacacataaatatatgttctattggttagatgagtgtgaatgctaacaatcaag

SEQ ID NO: 51973 - DNA, 2488 bp, Zea Mays
gtcatcatgtgcctcgagactggaggattttcagtggctaacatgttgcatataaagctgacagttgatttacggagtacaaattatttttgggttccttttcaatcctctcatttgggccgagagaaggatagtgtcgtcgtagcccatgtcaattttgaggtcaaaagcatcggtccgtccactatccaagccccgaattacgtcacattctccaaaatggctgcgggtcgcacccggcgctcgtccctccctgccgcaaccaacgccaccgcttcggcgcttacccatcagatcagacagacaaacaaggcaaacgagaccctagcgcagcatggcttggacggctgcgggcacagtttgctggcgcctcctccgcctcccctccgtccgctgccctctctcgtcccgggcccggtgttccgctgcgcagagcctagacgccgtggacaaggagtatgccgacctcaacctccggcctctgtaccccaacgtctgtcgtcacccttcttctcttcgtccctacccccggtgctattccaatcttaccactgattcatctatgtacgcagaggggccatcacatgcgcatacggagcccacggggccgccagagtggaaggaggtgttcgacgaccccttgcttcccctcatggtcgacatcggctgcgggagtgggaggttcttgatttggcacgcgaagaattctggcaagagtcaaaactaccttgggctagaaatccgccaaaaggttttattggttttaggttttagcttgttaatttggtttctggattggatgatttttcctttttttaatgtataaatgcccggatctctgactttcagtttaagagagaaaagagaagatcagaacagttttagaaacaaagcactgggaacctcaagctcaagcagccccccgccccaaagcatgacacagcacacagactgcaccctcataacacggaacaaagataatgaactgcagaatcgcatgccatcatttcgctttcaaagacacttgctttgctgtttggaacaattctcgaagatgattcagtttcattctttcctgagtcccacattacatagattgccaggccgttgaaatattttggcataaaagatataagcgtatgccagtatcacacggtccattgcgcataatgcaattatcttgatgtggccagccccttaaatccaagttgtctgctgcagaattttgtcttgtataagtgtccaagcaaaccatttaaatgtgcctttgaactgcacccggtacttatgcattgttaaatttgtagtttggtgacactctacttgttttgtttctgtagttggtggagcgggcacagttctgggtgaatgaattggagcttattgtcctgatccacacttcaaaaagagacatcacaaaagaagagttctgcagcaaccattggtcgattcaatcataaataatctatgtttaggcggacaggttttcatacaatcagatgtactggaagtagcggtagacatgagggaaaggtttgatgggtactctggtattttggcacatgttaattatgtcgatcaagatcttcagtgtgacaatgaaggatggcttctggacaacccaatgggaatccggacagagcgagaaatccatgcagagcttgaaggagcaacgatatacaggagggtgtaccaaaaggttagagatgcttctttctagctgtttatcagctacagaagttgtccgaggagtaaggtttccaagaatgttcattgcatgtatttcattaagagaagttgggaaaaaacaaagcatccaagtacaaagcctggcgaaccaaaacgaagagaagcccaagcaattagccaatgcttttgatgaagatgacaactggcaaaagtgttcctttgttggtcaaattgtacttatggtgtttagcatcaggtgttgtcttcgttctgtccataattcaggtctggaattggtcaccatctatcggtatgcagagagtttgtagaggcaatccagatgaggcaatttgatgtgcgctaggattgttcaaactttggtccgctcaacgttctcttgacttggtagatatacaagaatggacaacgttttcttgacttggtaaagtttggtcattagtttgtgaaacagaatgctgcattgctcttggcatttgataagtgacaggtggataagacgacaccgaggtgtgggcactttttagtgtttgatgtttgctaagtcctctaccatcaggtcaatacatatgttaatcaatttgaataactccttaattgaaattttgttgctaatggtatcgaattaactcaccattgtattcggcgaataatgtttcgttgcaacacagtcatattgtactagtgatagctgatattgttgggttgcccgtgtattttgtaataagacacataaatatatgttctattggttagatgagtgtgaatgctaacaatcaag

SEQ ID NO: 51974 - DNA, 3932 bp, Zea Mays
gagaaggacttgaatatgcagcgataagcaggcctctaccaattatacgtgggagagcaccatttaaactcaagatatctcagctctcttccaaatgtgacaataagctcttccgtattaaattctctacacttcacatgcaaagatattcttttctggaagcatattccaaaccgattcgctgtatatctcgaagccgcactgtccgccccttgggtcctacaaagcgggcgagttctgcaacagcaaatgaaattgacatgctcagtaatggccaagggtttgttagtactgacaaagtaaatagtcgtggacattcagtgtgtctgcatacgcccatgtttcccaagatagaaggtggaatggtggaggtagtagaggcccccaaaataaataagaatgccagaaaggtggtagtaagcaaagaagcacagaatgtcatagggactgattcctcaacatccaactatgacagttttgattcaggaagttcttggagtggatcagaaggagatgatggtattgaaaccttttcagacgctgtggttttcagatactgtctagacagcacatatgaccggtcaaagtttcttagaggtgcatctcttactgttaacaaagatgacttggtaaaacttgcagaccgagtctcgttatatagtggatgctcccaccacagaaaccaaatattaatgtcgaagagattgttcagagagggtgctgacacttggaacatgatctcaaagaacaatgaacgtgctctttggtcatctgccattccagagatcataacaaaatttacgaacattgtccattctgtgcgtaggggtttatcagagcaggatcttgaggttttaagaggcattgctggttgtggtgaggacataggaagagatgaatttgataggctatggtgctggttatacctagtggttgtttcattatcgagagagagaattaaaaagctgtgggattgcacagcacctagatggatagagggcttgattacaacagaagaagctgagaatgcactaagaagttccagggaattgttaaaggaggcaggaacatttgttctcagatttcctatcacccgaagctggccacatccagatgctggaagcctagttgtcaattacattggctctgatagctcaattcatcataggctactctctcttgattccagtgatgctagcgctgagaaactgcaagatttgctgctccaggaaccagaactatcacagttgggcaggtaaagcattatagactccaaatcacaggtgctattcctttcagtacttactaaatggtacatatattcaaatgcagggttgatcgggtctcaatcaccatccggagatgaccaaggcttcaaacggttaaacttacattcaaaagcaggatttaggatgctgccacgagaagagggtcaaaagcatccaagagcatagcccataacacccattgcctgttgttaccatgcacaggttgtaaattggttcccttcgtagttcgtacaaagaggatgttttgccgtactagtgaggtctagtctagttgcttcagaaaaccaacagtaacatcagctatcatgtgtgttgcaaaaagaaagaagctgtcatcatgtgcctcgagactggaggattttcagtggctaacatgttgcatataaagctgacagttgatttacggagtacaaattatttttgggttccttttcaatcctctcatttgggccgagagaaggatagtgtcgtcgtagcccatgtcaattttgaggtcaaaagcatcggtccgtccactatccaagccccgaattacgtcacattctccaaaatggctgcgggtcgcacccggcgctcgtccctccctgccgcaaccaacgccaccgcttcggcgcttacccatcagatcagacagacaaacaaggcaaacgagaccctagcgcagcatggcttggacggctgcgggcacagtttgctggcgcctcctccgcctcccctccgtccgctgccctctctcgtcccgggcccggtgttccgctgcgcagagcctagacgccgtggacaaggagtatgccgacctcaacctccggcctctgtaccccaacgtctgtcgtcacccttcttctcttcgtccctacccccggtgctattccaatcttaccactgattcatctatgtacgcagaggggccatcacatgcgcatacggagcccacggggccgccagagtggaaggaggtgttcgacgaccccttgcttcccctcatggtcgacatcggctgcgggagtgggaggttcttgatttggcacgcgaagaattctggcaagagtcaaaactaccttgggctagaaatccgccaaaagtttaagagagaaaagagaagatcagaacagttttagaaacaaagcactgggaacctcaagctcaagcagccccccgccccaaagcatgacacagcacacagactgcaccctcataacacggaacaaagataatgaactgcagaatcgcatgccatcatttcgctttcaaagacacttgctttgctgtttggaacaattctcgaagatgattcagtttcattctttcctgagtcccacattacatagattgccaggccgttgaaatattttggcataaaagatataagcgtatgccagtatcacacggtccattgcgcataatgcaattatcttgatgtggccagccccttaaatccaagttgtctgctgcagaattttgtcttgtataagtgtccaagcaaaccatttaaatgtgcctttgaactgcacccggtacttatgcattgttaaatttgtagtttggtgacactctacttgttttgtttctgtagttggtggagcgggcacagttctgggtgaatgaattggagcttatgtacgtctattttatgtttgcaaatgcaacgatgtcttttgagaaaatcatatcgtcataccctggtcccctgtcacttgtttcaatactgtgtcctgatccacacttcaaaaagagacatcacaaaagaagagttctgcagcaaccattggtcgattcaatcataaataatctatgtttaggcggacaggttttcatacaatcagatgtactggaagtagcggtagacatgagggaaaggatggcttctggacaacccaatgggaatccggacagagcgagaaatccatgcagagcttgaaggagcaacgatatacaggagggtgtaccaaaagttgggaaaaaacaaagcatccaagtacaaagcctggcgaaccaaaacgaagagaagcccaagcaattagccaatgcttttgatgaagatgacaactggcaaaagtgttcctttgttggtcaaattgtacttatggtgtttagcatcaggtgttgtcttcgttctgtccataattcaggtctggaattggtcaccatctatcggtatgcagagagtttgtagaggcaatccagatgaggcaatttgatgtgcgctaggattgttcaaactttggtccgctcaacgttctcttgacttggtagatatacaagaatggacaacgttttcttgacttggtaaagtttggtcattagtttgtgaaacagaatgctgcattgctcttggcatttgataagtgacaggtggataagacgacaccgaggtgtgggcactttttagtgtttgatgtttgctaagtcctctaccatcaggtcaatacatatgttaatcaatttgaataactccttaattgaaattttgttgctaatggtatcgaattaactcaccattgtattcggcgaataatgtttcgttgcaacacagtcatattgtactagtgatagctgatattgttgggttgcccgtgtattttgtaataagacacataaatatatgttctattggttagatgagtgtgaatgctaacaatcaag

SEQ ID NO: 51975 - DNA, 4195 bp, Zea Mays
atggcggcgccggaatcggaatgcggcgggagtgacggctaccgcgacctccgcggcgtgcgcgtcgacctggacacgggagcagccggagccgatgggggaggaggcttcgccgtctccttctggctctacctgtccgtctccgccagaccgtcctcagtgatcctccaccagatcacagcgggagatgacaccaagttgccgtttcttgctttaggtgaaggaaacaaactgcttctcttcccgttgatgaggctgcacagggaagctcctgctcctgctagttcctacccatggactgacacaaccaatctatcatctacgagtgtatgccctcttgagaaatggttccacattgggtgtgaggttactgaaaatgttatgtgtcttcacgttgatggtttcctaactgctgaggcccccctttgttcactgtttgatgagccagaccgtcaggatgattcaaaccaaattagcttagttggaaatgatggcaagcttgaaggctatatctataatattgaggtttcatatgtactaggagctataaaagaacaatacacaaagaacccaccttttaagttatctattgactattcatgctctgatggaatcgaagagggtgatgacggcatttggagcatcgttggtgggaagctctcttccaaatgtgacaataagctcttccgtattaaattctctacacttcacatgcaaagatattcttttctggaagcatattccaaaccgattcgctgtatatctcgaagccgcactgtccgccccttgggtcctacaaagcgggcgagttctgcaacagcaaatgaaattgacatgctcagtaatggccaagggtttgttagtactgacaaagtaaatagtcgtggacattcagtgtgtctgcatacgcccatgtttcccaagatagaaggtggaatggtggaggtagtagaggcccccaaaatagcatcacagaataagaatgccagaaaggtggtagtaagcaaagaagcacagaatgtcatagggactgattcctcaacatccaactatgacagttttgattcaggaagttcttggagtggatcagaaggagatgatggtattgaaaccttttcagacgctgtggttttcagatactgtctagacagcacatatgaccggtcaaagtttcttagaggtgcatctcttactgttaacaaagatgacttggtaaaacttgcagaccgagtctcgttatatagtggatgctcccaccacagaaaccaaatattaatgtcgaagagattgttcagagagggtgctgacacttggaacatgatctcaaagaacaatgaacgtgctctttggtcatctgccattccagagatcataacaaaatttacgaacattgtccattctgtgcgtaggggtttatcagagcaggatcttgaggttttaagaggcattgctggttgtggtgaggacataggaagagatgaatttgataggctatggtgctggttatacctagtggttgtttcattatcgagagagagaattaaaaagctgtgggattgcacagcacctagatggatagagggcttgattacaacagaagaagctgagaatgcactaagaagttccagggaattgttaaaggaggcaggaacatttgttctcagatttcctatcacccgaagctggccacatccagatgctggaagcctagttgtcaattacattggctctgatagctcaattcatcataggctactctctcttgattccagtgatgctagcgctgagaaactgcaagatttgctgctccaggaaccagaactatcacagttgggcagggttgatcgggtctcaatcaccatccggagatgaccaaggcttcaaacggttaaacttacattcaaaagcaggatttaggatgctgccacgagaagagggtcaaaagcatccaagagcatagcccataacacccattgcctgttgttaccatgcacaggttgtaaattggttcccttcgtagttcgtacaaagaggatgttttgccgtactagtgaggtctagtctagttgcttcagaaaaccaacagtaacatcagctatcatgtgtgttgcaaaaagaaagaagctgtcatcatgtgcctcgagactggaggattttcagtggctaacatgttgcatataaagctgacagttgatttacggagtacaaattatttttgggttccttttcaatcctctcatttgggccgagagaaggatagtgtcgtcgtagcccatgtcaattttgaggtcaaaagcatcggtccgtccactatccaagccccgaattacgtcacattctccaaaatggctgcgggtcgcacccggcgctcgtccctccctgccgcaaccaacgccaccgcttcggcgcttacccatcagatcagacagacaaacaaggcaaacgagaccctagcgcagcatggcttggacggctgcgggcacagtttgctggcgcctcctccgcctcccctccgtccgctgccctctctcgtcccgggcccggtgttccgctgcgcagagcctagacgccgtggacaaggagtatgccgacctcaacctccggcctctgtaccccaacaggggccatcacatgcgcatacggtagcacgtgaacccgctcagctcatccttctcggagcccacggggccgccagagtggaaggaggtgttcgacgaccccttgcttcccctcatggtcgacatcggctgcgggagtgggaggttcttgatttggcacgcgaagaattctggcaagagtcaaaactaccttgggctagaaatccgccaaaagttggtggagcgggcacagttctgggtgaatgaattggagcttatctattttatgtttgcaaatgcaacgatgtcttttgagaaaatcatatcgtcataccctggtcccctgtcacttgtttcaatactgtgtcctgatccacacttcaaaaagagacatcacaaaagaagagttctgcagcaaccattggtcgattcaatcataaataatctatgtttaggcggacaggttttcatacaatcagatgtactggaagtagcggtagacatgagggaaaggtttgatgggtactctggtattttggcacatgttaattatgtcgatcaagatcttcagtgtgacaatgaaggatggcttctggacaacccaatgggaatccggacagagcgagaaatccatgcagagcttgaaggagcaacgatatacaggagggtgtaccaaaaggttagagatgcttctttctagctgtttatcagctacagaagttgtccgaggagtaaggtttccaagaatgttcattgcatgtatttcattaagagaagttgggaaaaaacaaagcatccaagtacaaagcctggcgaaccaaaacgaagagaagcccaagcagtaacacacctgatgtcttcctgcttgaaccatgccacaagttgcctttactacatcaagctgcattacatttctgacagtgcgcttgtgcacatctaatctttttttttcacctgatgcaatgagtcagattagccaatgcttttgatgaagatgacaactggcaaaagtgttcctttgttggtcaaattgtacttatggtgtttagcatcaggtgttgtcttcgttctgtccataattcaggtctggaattggtcaccatctatcggtatgcagagagtttgtagaggcaatccagatgaggcaatttgatgtgcgctaggattgttcaaactttggtccgctcaacgttctcttgacttggtagatatacaagaatggacaacgttttcttgacttggtaaagtttggtcattagtttgtgaaacagaatgctgcattgctcttggcatttgataagtgacaggtggataagacgacaccgaggtgtgggcactttttagtgtttgatgtttgctaagtcctctaccatcaggtcaatacatatgttaatcaatttgaataactccttaattgaaattttgttgctaatggtatcgaattaactcaccattgtattcggcgaataatgtttcgttgcaacacagtcatattgtactagtgatagctgatattgttgggttgcccgtgtattttgtaataagacacataaatatatgttctattggttagatgagtgtgaatgctaacaatcaag

SEQ ID NO: 51976 - DNA, 4782 bp, Zea Mays
atggcggcgccggaatcggaatgcggcgggagtgacggctaccgcgacctccgcggcgtgcgcgtcgacctggacacgggagcagccggagccgatgggggaggaggcttcgccgtctccttctggctctacctgtccgtctccgccagaccgtcctcagtgatcctccaccagatcacagcgggagatgacaccaagttgccgtttcttgctttaggtgaaggaaacaaactgcttctcttcccgttgatgaggctgcacagggaagctcctgctcctgctagttcctacccatggactgacacaaccaatctatcatctacgagtgtatgccctcttgagaaatggttccacattgggtgtgaggttactgaaaatgttatgtgtcttcacgttgatggtttcctaactgctgaggcccccctttgttcactgtttgatgagccagaccgtcaggatgattcaaaccaaattagcttagttggaaatgatggcaagcttgaaggctatatctataatattgaggtttcatatgtactaggagctataaaagaacaatacacaaagaacccaccttttaagttatctattgactattcatgctctgatggaatcgaagagggtgatgacggcatttggagcatcgttggtgggaagctctcttccaaatgtgacaataagctcttccgtattaaattctctacacttcacatgcaaagatattcttttctggaagcatattccaaaccgattcgctgtatatctcgaagccgcactgtccgccccttgggtcctacaaagcgggcgagttctgcaacagcaaatgaaattgacatgctcagtaatggccaagggtttgttagtactgacaaagtaaatagtcgtggacattcagtgtgtctgcatacgcccatgtttcccaagatagaaggtggaatggtggaggtagtagaggcccccaaaatagcatcacagaataagaatgccagaaaggtggtagtaagcaaagaagcacagaatgtcatagggactgattcctcaacatccaactatgacagttttgattcaggaagttcttggagtggatcagaaggagatgatggtattgaaaccttttcagacgctgtggttttcagatactgtctagacagcacatatgaccggtcaaagtttcttagaggtgcatctcttactgttaacaaagatgacttggtaaaacttgcagaccgagtctcgttatatagtggatgctcccaccacagaaaccaaatattaatgtcgaagagattgttcagagagggtgctgacacttggaacatgatctcaaagaacaatgaacgtgctctttggtcatctgccattccagagatcataacaaaatttacgaacattgtccattctgtgcgtaggggtttatcagagcaggatcttgaggttttaagaggcattgctggttgtggtgaggacataggaagagatgaatttgataggctatggtgctggttatacctagtggttgtttcattatcgagagagagaattaaaaagctgtgggattgcacagcacctagatggatagagggcttgattacaacagaagaagctgagaatgcactaagaagttccagggaattgttaaaggaggcaggaacatttgttctcagatttcctatcacccgaagctggccacatccagatgctggaagcctagttgtcaattacattggctctgatagctcaattcatcataggctactctctcttgattccagtgatgctagcgctgagaaactgcaagatttgctgctccaggaaccagaactatcacagttgggcaggtaaagcattatagactccaaatcacaggtgctattcctttcagtacttactaaatggtacatatattcaaatgcagggttgatcgggtctcaatcaccatccggagatgaccaaggcttcaaacggttaaacttacattcaaaagcaggatttaggatgctgccacgagaagagggtcaaaagcatccaagagcatagcccataacacccattgcctgttgttaccatgcacaggttgtaaattggttcccttcgtagttcgtacaaagaggatgttttgccgtactagtgaggtctagtctagttgcttcagaaaaccaacagtaacatcagctatcatgtgtgttgcaaaaagaaagaagctgtcatcatgtgcctcgagactggaggattttcagtggctaacatgttgcatataaagctgacagttgatttacggagtacaaattatttttgggttccttttcaatcctctcatttgggccgagagaaggatagtgtcgtcgtagcccatgtcaattttgaggtcaaaagcatcggtccgtccactatccaagccccgaattacgtcacattctccaaaatggctgcgggtcgcacccggcgctcgtccctccctgccgcaaccaacgccaccgcttcggcgcttacccatcagatcagacagacaaacaaggcaaacgagaccctagcgcagcatggcttggacggctgcgggcacagtttgctggcgcctcctccgcctcccctccgtccgctgccctctctcgtcccgggcccggtgttccgctgcgcagagcctagacgccgtggacaaggagtatgccgacctcaacctccggcctctgtaccccaacaggggccatcacatgcgcatacggtagcacgtgaacccgctcagctcatccttctcggagcccacggggccgccagagtggaaggaggtgttcgacgaccccttgcttcccctcatggtcgacatcggctgcgggagtgggaggttcttgatttggcacgcgaagaattctggcaagagtcaaaactaccttgggctagaaatccgccaaaaggttttattggttttaggttttagcttgttaatttggtttctggattggatgatttttcctttttttaatgtataaatgcccggatctctgactttcagtttaagagagaaaagagaagatcagaacagttttagaaacaaagcactgggaacctcaagctcaagcagccccccgccccaaagcatgacacagcacacagactgcaccctcataacacggaacaaagataatgaactgcagaatcgcatgccatcatttcgctttcaaagacacttgctttgctgtttggaacaattctcgaagatgattcagtttcattctttcctgagtcccacattacatagattgccaggccgttgaaatattttggcataaaagatataagcgtatgccagtatcacacggtccattgcgcataatgcaattatcttgatgtggccagccccttaaatccaagttgtctgctgcagaattttgtcttgtataagtgtccaagcaaaccatttaaatgtgcctttgaactgcacccggtacttatgcattgttaaatttgtagtttggtgacactctacttgttttgtttctgtagttggtggagcgggcacagttctgggtgaatgaattggagcttatgtacgttgtcctgatccacacttcaaaaagagacatcacaaaagaagagttctgcagcaaccattggtcgattcaatcataaataatctatgtttaggcggacaggttttcatacaatcagatgtactggaagtagcggtagacatgagggaaaggtttgatgggtactctggtattttggcacatgttaattatgtcgatcaagatcttcagtgtgacaatgaaggatggcttctggacaacccaatgggaatccggacagagcgagaaatccatgcagagcttgaaggagcaacgatatacaggagggtgtaccaaaaggttagagatgcttctttctagctgtttatcagctacagaagttgtccgaggagtaaggtttccaagaatgttcattgcatgtatttcattaagagaagttgggaaaaaacaaagcatccaagtacaaagcctggcgaaccaaaacgaagagaagcccaagcagtaacacacctgatgtcttcctgcttgaaccatgccacaagttgcctttactacatcaagctgcattacatttctgacagtgcgcttgtgcacatctaatctttttttttcacctgatgcaatgagtcagattagccaatgcttttgatgaagatgacaactggcaaaagtgttcctttgttggtcaaattgtacttatggtgtttagcatcaggtgttgtcttcgttctgtccataattcaggtctggaattggtcaccatctatcggtatgcagagagtttgtagaggcaatccagatgaggcaatttgatgtgcgctaggattgttcaaactttggtccgctcaacgttctcttgacttggtagatatacaagaatggacaacgttttcttgacttggtaaagtttggtcattagtttgtgaaacagaatgctgcattgctcttggcatttgataagtgacaggtggataagacgacaccgaggtgtgggcactttttagtgtttgatgtttgctaagtcctctaccatcaggtcaatacatatgttaatcaatttgaataactccttaattgaaattttgttgctaatggtatcgaattaactcaccattgtattcggcgaataatgtttcgttgcaacacagtcatattgtactagtgatagctgatattgttgggttgcccgtgtattttgtaataagacacataaatatatgttctattggttagatgagtgtgaatgctaacaatcaag

SEQ ID NO: 51977 - DNA, 4798 bp, Zea Mays
atggcggcgccggaatcggaatgcggcgggagtgacggctaccgcgacctccgcggcgtgcgcgtcgacctggacacgggagcagccggagccgatgggggaggaggcttcgccgtctccttctggctctacctgtccgtctccgccagaccgtcctcagtgatcctccaccagatcacagcgggagatgacaccaagttgccgtttcttgctttaggtgaaggaaacaaactgcttctcttcccgttgatgaggctgcacagggaagctcctgctcctgctagttcctacccatggactgacacaaccaatctatcatctacgagtgtatgccctcttgagaaatggttccacattgggtgtgaggttactgaaaatgttatgtgtcttcacgttgatggtttcctaactgctgaggcccccctttgttcactgtttgatgagccagaccgtcaggatgattcaaaccaaattagcttagttggaaatgatggcaagcttgaaggctatatctataatattgaggtttcatatgtactaggagctataaaagaacaatacacaaagaacccaccttttaagttatctattgactattcatgctctgatggaatcgaagagggtgatgacggcatttggagcatcgttggtgggaagctctcttccaaatgtgacaataagctcttccgtattaaattctctacacttcacatgcaaagatattcttttctggaagcatattccaaaccgattcgctgtatatctcgaagccgcactgtccgccccttgggtcctacaaagcgggcgagttctgcaacagcaaatgaaattgacatgctcagtaatggccaagggtttgttagtactgacaaagtaaatagtcgtggacattcagtgtgtctgcatacgcccatgtttcccaagatagaaggtggaatggtggaggtagtagaggcccccaaaataaataagaatgccagaaaggtggtagtaagcaaagaagcacagaatgtcatagggactgattcctcaacatccaactatgacagttttgattcaggaagttcttggagtggatcagaaggagatgatggtattgaaaccttttcagacgctgtggttttcagatactgtctagacagcacatatgaccggtcaaagtttcttagaggtgcatctcttactgttaacaaagatgacttggtaaaacttgcagaccgagtctcgttatatagtggatgctcccaccacagaaaccaaatattaatgtcgaagagattgttcagagagggtgctgacacttggaacatgatctcaaagaacaatgaacgtgctctttggtcatctgccattccagagatcataacaaaatttacgaacattgtccattctgtgcgtaggggtttatcagagcaggatcttgaggttttaagaggcattgctggttgtggtgaggacataggaagagatgaatttgataggctatggtgctggttatacctagtggttgtttcattatcgagagagagaattaaaaagctgtgggattgcacagcacctagatggatagagggcttgattacaacagaagaagctgagaatgcactaagaagttccagggaattgttaaaggaggcaggaacatttgttctcagatttcctatcacccgaagctggccacatccagatgctggaagcctagttgtcaattacattggctctgatagctcaattcatcataggctactctctcttgattccagtgatgctagcgctgagaaactgcaagatttgctgctccaggaaccagaactatcacagttgggcaggtaaagcattatagactccaaatcacaggtgctattcctttcagtacttactaaatggtacatatattcaaatgcagggttgatcgggtctcaatcaccatccggagatgaccaaggcttcaaacggttaaacttacattcaaaagcaggatttaggatgctgccacgagaagagggtcaaaagcatccaagagcatagcccataacacccattgcctgttgttaccatgcacaggttgtaaattggttcccttcgtagttcgtacaaagaggatgttttgccgtactagtgaggtctagtctagttgcttcagaaaaccaacagtaacatcagctatcatgtgtgttgcaaaaagaaagaagctgtcatcatgtgcctcgagactggaggattttcagtggctaacatgttgcatataaagctgacagttgatttacggagtacaaattatttttgggttccttttcaatcctctcatttgggccgagagaaggatagtgtcgtcgtagcccatgtcaattttgaggtcaaaagcatcggtccgtccactatccaagccccgaattacgtcacattctccaaaatggctgcgggtcgcacccggcgctcgtccctccctgccgcaaccaacgccaccgcttcggcgcttacccatcagatcagacagacaaacaaggcaaacgagaccctagcgcagcatggcttggacggctgcgggcacagtttgctggcgcctcctccgcctcccctccgtccgctgccctctctcgtcccgggcccggtgttccgctgcgcagagcctagacgccgtggacaaggagtatgccgacctcaacctccggcctctgtaccccaacgtctgtcgtcacccttcttctcttcgtccctacccccggtgctattccaatcttaccactgattcatctatgtacgcagaggggccatcacatgcgcatacggtagcacgtgaacccgctcagctcatccttctcggagcccacggggccgccagagtggaaggaggtgttcgacgaccccttgcttcccctcatggtcgacatcggctgcgggaatcttgatgtccagggagtgggaggttcttgatttggcacgcgaagaattctggcaagagtcaaaactaccttgggctagaaatccgccaaaaggttttattggttttaggttttagcttgttaatttggtttctggattggatgatttttcctttttttaatgtataaatgcccggatctctgactttcagtttaagagagaaaagagaagatcagaacagttttagaaacaaagcactgggaacctcaagctcaagcagccccccgccccaaagcatgacacagcacacagactgcaccctcataacacggaacaaagataatgaactgcagaatcgcatgccatcatttcgctttcaaagacacttgctttgctgtttggaacaattctcgaagatgattcagtttcattctttcctgagtcccacattacatagattgccaggccgttgaaatattttggcataaaagatataagcgtatgccagtatcacacggtccattgcgcataatgcaattatcttgatgtggccagccccttaaatccaagttgtctgctgcagaattttgtcttgtataagtgtccaagcaaaccatttaaatgtgcctttgaactgcacccggtacttatgcattgttaaatttgtagtttggtgacactctacttgttttgtttctgtagttggtggagcgggcacagttctgggtgaatgaattggagcttatgtacgtgtaggttgcctggcatccgaatttggcacttgctctttcttatcagtgcagtaatgtagcatcacttgaaattattctctttcaacagctattttatgtttgcaaatgcaacgatgtcttttgagaaaatcatatcgtcataccctggtcccctgtcacttgtttcaatactgtgtcctgatccacacttcaaaaagagacatcacaaaagaagagttctgcagcaaccattggtcgattcaatcataaataatctatgtttaggcggacagatgtactggaagtagcggtagacatgagggaaaggtttgatgggtactctggtattttggcacatgttaattatgtcgatcaagatcttcagtgtgacaatgaaggatggcttctggacaacccaatgggaatccggacagagcgagaaatccatgcagagcttgaaggagcaacgatatacaggagggtgtaccaaaagttgggaaaaaacaaagcatccaagtacaaagcctggcgaaccaaaacgaagagaagcccaagcaattagccaatgcttttgatgaagatgacaactggcaaaagtgttcctttgttggtcaaattgtacttatggtgtttagcatcaggtgttgtcttcgttctgtccataattcaggtctggaattggtcaccatctatcggtatgcagagagtttgtagaggcaatccagatgaggcaatttgatgtgcgctaggattgttcaaactttggtccgctcaacgttctcttgacttggtagatatacaagaatggacaacgttttcttgacttggtaaagtttggtcattagtttgtgaaacagaatgctgcattgctcttggcatttgataagtgacaggtggataagacgacaccgaggtgtgggcactttttagtgtttgatgtttgctaagtcctctaccatcaggtcaatacatatgttaatcaatttgaataactccttaattgaaattttgttgctaatggtatcgaattaactcaccattgtattcggcgaataatgtttcgttgcaacacagtcatattgtactagtgatagctgatattgttgggttgcccgtgtattttgtaataagacacataaatatatgttctattggttagatgagtgtgaatgctaacaatcaag

SEQ ID NO: 51978 - DNA, 4602 bp, Zea Mays
atggcggcgccggaatcggaatgcggcgggagtgacggctaccgcgacctccgcggcgtgcgcgtcgacctggacacgggagcagccggagccgatgggggaggaggcttcgccgtctccttctggctctacctgtccgtctccgccagaccgtcctcagtgatcctccaccagatcacagcgggagatgacaccaagttgccgtttcttgctttaggtgaaggaaacaaactgcttctcttcccgttgatgaggctgcacagggaagctcctgctcctgctagttcctacccatggactgacacaaccaatctatcatctacgagtgtatgccctcttgagaaatggttccacattgggtgtgaggttactgaaaatgttatgtgtcttcacgttgatggtttcctaactgctgaggcccccctttgttcactgtttgatgagccagaccgtcaggatgattcaaaccaaattagcttagttggaaatgatggcaagcttgaaggctatatctataatattgaggtttcatatgtactaggagctataaaagaacaatacacaaagaacccaccttttaagttatctattgactattcatgctctgatggaatcgaagagggtgatgacggcatttggagcatcgttggtgggaagctctcttccaaatgtgacaataagctcttccgtattaaattctctacacttcacatgcaaagatattcttttctggaagcatattccaaaccgattcgctgtatatctcgaagccgcactgtccgccccttgggtcctacaaagcgggcgagttctgcaacagcaaatgaaattgacatgctcagtaatggccaagggtttgttagtactgacaaagtaaatagtcgtggacattcagtgtgtctgcatacgcccatgtttcccaagatagaaggtggaatggtggaggtagtagaggcccccaaaataaataagaatgccagaaaggtggtagtaagcaaagaagcacagaatgtcatagggactgattcctcaacatccaactatgacagttttgattcaggaagttcttggagtggatcagaaggagatgatggtattgaaaccttttcagacgctgtggttttcagatactgtctagacagcacatatgaccggtcaaagtttcttagaggtgcatctcttactgttaacaaagatgacttggtaaaacttgcagaccgagtctcgttatatagtggatgctcccaccacagaaaccaaatattaatgtcgaagagattgttcagagagggtgctgacacttggaacatgatctcaaagaacaatgaacgtgctctttggtcatctgccattccagagatcataacaaaatttacgaacattgtccattctgtgcgtaggggtttatcagagcaggatcttgaggttttaagaggcattgctggttgtggtgaggacataggaagagatgaatttgataggctatggtgctggttatacctagtggttgtttcattatcgagagagagaattaaaaagctgtgggattgcacagcacctagatggatagagggcttgattacaacagaagaagctgagaatgcactaagaagttccagggaattgttaaaggaggcaggaacatttgttctcagatttcctatcacccgaagctggccacatccagatgctggaagcctagttgtcaattacattggctctgatagctcaattcatcataggctactctctcttgattccagtgatgctagcgctgagaaactgcaagatttgctgctccaggaaccagaactatcacagttgggcagggttgatcgggtctcaatcaccatccggagatgaccaaggcttcaaacggttaaacttacattcaaaagcaggatttaggatgctgccacgagaagagggtcaaaagcatccaagagcatagcccataacacccattgcctgttgttaccatgcacaggttgtaaattggttcccttcgtagttcgtacaaagaggatgttttgccgtactagtgaggtctagtctagttgcttcagaaaaccaacagtaacatcagctatcatgtgtgttgcaaaaagaaagaagctgtcatcatgtgcctcgagactggaggattttcagtggctaacatgttgcatataaagctgacagttgatttacggagtacaaattatttttgggttccttttcaatcctctcatttgggccgagagaaggatagtgtcgtcgtagcccatgtcaattttgaggtcaaaagcatcggtccgtccactatccaagccccgaattacgtcacattctccaaaatggctgcgggtcgcacccggcgctcgtccctccctgccgcaaccaacgccaccgcttcggcgcttacccatcagatcagacagacaaacaaggcaaacgagaccctagcgcagcatggcttggacggctgcgggcacagtttgctggcgcctcctccgcctcccctccgtccgctgccctctctcgtcccgggcccggtgttccgctgcgcagagcctagacgccgtggacaaggagtatgccgacctcaacctccggcctctgtaccccaacaggggccatcacatgcgcatacggtagcacgtgaacccgctcagctcatccttctcggagcccacggggccgccagagtggaaggaggtgttcgacgaccccttgcttcccctcatggtcgacatcggctgcgggaatcttgatgtccagggagtgggaggttcttgatttggcacgcgaagaattctggcaagagtcaaaactaccttgggctagaaatccgccaaaagtttaagagagaaaagagaagatcagaacagttttagaaacaaagcactgggaacctcaagctcaagcagccccccgccccaaagcatgacacagcacacagactgcaccctcataacacggaacaaagataatgaactgcagaatcgcatgccatcatttcgctttcaaagacacttgctttgctgtttggaacaattctcgaagatgattcagtttcattctttcctgagtcccacattacatagattgccaggccgttgaaatattttggcataaaagatataagcgtatgccagtatcacacggtccattgcgcataatgcaattatcttgatgtggccagccccttaaatccaagttgtctgctgcagaattttgtcttgtataagtgtccaagcaaaccatttaaatgtgcctttgaactgcacccggtacttatgcattgttaaatttgtagtttggtgacactctacttgttttgtttctgtagttggtggagcgggcacagttctgggtgaatgaattggagcttatgtacgtctattttatgtttgcaaatgcaacgatgtcttttgagaaaatcatatcgtcataccctggtcccctgtcacttgtttcaatactgtgtcctgatccacacttcaaaaagagacatcacaaaagaagagttctgcagcaaccattggtcgattcaatcataaataatctatgtttaggcggacaggttttcatacaatcagatgtactggaagtagcggtagacatgagggaaaggtttgatgggtactctggtattttggcacatgttaattatgtcgatcaagatcttcagtgtgacaatgaaggatggcttctggacaacccaatgggaatccggacagagcgagaaatccatgcagagcttgaaggagcaacgatatacaggagggtgtaccaaaagttgggaaaaaacaaagcatccaagtacaaagcctggcgaaccaaaacgaagagaagcccaagcagtaacacacctgatgtcttcctgcttgaaccatgccacaagttgcctttactacatcaagctgcattacatttctgacagtgcgcttgtgcacatctaatctttttttttcacctgatgcaatgagtcagattagccaatgcttttgatgaagatgacaactggcaaaagtgttcctttgttggtcaaattgtacttatggtgtttagcatcaggtgttgtcttcgttctgtccataattcaggtctggaattggtcaccatctatcggtatgcagagagtttgtagaggcaatccagatgaggcaatttgatgtgcgctaggattgttcaaactttggtccgctcaacgttctcttgacttggtagatatacaagaatggacaacgttttcttgacttggtaaagtttggtcattagtttgtgaaacagaatgctgcattgctcttggcatttgataagtgacaggtggataagacgacaccgaggtgtgggcactttttagtgtttgatgtttgctaagtcctctaccatcaggtcaatacatatgttaatcaatttgaataactccttaattgaaattttgttgctaatggtatcgaattaactcaccattgtattcggcgaataatgtttcgttgcaacacagtcatattgtactagtgatagctgatattgttgggttgcccgtgtattttgtaataagacacataaatatatgttctattggttagatgagtgtgaatgctaacaatcaag

SEQ ID NO: 51979 - DNA, 4416 bp, Zea Mays
atggcggcgccggaatcggaatgcggcgggagtgacggctaccgcgacctccgcggcgtgcgcgtcgacctggacacgggagcagccggagccgatgggggaggaggcttcgccgtctccttctggctctacctgtccgtctccgccagaccgtcctcagtgatcctccaccagatcacagcgggagatgacaccaagttgccgtttcttgctttaggtgaaggaaacaaactgcttctcttcccgttgatgaggctgcacagggaagctcctgctcctgctagttcctacccatggactgacacaaccaatctatcatctacgagtgtatgccctcttgagaaatggttccacattgggtgtgaggttactgaaaatgttatgtgtcttcacgttgatggtttcctaactgctgaggcccccctttgttcactgtttgatgagccagaccgtcaggatgattcaaaccaaattagcttagttggaaatgatggcaagcttgaaggctatatctataatattgaggtttcatatgtactaggagctataaaagaacaatacacaaagaacccaccttttaagttatctattgactattcatgctctgatggaatcgaagagggtgatgacggcatttggagcatcgttggtgggaagctctcttccaaatgtgacaataagctcttccgtattaaattctctacacttcacatgcaaagatattcttttctggaagcatattccaaaccgattcgctgtatatctcgaagccgcactgtccgccccttgggtcctacaaagcgggcgagttctgcaacagcaaatgaaattgacatgctcagtaatggccaagggtttgttagtactgacaaagtaaatagtcgtggacattcagtgtgtctgcatacgcccatgtttcccaagatagaaggtggaatggtggaggtagtagaggcccccaaaatagcatcacagaataagaatgccagaaaggtggtagtaagcaaagaagcacagaatgtcatagggactgattcctcaacatccaactatgacagttttgattcaggaagttcttggagtggatcagaaggagatgatggtattgaaaccttttcagacgctgtggttttcagatactgtctagacagcacatatgaccggtcaaagtttcttagaggtgcatctcttactgttaacaaagatgacttggtaaaacttgcagaccgagtctcgttatatagtggatgctcccaccacagaaaccaaatattaatgtcgaagagattgttcagagagggtgctgacacttggaacatgatctcaaagaacaatgaacgtgctctttggtcatctgccattccagagatcataacaaaatttacgaacattgtccattctgtgcgtaggggtttatcagagcaggatcttgaggttttaagaggcattgctggttgtggtgaggacataggaagagatgaatttgataggctatggtgctggttatacctagtggttgtttcattatcgagagagagaattaaaaagctgtgggattgcacagcacctagatggatagagggcttgattacaacagaagaagctgagaatgcactaagaagttccagggaattgttaaaggaggcaggaacatttgttctcagatttcctatcacccgaagctggccacatccagatgctggaagcctagttgtcaattacattggctctgatagctcaattcatcataggctactctctcttgattccagtgatgctagcgctgagaaactgcaagatttgctgctccaggaaccagaactatcacagttgggcagggttgatcgggtctcaatcaccatccggagatgaccaaggcttcaaacggttaaacttacattcaaaagcaggatttaggatgctgccacgagaagagggtcaaaagcatccaagagcatagcccataacacccattgcctgttgttaccatgcacaggttgtaaattggttcccttcgtagttcgtacaaagaggatgttttgccgtactagtgaggtctagtctagttgcttcagaaaaccaacagtaacatcagctatcatgtgtgttgcaaaaagaaagaagctgtcatcatgtgcctcgagactggaggattttcagtggctaacatgttgcatataaagctgacagttgatttacggagtacaaattatttttgggttccttttcaatcctctcatttgggccgagagaaggatagtgtcgtcgtagcccatgtcaattttgaggtcaaaagcatcggtccgtccactatccaagccccgaattacgtcacattctccaaaatggctgcgggtcgcacccggcgctcgtccctccctgccgcaaccaacgccaccgcttcggcgcttacccatcagatcagacagacaaacaaggcaaacgagaccctagcgcagcatggcttggacggctgcgggcacagtttgctggcgcctcctccgcctcccctccgtccgctgccctctctcgtcccgggcccggtgttccgctgcgcagagcctagacgccgtggacaaggagtatgccgacctcaacctccggcctctgtaccccaacaggggccatcacatgcgcatacggtagcacgtgaacccgctcagctcatccttctcggagcccacggggccgccagagtggaaggaggtgttcgacgaccccttgcttcccctcatggtcgacatcggctgcgggaatcttgatgtccagggagtgggaggttcttgatttggcacgcgaagaattctggcaagagtcaaaactaccttgggctagaaatccgccaaaagtttaagagagaaaagagaagatcagaacagttttagaaacaaagcactgggaacctcaagctcaagcagccccccgccccaaagcatgacacagcacacagactgcaccctcataacacggaacaaagataatgaactgcagaatcgcatgccatcatttcgctttcaaagacacttgctttgctgtttggaacaattctcgaagatgattcagtttcattctttcctgagtcccacattacatagattgccaggccgttgaaatattttggcataaaagatataagcgtatgccagtatcacacggtccattgcgcataatgcaattatcttgatgtggccagccccttaaatccaagttgtctgctgcagaattttgtcttgtataagtgtccaagcaaaccatttaaatgtgcctttgaactgcacccgttggtggagcgggcacagttctgggtgaatgaattggagcttatctattttatgtttgcaaatgcaacgatgtcttttgagaaaatcatatcgtcataccctggtcccctgtcacttgtttcaatactgtgtcctgatccacacttcaaaaagagacatcacaaaagaagagttctgcagcaaccattggtcgattcaatcataaataatctatgtttaggcggacaggttttcatacaatcagatgtactggaagtagcggtagacatgagggaaaggtttgatgggtactctggtattttggcacatgttaattatgtcgatcaagatcttcagtgtgacaatgaaggatggcttctggacaacccaatgggaatccggacagagcgagaaatccatgcagagcttgaaggagcaacgatatacaggagggtgtaccaaaagttgggaaaaaacaaagcatccaagtacaaagcctggcgaaccaaaacgaagagaagcccaagcaattagccaatgcttttgatgaagatgacaactggcaaaagtgttcctttgttggtcaaattgtacttatggtgtttagcatcaggtgttgtcttcgttctgtccataattcaggtctggaattggtcaccatctatcggtatgcagagagtttgtagaggcaatccagatgaggcaatttgatgtgcgctaggattgttcaaactttggtccgctcaacgttctcttgacttggtagatatacaagaatggacaacgttttcttgacttggtaaagtttggtcattagtttgtgaaacagaatgctgcattgctcttggcatttgataagtgacaggtggataagacgacaccgaggtgtgggcactttttagtgtttgatgtttgctaagtcctctaccatcaggtcaatacatatgttaatcaatttgaataactccttaattgaaattttgttgctaatggtatcgaattaactcaccattgtattcggcgaataatgtttcgttgcaacacagtcatattgtactagtgatagctgatattgttgggttgcccgtgtattttgtaataagacacataaatatatgttctattggttagatgagtgtgaatgctaacaatcaag

SEQ ID NO: 51980 - DNA, 4769 bp, Zea Mays
atggcggcgccggaatcggaatgcggcgggagtgacggctaccgcgacctccgcggcgtgcgcgtcgacctggacacgggagcagccggagccgatgggggaggaggcttcgccgtctccttctggctctacctgtccgtctccgccagaccgtcctcagtgatcctccaccagatcacagcgggagatgacaccaagttgccgtttcttgctttaggtgaaggaaacaaactgcttctcttcccgttgatgaggctgcacagggaagctcctgctcctgctagttcctacccatggactgacacaaccaatctatcatctacgagtgtatgccctcttgagaaatggttccacattgggtgtgaggttactgaaaatgttatgtgtcttcacgttgatggtttcctaactgctgaggcccccctttgttcactgtttgatgagccagaccgtcaggatgattcaaaccaaattagcttagttggaaatgatggcaagcttgaaggctatatctataatattgaggtttcatatgtactaggagctataaaagaacaatacacaaagaacccaccttttaagttatctattgactattcatgctctgatggaatcgaagagggtgatgacggcatttggagcatcgttggtgggaagctctcttccaaatgtgacaataagctcttccgtattaaattctctacacttcacatgcaaagatattcttttctggaagcatattccaaaccgattcgctgtatatctcgaagccgcactgtccgccccttgggtcctacaaagcgggcgagttctgcaacagcaaatgaaattgacatgctcagtaatggccaagggtttgttagtactgacaaagtaaatagtcgtggacattcagtgtgtctgcatacgcccatgtttcccaagatagaaggtggaatggtggaggtagtagaggcccccaaaatagcatcacagaataagaatgccagaaaggtggtagtaagcaaagaagcacagaatgtcatagggactgattcctcaacatccaactatgacagttttgattcaggaagttcttggagtggatcagaaggagatgatggtattgaaaccttttcagacgctgtggttttcagatactgtctagacagcacatatgaccggtcaaagtttcttagaggtgcatctcttactgttaacaaagatgacttggtaaaacttgcagaccgagtctcgttatatagtggatgctcccaccacagaaaccaaatattaatgtcgaagagattgttcagagagggtgctgacacttggaacatgatctcaaagaacaatgaacgtgctctttggtcatctgccattccagagatcataacaaaatttacgaacattgtccattctgtgcgtaggggtttatcagagcaggatcttgaggttttaagaggcattgctggttgtggtgaggacataggaagagatgaatttgataggctatggtgctggttatacctagtggttgtttcattatcgagagagagaattaaaaagctgtgggattgcacagcacctagatggatagagggcttgattacaacagaagaagctgagaatgcactaagaagttccagggaattgttaaaggaggcaggaacatttgttctcagatttcctatcacccgaagctggccacatccagatgctggaagcctagttgtcaattacattggctctgatagctcaattcatcataggctactctctcttgattccagtgatgctagcgctgagaaactgcaagatttgctgctccaggaaccagaactatcacagttgggcaggtaaagcattatagactccaaatcacaggtgctattcctttcagtacttactaaatggtacatatattcaaatgcagggttgatcgggtctcaatcaccatccggagatgaccaaggcttcaaacggttaaacttacattcaaaagcaggatttaggatgctgccacgagaagagggtcaaaagcatccaagagcatagcccataacacccattgcctgttgttaccatgcacaggttgtaaattggttcccttcgtagttcgtacaaagaggatgttttgccgtactagtgaggtctagtctagttgcttcagaaaaccaacagtaacatcagctatcatgtgtgttgcaaaaagaaagaagctgtcatcatgtgcctcgagactggaggattttcagtggctaacatgttgcatataaagctgacagttgatttacggagtacaaattatttttgggttccttttcaatcctctcatttgggccgagagaaggatagtgtcgtcgtagcccatgtcaattttgaggtcaaaagcatcggtccgtccactatccaagccccgaattacgtcacattctccaaaatggctgcgggtcgcacccggcgctcgtccctccctgccgcaaccaacgccaccgcttcggcgcttacccatcagatcagacagacaaacaaggcaaacgagaccctagcgcagcatggcttggacggctgcgggcacagtttgctggcgcctcctccgcctcccctccgtccgctgccctctctcgtcccgggcccggtgttccgctgcgcagagcctagacgccgtggacaaggagtatgccgacctcaacctccggcctctgtaccccaacaggggccatcacatgcgcatacggtagcacgtgaacccgctcagctcatccttctcggagcccacggggccgccagagtggaaggaggtgttcgacgaccccttgcttcccctcatggtcgacatcggctgcgggagtgggaggttcttgatttggcacgcgaagaattctggcaagagtcaaaactaccttgggctagaaatccgccaaaagtttaagagagaaaagagaagatcagaacagttttagaaacaaagcactgggaacctcaagctcaagcagccccccgccccaaagcatgacacagcacacagactgcaccctcataacacggaacaaagataatgaactgcagaatcgcatgccatcatttcgctttcaaagacacttgctttgctgtttggaacaattctcgaagatgattcagtttcattctttcctgagtcccacattacatagattgccaggccgttgaaatattttggcataaaagatataagcgtatgccagtatcacacggtccattgcgcataatgcaattatcttgatgtggccagccccttaaatccaagttgtctgctgcagaattttgtcttgtataagtgtccaagcaaaccatttaaatgtgcctttgaactgcacccggtacttatgcattgttaaatttgtagtttggtgacactctacttgttttgtttctgtagttggtggagcgggcacagttctgggtgaatgaattggagcttatgtacgtctattttatgtttgcaaatgcaacgatgtcttttgagaaaatcatatcgtcataccctggtcccctgtcacttgtttcaatactgtgtcctgatccacacttcaaaaagagacatcacaaaagaagagttctgcagcaaccattggtcgattcaatcataaataatctatgtttaggcggacaggttttcatacaatcagatgtactggaagtagcggtagacatgagggaaaggtttgatgggtactctggtattttggcacatgttaattatgtcgatcaagatcttcagtgtgacaatgaaggatggcttctggacaacccaatgggaatccggacagagcgagaaatccatgcagagcttgaaggagcaacgatatacaggagggtgtaccaaaaggttagagatgcttctttctagctgtttatcagctacagaagttgtccgaggagtaaggtttccaagaatgttcattgcatgtatttcattaagagaagttgggaaaaaacaaagcatccaagtacaaagcctggcgaaccaaaacgaagagaagcccaagcagtaacacacctgatgtcttcctgcttgaaccatgccacaagttgcctttactacatcaagctgcattacatttctgacagtgcgcttgtgcacatctaatctttttttttcacctgatgcaatgagtcagattagccaatgcttttgatgaagatgacaactggcaaaagtgttcctttgttggtcaaattgtacttatggtgtttagcatcaggtgttgtcttcgttctgtccataattcaggtctggaattggtcaccatctatcggtatgcagagagtttgtagaggcaatccagatgaggcaatttgatgtgcgctaggattgttcaaactttggtccgctcaacgttctcttgacttggtagatatacaagaatggacaacgttttcttgacttggtaaagtttggtcattagtttgtgaaacagaatgctgcattgctcttggcatttgataagtgacaggtggataagacgacaccgaggtgtgggcactttttagtgtttgatgtttgctaagtcctctaccatcaggtcaatacatatgttaatcaatttgaataactccttaattgaaattttgttgctaatggtatcgaattaactcaccattgtattcggcgaataatgtttcgttgcaacacagtcatattgtactagtgatagctgatattgttgggttgcccgtgtattttgtaataagacacataaatatatgttctattggttagatgagtgtgaatgctaacaatcaag

SEQ ID NO: 51981 - DNA, 3734 bp, Zea Mays
atggcggcgccggaatcggaatgcggcgggagtgacggctaccgcgacctccgcggcgtgcgcgtcgacctggacacgggagcagccggagccgatgggggaggaggcttcgccgtctccttctggctctacctgtccgtctccgccagaccgtcctcagtgatcctccaccagatcacagcgggagatgacaccaagttgccgtttcttgctttaggtgaaggaaacaaactgcttctcttcccgttgatgaggctgcacagggaagctcctgctcctgctagttcctacccatggactgacacaaccaatctatcatctacgagtgtatgccctcttgagaaatggttccacattgggtgtgaggttactgaaaatgttatgtgtcttcacgttgatggtttcctaactgctgaggcccccctttgttcactgtttgatgagccagaccgtcaggatgattcaaaccaaattagcttagttggaaatgatggcaagcttgaaggctatatctataatattgaggtttcatatgtactaggagctataaaagaacaatacacaaagaacccaccttttaagttatctattgactattcatgctctgatggaatcgaagagggtgatgacggcatttggagcatcgttggtgggaagctctcttccaaatgtgacaataagctcttccgtattaaattctctacacttcacatgcaaagatattcttttctggaagcatattccaaaccgattcgctgtatatctcgaagccgcactgtccgccccttgggtcctacaaagcgggcgagttctgcaacagcaaatgaaattgacatgctcagtaatggccaagggtttgttagtactgacaaagtaaatagtcgtggacattcagtgtgtctgcatacgcccatgtttcccaagatagaaggtggaatggtggaggtagtagaggcccccaaaataaataagaatgccagaaaggtggtagtaagcaaagaagcacagaatgtcatagggactgattcctcaacatccaactatgacagttttgattcaggaagttcttggagtggatcagaaggagatgatggtattgaaaccttttcagacgctgtggttttcagatactgtctagacagcacatatgaccggtcaaagtttcttagaggtgcatctcttactgttaacaaagatgacttggtaaaacttgcagaccgagtctcgttatatagtggatgctcccaccacagaaaccaaatattaatgtcgaagagattgttcagagagggtgctgacacttggaacatgatctcaaagaacaatgaacgtgctctttggtcatctgccattccagagatcataacaaaatttacgaacattgtccattctgtgcgtaggggtttatcagagcaggatcttgaggttttaagaggcattgctggttgtggtgaggacataggaagagatgaatttgataggctatggtgctggttatacctagtggttgtttcattatcgagagagagaattaaaaagctgtgggattgcacagcacctagatggatagagggcttgattacaacagaagaagctgagaatgcactaagaagttccagggaattgttaaaggaggcaggaacatttgttctcagatttcctatcacccgaagctggccacatccagatgctggaagcctagttgtcaattacattggctctgatagctcaattcatcataggctactctctcttgattccagtgatgctagcgctgagaaactgcaagatttgctgctccaggaaccagaactatcacagttgggcaggtaaagcattatagactccaaatcacaggtgctattcctttcagtacttactaaatggtacatatattcaaatgcagggttgatcgggtctcaatcaccatccggagatgaccaaggcttcaaacggttaaacttacattcaaaagcaggatttaggatgctgccacgagaagagggtcaaaagcatccaagagcatagcccataacacccattgcctgttgttaccatgcacaggttgtaaattggttcccttcgtagttcgtacaaagaggatgttttgccgtactagtgaggtctagtctagttgcttcagaaaaccaacagtaacatcagctatcatgtgtgttgcaaaaagaaagaagctgtcatcatgtgcctcgagactggaggattttcagtggctaacatgttgcatataaagctgacagttgatttacggagtacaaattatttttgggttccttttcaatcctctcatttgggccgagagaaggatagtgtcgtcgtagcccatgtcaattttgaggtcaaaagcatcggtccgtccactatccaagccccgaattacgtcacattctccaaaatggctgcgggtcgcacccggcgctcgtccctccctgccgcaaccaacgccaccgcttcggcgcttacccatcagatcagacagacaaacaaggcaaacgagaccctagcgcagcatggcttggacggctgcgggcacagtttgctggcgcctcctccgcctcccctccgtccgctgccctctctcgtcccgggcccggtgttccgctgcgcagagcctagacgccgtggacaaggagtatgccgacctcaacctccggcctctgtaccccaacaggggccatcacatgcgcatacggtagcacgtgaacccgctcagctcatccttctcggagcccacggggccgccagagtggaaggaggtgttcgacgaccccttgcttcccctcatggtcgacatcggctgcgggagtgggaggttcttgatttggcacgcgaagaattctggcaagagtcaaaactaccttgggctagaaatccgccaaaaggttttattggttttaggttttagcttgttaatttggtttctggattggatgatttttcctttttttaatgtataaatgcccggatctctgactttcagtttaagagagaaaagagaagatcagaacagttttagaaacaaagcactgggaacctcaagctcaagcagccccccgccccaaagcatgacacagcacacagactgcaccctcataacacggaacaaagataatgaactgcagaatcgcatgccatcatttcgctttcaaagacacttgctttgctgtttggaacaattctcgaagatgattcagtttcattctttcctgagtcccacattacatagattgccaggccgttgaaatattttggcataaaagatataagcgtatgccagtatcacacggtccattgcgcataatgcaattatcttgatgtggccagccccttaaatccaagttgtctgctgcagaattttgtcttgtataagtgtccaagcaaaccatttaaatgtgcctttgaactgcacccggtacttatgcattgttaaatttgtagtttggtgacactctacttgttttgtttctgtagttggtggagcgggcacagttctgggtgaatgaattggagcttatgtacgtgtaggttgcctggcatccgaatttggcacttgctctttcttatcagtgcagtaatgtagcatcacttgaaattattctctttcaacagctattttatgtttgcaaatgcaacgatgtcttttgagaaaatcatatcgtcataccctggtcccctgtcacttgtttcaatactgatgtctattcgctggttttgta

SEQ ID NO: 51982 - DNA, 5201 bp, Zea Mays
gaacgacgtgtcactttcatgagttcgtagtgttgagttccatatcccgtgtcactttcaggagtatatagtgttgcgttcctgatccatgttgagttctaaacgatggtgtggcgttcctaatcagtattgagttgggcgcatgttgattttgggaggacccacgggcgaacgacgtgtcactttcatgagttatagtgttgatttttgaaggacccacgagccgaaccccgtgtcactttcatgaggtatagtgttgggttcgtgctcagtgtggcgttcgacactatggtgttgcgttcctccaatctgttgggtttcagggtcccatgttgatttttggcaggacccgcagtctgaagcccgtgtcactttccggagtctacagtgttgcgttctgaatactagtgttatgttccatgtcccgtgtcactttctggagtctaccgtggcgctcctgctaagtgttgagtcagatttgcggatgttgattttgggaggacccacgggtgaagggcgtgtcactttcatgaggtatagtgttgggctccttctcagtgttgtgttcggaactatgctgttgcgttccttcaaggtgttgagtttcagggtcccatgttgatttttgggagttatagtgttgagtttcagggtcccttttagactggaaaagtcttctgccataatcgtcagatttacctaaatgatgtaaaaaatggtttggaaaactctaaaacattaaataaagatcacataacattaattaataaaaaatgatataatacacaaacattaagtaagaattatagaaagttgaggcaccagtttgtatgcaggattcttcctcctaagatgtggaaagctaattagttttaaaccataatccacctcaatatatatgaattaaagtgcatagatgtggcaacaacgttgaagataaacatctatttgtacagcaaacgcaggcttcccaaagcggcatggtcagttcgagctcgccctggggatgccgccgctctgcccatcgcagacgccgtggagcatcgacggcgacgtcgcaggacatgaggtcgcctaccagctggtgacccgaaacacccaggcggcccgccgccacgtcgagataacggccctgacggtgccgacattttggggcagcgggcattgcccggagccgctcgtcatcctaagaaagggcagcacggtggcctgctagtacgtgacgggatctggcagcgcagggaacggagggacagacggcaagagcatgcaccacatcgacgtgaacatggagtgagcgagccaacggagaaatggcgatgggaatggaggtgcagctggtgggagcagttggcacgccgatgaccggacgaagcaagtgaggcaagggatggacgtcgcacttcaatacgtgcctggcggcaccgacattccgatgcagcggctacccccggagccactcgtcgtccatgaaaagggcgacgaactggcctggcaagatctggcggcgcggggatcgaatggacggacgacaagagcgagcgaagaagtcctggcggcttggtgagaaaatggtggcgctgggggcgatgggaacggaggtgcggatggtggcagcagtggagaatgaagcgacggcgacgtcgagactgattgtcgtcgtccgcggccatggggcggagcaccttccggagaagtcgagacttatacgattaaaaaagggaaccgcctcaccgattctgatgtcgaaggtaacctggtgccgatccgcaggggtgaagaagaaagccaacatgccacaggggaagagtaagaagaacgtggtgaaggagaaagccaaaaagattaagaagaacgcggaatcgagagccaaagttcatgaaaatacagatcaaattgagatcaacattagagaaggtgtttcaatttggataacaaaggctgcagtgcaaaaatgttttgagtttccccctggtacagataagaagctgccaatagatccaactacaaaaacatttgattcactctacagagtattgagtgtttcagaaaaaaaaatcaatgtaaagaagaagaagatgaaggagaatatgaaggagaagcaggttgaggaggagaagattgagatgaacatggaggagaagaagcagaatctggttgaggatgaaggtagtcaacaggaggaaagtgaagaggaggacggtgaagatggggaaattggagaggaggaaggtgaagatggggcaattggagatgctaaagtggggggagatggagacaaggaaagtgctaaaaggggggggataaaggttgctgtcagaagaaatgttttgactcctttgaacatcaatttgatgttacagaacatcaacaacgatgagattctcaaacttcttgttaaaagaaatgaagacactgatggtacagaaccgaatcttgacattgacctgattgtcagatgtttctttgcggtgagcagtgttgctgagtttggcaaggataagaagaaactgatatcagggtgtacaactgtgctaatggttgttttcttggaccatctcgtggaaaaccctttggatcctttgaccatccctaggatcaacttgtatacttcagattttatcgcagacctgataatggtacccaaggatagccctggccctgaaaaaaagcgtcgtaagactcaagatgaaaaagaagactagtaatgttataaagaatctcgctactctcaattttaagaattcggaggatacatgctatcatgaagattcagaaatggtgccaagtccagggagagcatcgccggttgttgcttctgtacaatctcataagaactttgttgatcatgcagatttagaaattgtgccatctcatgagaactctgttgatctacatagtgtttacatggcacatgtattggaaagaagcagacaaagcatagtagtggacatattggactacaatatacctgaatctacttttgcagattgtttgctacctacaggtcatatgcacacagatgtattttatttacaatgccaactgttgtcaaaggattggaaggataaagtaattcttagctggaaagctactcaagaactgattcatcaagatattggagttaaggagctggacaaggaacttactgcagagatatttattcctatcattcatgccggtcactggtcccttgttattctttccactgccaaacaagagacatatatccttgactcctacccaaggcacagtggggtggccaaggatgttttaactcaactgcagaagtatttggataataaacacaactttgacatgtctaactacactgaccatgtgccacctgttcagcatcaaaaaaacaattacgattgtggctttcatgttttattgtatattgaagaattcatgaaggagaagatgtataaaatcaacaaaaaaatggtgttgaaattcagaaagcagctttgcatgaatctcttgtaccatcctttgaacagaataaatcttgtggaattcagaaagaagctgggtattacattgaaaagaaaacttcctggtatacttgatcttactattgaaggtgagaggagtgaatctgaggctgcagtgataattgaaatagagaacagagatgataagactctagaggatgaacatatttcagttgagaaagagaagttgcgaaaacacaagtttacgtctgataagatcaacgatgagatctgcaaacatatcttgaactacaatgaacgggagttgttaagtgtggggcagactaccatgactgggggtcagctggaaaagtacgtaaatgaaggtgacaatggtgataaaatactcagagcattcatcacatgcttcacttgtgatgaaaagttcaatcaagggaacatcacaaccgtcatcccgccacatgaagtatccgaagagggtgaactctccaaagttgatgctgcacaacttgtagaagaaatcaaagctgtactcaaaggcaccaatgttgcacgtgtacgcaaagacaccgaatccaccaaagatcccaaagtgaaagtctttcgaaacatgaggaggacatttatattttttcctttctacaagaatgaagaattgtttgtatttcatgtcgatacgaaaagactacccatcattgatgctctgttttgcaagatgtcatcattgtcgtttgaagatagatcctgactaggaaagtctatcatgggctgtctactcaaagccatgaaggattccggcttcatggtgaaaaaatatggtgattgtaggttcacagttactgtaactgaactcgaattcaaagatagtgcctcagcgctcataagttttattgagaacttcacttctaagttggacgacaatgccaagaaactgaaaaagggtgacaaggactggctggaaccttacaagaagtcgacagtggcataccttgtttgtcacactgaaaataaggtggtgttgcctgacgatattgtgaagtacaagcaaaacaagtgaggtggttgagtcgttaatgggtccagtggctgtgttttaagacttgtatcacactacttgtatggctttattctctgaagctgttccattgttgccgttagtaacaggtgttgcttttgtctctgctcagtgggtgattcatttcatccagagttgctgcaactttaatcagtctatagtgttgggttcctagctcagtgttgagttctaaatgatcgtgttgtgttcctaccaagtgttgagctgcacgacggcgtgcgcagccgcagccgcaccggcgaggagcgtttagaactctgttgatctacatagtgtttacaccggctcaacagagttctcatgttgatttttgaaggacccacgtgttgggttcctgctcagtgttgagttctgaacgatagtgttatgttccatgggcccttgttgatttcgagaggacccacgggccgaacggcgtgtcactttcatgcgtctatagtgttgggttcctgtctagtgttgagttctcaactatggtgttgtgttcctccaagaagttgagtttcaggggcctattatattgtctcagttaatgggtaactcagttaatcctatatattgtgtcagttaatgggaactcagttaatggtatatgttgtctcagttaatgggtaactcagttaatccagcatatcattgatgagatc

SEQ ID NO: 51983 - DNA, 5774 bp, Zea Mays
ttgagtttcggggggccatgttgattttttgaaggactcacgggccgaacctcgtgtcactttcattaggtatagtgttgggttccttctcaatgtggcgttcggaactatggtgttgcgttcctccaatctgttgggtttcagggtcccatgttgatttttgggaggacccgcggtccgaagcccgtgtaactttccggagtctacagtgttgcattctgaaaagcagtgttaggttccatgtacagtgttggagtctaccatggggctcctgctaagtgttgagtcagatgggcagatgttggttttgggaggacccacgggcgaagggcgtgtcactttcatgcggtatagtgttgcgttcctccaatctgttgggtttcagggtcccatgttgatttttgggaggacccgcgggttccatgttgattttttggaggacccgtggtccgtagtccgtgtcactttccggagtctacagtgttgcgttctgaatgctagtgttatgttccataacccgtgtcactttctggagtctaccgtggggctccttctaagtgttgagtcggatgggcggatgttggttttgggaggacccacgggcgaacgacggtcccatgttgatttttggcaggacccgcagtctgaagcccgtgtcactttccggagtctacagtgttgcgttctgaatactagtgttatgttccatgtcccgtgtcactttctggagtctaccgtggcgctcctgctaagtgttgagtcagatttgcggatgttgattttgggaggacccacggcaaacgcaggcttcccaaagcggcatggtcagttcgagctcgccctggggatgccgccgctctgcccatcgcagacgccgtggagcatcgacggcgacgtcgcaggacatgaggtcgcctaccagctggtgacccgaaacacccaggcggcccgccgccacgtcgagataacggccctgacggtgccgacattttggggcagcgggcattgcccggagccgctcgtcatcctaagaaagggcagcacggtggcctgctacggctacccccggagccactcgtcgtccatgaaaagggcgacgaactggcctggcaagatctggcggcgcggggatcgaatggacggacgacaagagcgagcgaagaagtcctggcggcttggtgagaaaatggtggcgctgggggcgatgggaacggaggtgcggatggtggcagcagtggagaatgaagcgacggcgacgtcgagactgattgtcgtcgtccgcggccatggggcggagcaccttccggagaagtcgagacttatacgattaaaaaaggtaggcgaagagtcggcgcagcatttcacacgcagtagtgactgacacctggatggttggattagtggcacggacaaacgatcttacggctacggaaatttggacgatgtgtccaccttcgtttgcgagcagcggaccctggtttgatatattaaaaaaaggcagccgaagagtcggcgcagcatttcacacgcagtagtgagtgacacctggatggttggattagtggcacggacaaacgatcttacggctacggaaatttggacgacgtgtccaccctcgtttgcgagtagcggaccctggtttaatatatagaaatagtgttgagttctcaacactgtatactcctgaaagtgacacgggcccatggaatgtgacactatcgttcagaactcatgaaagtgacacgttgttcggtgtgaaagtgttgatttagggtttagtgtaaccgcccgttcggtgtggaagtgttcaaatttctctacgcgcgttcggtagcctcaccgacggcgacggcgacctcacctcaccgacggcgacggcctcggcgacggcgacaacgatccccaattctcttcgcgacctgaccgtctccacttcggtaaacccaccttcccttctctcctcgttccttgtcagggaaccgcctcaccgattctgatgtcgaaggtaacctggtgccgatccgcaggggtgaagaagaaagccaacatgccacaggggaagagtaagaagaacgtggtgaaggagaaagccaaaaagattaagaagaacgcggaatcgagagccaaagttcatgaaaatacagatcaaattgagatcaacattagagaaggtgtttcaatttggataacaaaggctgcagtgcaaaaatgttttgagtttccccctggtacagataagaagctgccaatagatccaactacaaaaacatttgattcactctacagagtattgagtgtttcagaaaaaaaaatcaatgtaaagaagaagaagatgaaggagaatatgaaggagaagcaggttgaggaggagaagattgagatgaacatggaggagaagaagcagaatctggttgaggatgaaggtagtcaacaggaggaaagtgaagaggaggacggtgaagatggggaaattggagaggaggaaggtgaagatggggcaattggagatgctaaagtggggggagatggagacaaggaaagtgctaaaaggggggggataaaggttgctgtcagaagaaatgttttgactcctttgaacatcaatttgatgttacagaacatcaacaacgatgagattctcaaacttcttgttaaaagaaatgaagacactgatggtacagaaccgaatcttgacattgacctgattgtcagatgtttctttgcggtgagcagtgttgctgagtttggcaaggataagaagaaactgatatcagggtgtacaactgtgctaatggttgttttcttggaccatctcgtggaaaaccctttggatcctttgaccatccctaggatcaacttgtatacttcagattttatcgcagacctgataatggtacccaaggatagccctggccctgaaaaaaagcgtcgtaagtttaagaattcggaggatacatgctatcatgaagattcagaaatggtgccaagtccagggagagcatcgccggttgttgcttctgtacaatctcataagaactttgttgatcatgcagatttagaaattgtgccatctcatgagaactctgttgatctacatagtgtttacatggcacatgtattggaaagaagcagacaaagcatagtagtggacatattggactacaatatacctgaatctacttttgcagattgtttgctacctacaggtcatatgcacacagatgtattttatttacaatgccaactgttgtcaaaggattggaaggataaagtaattcttagctggaaagctactcaagaactgattcatcaagatattggagttaaggagctggacaaggaacttactgcagaggttatgaacaaagtggatctggtttgtgctttgttttatattacagtagagttttttcagattgacagtagagtttgtgctttttttagatatttattcctatcattcatgccggtcactggtcccttgttattctttccactgccaaacaagagacatatatccttgactcctacccaaggcacagtggggtggccaaggatgttttaactcaactgcagaagtatttggataataaacacaactttgacatgtctaactacactgaccatgtgccacctgttcagcatcaaaaaaacaattacgattgtggctttcatgttttattgtatattgaagaattcatgaaggagaagatgtataaaatcaacaaaaaaatggtgttgaaattcagaaagcagctttgcatgaatctcttgtaccatcctttgaacagaataaatcttgtggaattcagaaagaagctgggtattacattgaaaagaaaacttcctggtatacttgatcttactattgaaggtgagaggagtgaatctgaggctgcagtgataattgaaatagagaacagagatgataagactctagaggatgaacatatttcagttgagaaagagtaaggtaaaaaagaagagcatgtactatcaactgacacaaagaatgacgaagcttcatccccatctgacgaagagcctgagcagagtgagtcatctgagcagactgtgtatgaaagatggatgattccaaaggatcattatcacctgagaaagagcaagctggagaaaaatatcctcaaacgaaaaaagaggttgggcaaagacaacatgtcctctcaggatatgatttctccagtgtttggcaagaggcttgtgcctgcaaacacacattttacctctcttaggaagttgcgaaaacacaagtttacgtctgataagatcaacgatgagatctgcaaacatatcttgaactacaatgaacgggagttgttaagtgtggggcagactaccatgactgggggtcagctggaaaagtacgtaaatgaaggtgacaatggtgataaaatactcagagcattcatcacatgcttcacttgtgatgaaaagttcaatcaagggaacatcacaaccgtcatcccgccacatgaagtatccgaagagggtgaactctccaaagttgatgctgcacaacttgtagaagaaatcaaagctgtactcaaaggcaccaatgttgcacgtgtacgcaaagacaccgaatccaccaaagatcccaaagtgaaagtctttcgaaacatgaggaggacatttatattttttcctttctacaagaatgaagaattgtttgtatttcatgtcgatacgaaaagactacccatcattgatgctctgttttgcaagatgtcatcattgtcgtttgaagatagatcctgactaggaaagtctatcatgggctgtctactcaaagccatgaaggattccggcttcatggtgaaaaaatatggtgattgtaggttcacagttactgtaactgaactcgaattcaaagatagtgcctcagcgctcataagttttattgagaacttcacttctaagttggacgacaatgccaagaaactgaaaaagggtgacaaggactggctggaaccttacaagaagtcgacagtggcataccttgtttgtcacactgaaaataaggtggtgttgcctgacgatattgtgaagtacaagcaaaacaagtgaggtggttgagtcgttaatgggtccagtggctgtgttttaagacttgtatcacactacttgtatggctttattctctgaagctgttccattgttgccgttagtaacaggtgttgcttttgtctctgctcagtgggtgattcatttcatccagagttgctgcaactttaatcagtctatagtgttgggttcctagctcagtgttgagttctaaatgatcgtgttgtgttcctaccaagtgttgagctgcacgacggcgtgcgcagccgcagccgcaccggcgaggagcgtttagaactctgttgatctacatagtgtttacaccggctcaacagagttctcatgttgatttttgaaggacccacgtgttgggttcctgctcagtgttgagttctgaacgatagtgttatgttccatgggcccttgttgatttcgagaggacccacgggccgaacggcgtgtcactttcatgcgtctatagtgttgggttcctgtctagtgttgagttctcaactatggtgttgtgttcctccaagaagttgagtttcaggggcctattatattgtctcagttaatgggtaactcagttaatcctatatattgtgtcagttaatgggaactcagttaatggtatatgttgtctcagttaatgggtaactcagttaatccagcatatcattgatgagatc

SEQ ID NO: 51984 - DNA, 5080 bp, Zea Mays
cgatgtgtcactttcatgagttagtgtcgggttccaggttgagtttcggggggccatgttgattttttgaaggactcacgggccgaacctcgtgtcactttcattaggtatagtgttgggttccttctcaatgtggcgttcggaactatggtgttgcgttcctccaatctgttgggtttcagggtcccatgttgatttttgggaggacccgcggtccgaagcccgtgtaactttccggagtctacagtgttgcattctgaaaagcagtgttaggttccatgtacagtgttggagtctaccatggggctcctgctaagtgttgagtcagatgggcagatgttggttttgggaggacccacgggcgaagggcgtgtcactttcatgcggtatagtgttgcgttcctccaatctgttgggtttcagggtcccatgttgatttttgggaggacccgcgggttccatgttgattttttggaggacccgtggtccgtagtccgtgtcactttccggagtctacagtgttgcgttctgaatgctagtgttatgttccataacccgtgtcactttctggagtctaccgtggggctccttctaagtgttgagtcggatgggcggatgttggttttgggaggacccacgggcgaacgacggtcccatgttgatttttggcaggacccgcagtctgaagcccgtgtcactttccggagtctacagtgttgcgttctgaatactagtgttatgttccatgtcccgtgtcactttctggagtctaccgtggcgctcctgctaagtgttgagtcagatttgcggatgttgattttgggaggacccacggcaaacgcaggcttcccaaagcggcatggtcagttcgagctcgccctggggatgccgccgctctgcccatcgcagacgccgtggagcatcgacggcgacgtcgcaggacatgaggtcgcctaccagctggtgacccgaaacacccaggcggcccgccgccacgtcgagataacggccctgacggtgccgacattttggggcagcgggcattgcccggagccgctcgtcatcctaagaaagggcagcacggtggcctgctagtacgtgacgggatctggcagcgcagggaacggagggacagacggcaagagcatgcaccacatcgacgtgaacatggagtgagcgagccaacggagaaatggcgatgggaatggaggtgcagctggtgggagcagttggcacgccgatgaccggacgaagcaagtgaggcaagggatggacgtcgcacttcaatacgtgcctggcggcaccgacattccgatgcagcggctacccccggagccactcgtcgtccatgaaaagggcgacgaactggcctggcaagatctggcggcgcggggatcgaatggacggacgacaagagcgagcgaagaagtcctggcggcttggtgagaaaatggtggcgctgggggcgatgggaacggaggtgcggatggtggcagcagtggagaatgaagcgacggcgacgtcgagactgattgtcgtcgtccgcggccatggggcggagcaccttccggagaagtcgagacttatacgattaaaaaagggaaccgcctcaccgattctgatgtcgaaggtaacctggtgccgatccgcaggggtgaagaagaaagccaacatgccacaggggaagagtaagaagaacgtggtgaaggagaaagccaaaaagattaagaagaacgcggaatcgagagccaaagttcatgaaaatacagatcaaattgagatcaacattagagaaggtgtttcaatttggataacaaaggctgcagtgcaaaaatgttttgagtttccccctggtacagataagaagctgccaatagatccaactacaaaaacatttgattcactctacagagtattgagtgtttcagaaaaaaaaatcaatgtaaagaagaagaagatgaaggagaatatgaaggagaagcaggttgaggaggagaagattgagatgaacatggaggagaagaagcagaatctggttgaggatgaaggtagtcaacaggaggaaagtgaagaggaggacggtgaagatggggaaattggagaggaggaaggtgaagatggggcaattggagatgctaaagtggggggagatggagacaaggaaagtgctaaaaggggggggataaaggttgctgtcagaagaaatgttttgactcctttgaacatcaatttgatgttacagaacatcaacaacgatgagattctcaaacttcttgttaaaagaaatgaagacactgatggtacagaaccgaatcttgacattgacctgattgtcagatgtttctttgcggtgagcagtgttgctgagtttggcaaggataagaagaaactgatatcagggtgtacaactgtgctaatggttgttttcttggaccatctcgtggaaaaccctttggatcctttgaccatccctaggatcaacttgtatacttcagattttatcgcagacctgataatggtacccaaggatagccctggccctgaaaaaaagcgtcgtaagactcaagatgaaaaagaagactagtaatgttataaagaatctcgctactctcaattttaagaattcggaggatacatgctatcatgaagattcagaaatggtgccaagtccagggagagcatcgccggttgttgcttctgtacaatctcataagaactttgttgatcatgcagatttagaaattgtgccatctcatgagaactctgttgatctacatagtgtttacatggcacatgtattggaaagaagcagacaaagcatagtagtggacatattggactacaatatacctgaatctacttttgcagattgtttgctacctacaggtcatatgcacacagatgtattttatttacaatgccaactgttgtcaaaggattggaaggataaagtaattcttagctggaaagctactcaagaactgattcatcaagatattggagttaaggagctggacaaggaacttactgcagagatatttattcctatcattcatgccggtcactggtcccttgttattctttccactgccaaacaagagacatatatccttgactcctacccaaggcacagtggggtggccaaggatgttttaactcaactgcagaagtatttggataataaacacaactttgacatgtctaactacactgaccatgtgccacctgttcagcatcaaaaaaacaattacgattgtggctttcatgttttattgtatattgaagaattcatgaaggagaagatgtataaaatcaacaaaaaaatggtgttgaaattcagaaagcagctttgcatgaatctcttgtaccatcctttgaacagaataaatcttgtggaattcagaaagaagctgggtattacattgaaaagaaaacttcctggtatacttgatcttactattgaaggtgagaggagtgaatctgaggctgcagtgataattgaaatagagaacagagatgataagactctagaggatgaacatatttcagttgagaaagagaagttgcgaaaacacaagtttacgtctgataagatcaacgatgagatctgcaaacatatcttgaactacaatgaacgggagttgttaagtgtggggcagactaccatgactgggggtcagctggaaaagtacgtaaatgaaggtgacaatggtgataaaatactcagagcattcatcacatgcttcacttgtgatgaaaagttcaatcaagggaacatcacaaccgtcatcccgccacatgaagtatccgaagagggtgaactctccaaagttgatgctgcacaacttgtagaagaaatcaaagctgtactcaaaggcaccaatgttgcacgtgtacgcaaagacaccgaatccaccaaagatcccaaagtgaaagtctttcgaaacatgaggaggacatttatattttttcctttctacaagaatgaagaattgtttgtatttcatgtcgatacgaaaagactacccatcattgatgctctgttttgcaagatgtcatcattgtcgtttgaagatagatcctgactaggaaagtctatcatgggctgtctactcaaagccatgaaggattccggcttcatggtgaaaaaatatggtgattgtaggttcacagttactgtaactgaactcgaattcaaagatagtgcctcagcgctcataagttttattgagaacttcacttctaagttggacgacaatgccaagaaactgaaaaagggtgacaaggactggctggaaccttacaagaagtcgacagtggcataccttgtttgtcacactgaaaataaggtggtgttgcctgacgatattgtgaagtacaagcaaaacaagtgaggtggttgagtcgttaatgggtccagtggctgtgttttaagacttgtatcacactacttgtatggctttattctctgaagctgttccattgttgccgttagtaacaggtgttgcttttgtctctgctcagtgggtgattcatttcatccagagttgctgcaactttaatcagtctatagtgttgggttcctagctcagtgttgagttctaaatgatcgtgttgtgttcctaccaagtgttgagctgcacgacggcgtgcgcagccgcagccgcaccggcgaggagcgtttagaactctgttgatctacatagtgtttacaccggctcaacagagttctcatgttgatttttgaaggacccacgtgttgggttcctgctcagtgttgagttctgaacgatagtgttatgttccatgggcccttgttgatttcgagaggacccacgggccgaacggcgtgtcactttcatgcgtctatagtgttgggttcctgtctagtgttgagttctcaactatggtgttgtgttcctccaagaagttgagtttcaggggcctattatattgtctcagttaatgggtaactcagttaatcctatatattgtgtcagttaatgggaactcagttaatggtatatgttgtctcagttaatgggtaactcagttaatccagcatatcattgatgagatc

SEQ ID NO: 51985 - DNA, 6906 bp, Zea Mays
gcatgttgattttgggaggacccacgggcgaacgatgtgtcactttcatgagttagtgtcgggttccaggttgagtttcggggggccatgttgattttttgaaggactcacgggccgaacctcgtgtcactttcattaggtatagtgttgggttccttctcaatgtggcgttcggaactatggtgttgcgttcctccaatctgttgggtttcagggtcccatgttgatttttgggaggacccgcggtccgaagcccgtgtaactttccggagtctacagtgttgcattctgaaaagcagtgttaggttccatgtacagtgttggagtctaccatggggctcctgctaagtgttgagtcagatgggcagatgttggttttgggaggacccacgggcgaagggcgtgtcactttcatgcggtatagtgttgcgttcctccaatctgttgggtttcagggtcccatgttgatttttgggaggacccgcggtccgtagtccgtgtcactttccggagtctacagtgttgcgttctgaatgctagtgttatgttccataacccgtgtcactttctggagtctaccgtggggcccttctaagtgttgagtcggatggggggatgttggttttcggaggacccacgggcgaagggcgtgtcactttcatgcggtatagtgttgtgttccttcatctgttgcgtttcagggttccatgttgattttttggaggacccgtggtccgtagtccgtgtcactttccggagtctacagtgttgcgttctgaatgctagtgttatgttccataacccgtgtcactttctggagtctaccgtggggctccttctaagtgttgagtcggatgggcggatgttggttttgggaggacccacgggcgaacgacgtgtcactttcatgagttcgtagtgttgagttccatatcccgtgtcactttcaggagtatatagtgttgcgttcctgatccatgttgagttctaaacgatggtgtggcgttcctaatcagtattgagttgggcgcatgttgattttgggaggacccacgggcgaacgacgtgtcactttcatgagttatagtgttgatttttgaaggacccacgagccgaaccccgtgtcactttcatgaggtatagtgttgggttcgtgctcagtgtggcgttcgacactatggtgttgcgttcctccaatctgttgggtttcagggtcccatgttgatttttggcaggacccgcagtctgaagcccgtgtcactttccggagtctacagtgttgcgttctgaatactagtgttatgttccatgtcccgtgtcactttctggagtctaccgtggcgctcctgctaagtgttgagtcagatttgcggatgttgattttgggaggacccacgggtgaagggcgtgtcactttcatgaggtatagtgttgggctccttctcagtgttgtgttcggaactatgctgttgcgttccttcaaggtgttgagtttcagggtcccatgttgatttttgggagttatagtgttgagtttcagggtcccttttagactggaaaagtcttctgccataatcgtcagatttacctaaatgatgtaaaaaatggtttggaaaactctaaaacattaaataaagatcacataacattaattaataaaaaatgatataatacacaaacattaagtaagaattatagaaagttgaggcaccagtttgtatgcaggattcttcctcctaagatgtggaaagctaattagttttaaaccataatccacctcaatatatatgaattaaagtgcatagatgtggcaacaacgttgaagataaacatctatttgtacagcaaacgcaggcttcccaaagcggcatggtcagttcgagctcgccctggggatgccgccgctctgcccatcgcagacgccgtggagcatcgacggcgacgtcgcaggacatgaggtcgcctaccagctggtgacccgaaacacccaggcggcccgccgccacgtcgagataacggccctgacggtgccgacattttggggcagcgggcattgcccggagccgctcgtcatcctaagaaagggcagcacggtggcctgctagtacgtgacgggatctggcagcgcagggaacggagggacagacggcaagagcatgcaccacatcgacgtgaacatggagtgagcgagccaacggagaaatggcgatgggaatggaggtgcagctggtgggagcagttggcacgccgatgaccggacgaagcaagtgaggcaagggatggacgtcgcacttcaatacgtgcctggcggcaccgacattccgatgcagcggctacccccggagccactcgtcgtccatgaaaagggcgacgaactggcctggcaagatctggcggcgcggggatcgaatggacggacgacaagagcgagcgaagaagtcctggcggcttggtgagaaaatggtggcgctgggggcgatgggaacggaggtgcggatggtggcagcagtggagtgagcgagcgtggcctggtttcttcttgaggaaatggcattgcagaggcgatgggaatggagatgcgaatggggggaggagttgccgtgccgacggccgaccgcgatttttttgggaagaatcgtgagaagggataacacacagagagaaaaatgagtgttaccttcgcgttacaggaatgaagcgacggcgacgtcgagactgattgtcgtcgtccgcggccatggggcggagcaccttccggagaagtcgagacttatacgattaaaaaaggtaggcgaagagtcggcgcagcatttcacacgcagtagtgactgacacctggatggttggattagtggcacggacaaacgatcttacggctacggaaatttggacgatgtgtccaccttcgtttgcgagcagcggaccctggtttgatatattaaaaaaaggcagccgaagagtcggcgcagcatttcacacgcagtagtgagtgacacctggatggttggattagtggcacggacaaacgatcttacggctacggaaatttggacgacgtgtccaccctcgtttgcgagtagcggaccctggtttaatatatagaaatagtgttgagttctcaacactgtatactcctgaaagtgacacgggcccatggaatgtgacactatcgttcagaactcatgaaagtgacacgttgttcggtgtgaaagtgttgatttagggtttagtgtaaccgcccgttcggtgtggaagtgttcaaatttctctacgcgcgttcggtagcctcaccgacggcgacggcgacctcacctcaccgacggcgacggcctcggcgacggcgacaacgatccccaattctcttcgcgacctgaccgtctccacttcggtaaacccaccttcccttctctcctcgttccttgtcagggaaccgcctcaccgattctgatgtcgaaggtaacctggtgccgatccgcaggggtgaagaagaaagccaacatgccacaggggaagagtaagaagaacgtggtgaaggagaaagccaaaaagattaagaagaacgcggaatcgagagccaaagttcatgaaaatacagatcaaattgagatcaacattagagaaggtgtttcaatttggataacaaaggctgcagtgcaaaaatgttttgagtttccccctggtacagataagaagctgccaatagatccaactacaaaaacatttgattcactctacagagtattgagtgtttcagaaaaaaaaatcaatgtaaagaagaagaagatgaaggagaatatgaaggagaagcaggttgaggaggagaagattgagatgaacatggaggagaagaagcagaatctggttgaggatgaaggtagtcaacaggaggaaagtgaagaggaggacggtgaagatggggaaattggagaggaggaaggtgaagatggggcaattggagatgctaaagtggggggagatggagacaaggaaagtgctaaaaggggggggataaaggttgctgtcagaagaaatgttttgactcctttgaacatcaatttgatgttacagaacatcaacaacgatgagattctcaaacttcttgttaaaagaaatgaagacactgatggtacagaaccgaatcttgacattgacctgattgtcagatgtttctttgcggtgagcagtgttgctgagtttggcaaggataagaagaaactgatatcagggtgtacaactgtgctaatggttgttttcttggaccatctcgtggaaaaccctttggatcctttgaccatccctaggatcaacttgtatacttcagattttatcgcagacctgataatggtacccaaggatagccctggccctgaaaaaaagcgtcgtaagactcaagatgaaaaagaagactagtaatgttataaagaatctcgctactctcaattttaagaattcggaggatacatgctatcatgaagattcagaaatggtgccaagtccagggagagcatcgccggttgttgcttctgtacaatctcataagaactttgttgatcatgcagatttagaaattgtgccatctcatgagaactctgttgatctacatagtgtttacatggcacatgtattggaaagaagcagacaaagcatagtagtggacatattggactacaatatacctgaatctacttttgcagattgtttgctacctacaggtcatatgcacacagatgtattttatttacaatgccaactgttgtcaaaggattggaaggataaagtaattcttagctggaaagctactcaagaactgattcatcaagatattggagttaaggagctggacaaggaacttactgcagagatatttattcctatcattcatgccggtcactggtcccttgttattctttccactgccaaacaagagacatatatccttgactcctacccaaggcacagtggggtggccaaggatgttttaactcaactgcagaagtatttggataataaacacaactttgacatgtctaactacactgaccatgtgccacctgttcagcatcaaaaaaacaattacgattgtggctttcatgttttattgtatattgaagaattcatgaaggagaagatgtataaaatcaacaaaaaaatggtgttgaaattcagaaagcagctttgcatgaatctcttgtaccatcctttgaacagaataaatcttgtggaattcagaaagaagctgggtattacattgaaaagaaaacttcctggtatacttgatcttactattgaaggtgagaggagtgaatctgaggctgcagtgataattgaaatagagaacagagatgataagactctagaggatgaacatatttcagttgagaaagagaagttgcgaaaacacaagtttacgtctgataagatcaacgatgagatctgcaaacatatcttgaactacaatgaacgggagttgttaagtgtggggcagactaccatgactgggggtcagctggaaaagtacgtaaatgaaggtgacaatggtgataaaatactcagagcattcatcacatgcttcacttgtgatgaaaagttcaatcaagggaacatcacaaccgtcatcccgccacatgaagtatccgaagagggtgaactctccaaagttgatgctgcacaacttgtagaagaaatcaaagctgtactcaaaggcaccaatgttgcacgtgtacgcaaagacaccgaatccaccaaagatcccaaagtgaaagtctttcgaaacatgaggaggacatttatattttttcctttctacaagaatgaagaattgtttgtatttcatgtcgatacgaaaagactacccatcattgatgctctgttttgcaagatgtcatcattgtcgtttgaagatagatcctgactaggaaagtctatcatgggctgtctactcaaagccatgaaggattccggcttcatggtgaaaaaatatggtgattgtaggttcacagttactgtaactgaactcgaattcaaagatagtgcctcagcgctcataagttttattgagaacttcacttctaagttggacgacaatgccaagaaactgaaaaagggtgacaaggactggctggaaccttacaagaagtcgacagtggcataccttgtttgtcacactgaaaataaggtggtgttgcctgacgatattgtgaagtacaagcaaaacaagtgaggtggttgagtcgttaatgggtccagtggctgtgttttaagacttgtatcacactacttgtatggctttattctctgaagctgttccattgttgccgttagtaacaggtgttgcttttgtctctgctcagtgggtgattcatttcatccagagttgctgcaactttaatcagtctatagtgttgggttcctagctcagtgttgagttctaaatgatcgtgttgtgttcctaccaagtgttgagctgcacgacggcgtgcgcagccgcagccgcaccggcgaggagcgtttagaactctgttgatctacatagtgtttacaccggctcaacagagttctcatgttgatttttgaaggacccacgtgttgggttcctgctcagtgttgagttctgaacgatagtgttatgttccatgggcccttgttgatttcgagaggacccacgggccgaacggcgtgtcactttcatgcgtctatagtgttgggttcctgtctagtgttgagttctcaactatggtgttgtgttcctccaagaagttgagtttcaggggcctattatattgtctcagttaatgggtaactcagttaatcctatatattgtgtcagttaatgggaactcagttaatggtatatgttgtctcagttaatgggtaactcagttaatccagcatatcattgatgagatc

SEQ ID NO: 51986 - DNA, 6782 bp, Zea Mays
tggtgttgcattgctgatcagtattgagttgggcgcatgttgattttgggaggacccacgggcgaacgatgtgtcactttcatgagttagtgtcgggttccaggttgagtttcggggggccatgttgattttttgaaggactcacgggccgaacctcgtgtcactttcattaggtatagtgttgggttccttctcaatgtggcgttcggaactatggtgttgcgttcctccaatctgttgggtttcagggtcccatgttgatttttgggaggacccgcggtccgaagcccgtgtaactttccggagtctacagtgttgcattctgaaaagcagtgttaggttccatgtacagtgttggagtctaccatggggctcctgctaagtgttgagtcagatgggcagatgttggttttgggaggacccacgggcgaagggcgtgtcactttcatgcggtatagtgttgcgttcctccaatctgttgggtttcagggtcccatgttgatttttgggaggacccgcgggttccatgttgattttttggaggacccgtggtccgtagtccgtgtcactttccggagtctacagtgttgcgttctgaatgctagtgttatgttccataacccgtgtcactttctggagtctaccgtggggctccttctaagtgttgagtcggatgggcggatgttggttttgggaggacccacgggcgaacgacggtcccatgttgatttttggcaggacccgcagtctgaagcccgtgtcactttccggagtctacagtgttgcgttctgaatactagtgttatgttccatgtcccgtgtcactttctggagtctaccgtggcgctcctgctaagtgttgagtcagatttgcggatgttgattttgggaggacccacgggtgaagggcgtgtcactttcatgaggtatagtgttgggctccttctcagtgttgtgttcggaactatgctgttgcgttccttcaaggtgttgagtttcagggtcccatgttgatttttgggagttatagtgttgagtttcagggtcccttttagactggaaaagtcttctgccataatcgtcagatttacctaaatgatgtaaaaaatggtttggaaaactctaaaacattaaataaagatcacataacattaattaataaaaaatgatataatacacaaacattaagtaagaattatagaaagttgaggcaccagtttgtatgcaggattcttcctcctaagatgtggaaagctaattagttttaaaccataatccacctcaatatatatgaattaaagtgcatagatgtggcaacaacgttgaagataaacatctatttgtacagcaaacgcaggcttcccaaagcggcatggtcagttcgagctcgccctggggatgccgccgctctgcccatcgcagacgccgtggagcatcgacggcgacgtcgcaggacatgaggtcgcctaccagctggtgacccgaaacacccaggcggcccgccgccacgtcgagataacggccctgacggtgccgacattttggggcagcgggcattgcccggagccgctcgtcatcctaagaaagggcagcacggtggcctgctagtacgtgacgggatctggcagcgcagggaacggagggacagacggcaagagcatgcaccacatcgacgtgaacatggagtgagcgagccaacggagaaatggcgatgggaatggaggtgcagctggtgggagcagttggcacgccgatgaccggacgaagcaagtgaggcaagggatggacgtcgcacttcaatacgtgcctggcggcaccgacattccgatgcagcggctacccccggagccactcgtcgtccatgaaaagggcgacgaactggcctggcaagatctggcggcgcggggatcgaatggacggacgacaagagcgagcgaagaagtcctggcggcttggtgagaaaatggtggcgctgggggcgatgggaacggaggtgcggatggtggcagcagtggagtgagcgagcgtggcctggtttcttcttgaggaaatggcattgcagaggcgatgggaatggagatgcgaatggggggaggagttgccgtgccgacggccgaccgcgatttttttgggaagaatcgtgagaagggataacacacagagagaaaaatgagtgttaccttcgcgttacaggaatgaagcgacggcgacgtcgagactgattgtcgtcgtccgcggccatggggcggagcaccttccggagaagtcgagacttatacgattaaaaaaggtaggcgaagagtcggcgcagcatttcacacgcagtagtgactgacacctggatggttggattagtggcacggacaaacgatcttacggctacggaaatttggacgatgtgtccaccttcgtttgcgagcagcggaccctggtttgatatattaaaaaaaggcagccgaagagtcggcgcagcatttcacacgcagtagtgagtgacacctggatggttggattagtggcacggacaaacgatcttacggctacggaaatttggacgacgtgtccaccctcgtttgcgagtagcggaccctggtttaatatatagaaatagtgttgagttctcaacactgtatactcctgaaagtgacacgggcccatggaatgtgacactatcgttcagaactcatgaaagtgacacgttgttcggtgtgaaagtgttgatttagggtttagtgtaaccgcccgttcggtgtggaagtgttcaaatttctctacgcgcgttcggtagcctcaccgacggcgacggcgacctcacctcaccgacggcgacggcctcggcgacggcgacaacgatccccaattctcttcgcgacctgaccgtctccacttcggggtgaagaagaaagccaacatgccacaggggaagagtaagaagaacgtggtgaaggagaaagccaaaaagattaagaagaacgcggaatcgaggtattcactaggatcagtaacaaagttaatccaactccttccacctgctgcccgttagaaaattgtagaccttgatttccaaaacttactcaatctgaagttaggaaacaccaatagagtttttacccactttctcatggatagagccaaagttcatgaaaatacagatcaaattgagatcaacattagagaaggtgtttcaatttggataacaaaggctgcagtgcaaaaatgttttgagtttccccctggtacagataagaagctgccaatagatccaactacaaaaacatttgattcactctacagagtattgagtgtttcagaaaaaaaaatcaatgtaaagaagaagaagatgaaggagaatatgaaggagaagcaggttgaggaggagaagattgagatgaacatggaggagaagaagcagaatctggttgaggatgaaggtagtcaacaggaggaaagtgaagaggaggacggtgaagatggggaaattggagaggaggaaggtgaagatggggcaattggagatgctaaagtggggggagatggagacaaggaaagtgctaaaaggggggggataaaggttgctgtcagaagaaatgttttgactcctttgaacatcaatttgatgttacagaacatcaacaacgatgagattctcaaacttcttgttaaaagaaatgaagacactgatggtacagaaccgaatcttgacattgacctgattgtcagatgtttctttgcggtgagcagtgttgctgagtttggcaaggataagaagaaactgatatcagggtgtacaactgtgctaatggttgttttcttggaccatctcgtggaaaaccctttggatcctttgaccatccctaggatcaacttgtatacttcagattttatcgcagacctgataatggtacccaaggatagccctggccctgaaaaaaagcgtcgtaagtttaagaattcggaggatacatgctatcatgaagattcagaaatggtgccaagtccagggagagcatcgccggttgttgcttctgtacaatctcataagaactttgttgatcatgcagatttagaaattgtgccatctcatgagaactctgttgatctacatagtgtttacatggcacatgtattggaaagaagcagacaaagcatagtagtggacatattggactacaatatacctgaatctacttttgcagattgtttgctacctacaggtcatatgcacacagatgtattttatttacaatgccaactgttgtcaaaggattggaaggataaagtaattcttagctggaaagctactcaagaactgattcatcaagatattggagttaaggagctggacaaggaacttactgcagaggttatgaacaaagtggatctggtttgtgctttgttttatattacagtagagttttttcagattgacagtagagtttgtgctttttttagatatttattcctatcattcatgccggtcactggtcccttgttattctttccactgccaaacaagagacatatatccttgactcctacccaaggcacagtggggtggccaaggatgttttaactcaactgcagaagtatttggataataaacacaactttgacatgtctaactacactgaccatgtgccacctgttcagcatcaaaaaaacaattacgattgtggctttcatgttttattgtatattgaagaattcatgaaggagaagatgtataaaatcaacaaaaaaatggtgttgaaattcagaaagcagctttgcatgaatctcttgtaccatcctttgaacagaataaatcttgtggaattcagaaagaagctgggtattacattgaaaagaaaacttcctggtatacttgatcttactattgaaggtgagaggagtgaatctgaggctgcagtgataattgaaatagagaacagagatgataagactctagaggatgaacatatttcagttgagaaagagtaaggtaaaaaagaagagcatgtactatcaactgacacaaagaatgacgaagcttcatccccatctgacgaagagcctgagcagagtgagtcatctgagcagactgtgtatgaaagatggatgattccaaaggatcattatcacctgagaaagagcaagctggagaaaaatatcctcaaacgaaaaaagaggttgggcaaagacaacatgtcctctcaggatatgatttctccagtgtttggcaagaggcttgtgcctgcaaacacacattttacctctcttaggaagttgcgaaaacacaagtttacgtctgataagatcaacgatgagatctgcaaacatatcttgaactacaatgaacgggagttgttaagtgtggggcagactaccatgactgggggtcagctggaaaagtacgtaaatgaaggtgacaatggtgataaaatactcagagcattcatcacatgcttcacttgtgatgaaaagttcaatcaagggaacatcacaaccgtcatcccgccacatgaagtatccgaagagggtgaactctccaaagttgatgctgcacaacttgtagaagaaatcaaagctgtactcaaaggcaccaatgttgcacgtgtacgcaaagacaccgaatccaccaaagatcccaaagtgaaagtctttcgaaacatgaggaggacatttatattttttcctttctacaagaatgaagaattgtttgtatttcatgtcgatacgaaaagactacccatcattgatgctctgttttgcaagatgtcatcattgtcgtttgaagatagatcctgactaggaaagtctatcatgggctgtctactcaaagccatgaaggattccggcttcatggtgaaaaaatatggtgattgtaggttcacagttactgtaactgaactcgaattcaaagatagtgcctcagcgctcataagttttattgagaacttcacttctaagttggacgacaatgccaagaaactgaaaaagggtgacaaggactggctggaaccttacaagaagtcgacagtggcataccttgtttgtcacactgaaaataaggtggtgttgcctgacgatattgtgaagtacaagcaaaacaagtgaggtggttgagtcgttaatgggtccagtggctgtgttttaagacttgtatcacactacttgtatggctttattctctgaagctgttccattgttgccgttagtaacaggtgttgcttttgtctctgctcagtgggtgattcatttcatccagagttgctgcaactttaatcagtctatagtgttgggttcctagctcagtgttgagttctaaatgatcgtgttgtgttcctaccaagtgttgagctgcacgacggcgtgcgcagccgcagccgcaccggcgaggagcgtttagaactctgttgatctacatagtgtttacaccggctcaacagagttctcatgttgatttttgaaggacccacgtgttgggttcctgctcagtgttgagttctgaacgatagtgttatgttccatgggcccttgttgatttcgagaggacccacgggccgaacggcgtgtcactttcatgcgtctatagtgttgggttcctgtctagtgttgagttctcaactatggtgttgtgttcctccaagaagttgagtttcaggggcctattatattgtctcagttaatgggtaactcagttaatcctatatattgtgtcagttaatgggaactcagttaatggtatatgttgtctcagttaatgggtaactcagttaatccagcatatcattgatgagatc

SEQ ID NO: 51987 - DNA, 2724 bp, Zea Mays
attgagacacagacagagcagctgagcaccgcacacacggacgccataccctagattggagcgcaccacgggcgccggcggccggcggcccgccaccggtgattgacgccccctcctcggtccccagcgcggcgagcagattttatcgcagacctgataatggtacccaaggatagccctggccctgaaaaaaagcgtcgtaagactcaagatgaaaaagaagactagtaatgttataaagaatctcgctactctcaattttaagaattcggaggatacatgctatcatgaagattcagaaatggtgccaagtccagggagagcatcgccggttgttgcttctgtacaatctcataagaactttgttgatcatgcagatttagaaattgtgccatctcatgagaactctgttgatctacatagtgtttacatggcacatgtattggaaagaagcagacaaagcatagtagtggacatattggactacaatatacctgaatctacttttgcagattgtttgctacctacaggtcatatgcacacagatgtattttatttacaatgccaactgttgtcaaaggattggaaggataaagtaattcttagctggaaagctactcaagaactgattcatcaagatattggagttaaggagctggacaaggaacttactgcagagatatttattcctatcattcatgccggtcactggtcccttgttattctttccactgccaaacaagagacatatatccttgactcctacccaaggcacagtggggtggccaaggatgttttaactcaactgcagaagtatttggataataaacacaactttgacatgtctaactacactgaccatgtgccacctgttcagcatcaaaaaaacaattacgattgtggctttcatgttttattgtatattgaagaattcatgaaggagaagatgtataaaatcaacaaaaaaatggtgttgaaattcagaaagcagctttgcatgaatctcttgtaccatcctttgaacagaataaatcttgtggaattcagaaagaagctgggtattacattgaaaagaaaacttcctggtatacttgatcttactattgaaggtgagaggagtgaatctgaggctgcagtgataattgaaatagagaacagagatgataagactctagaggatgaacatatttcagttgagaaagagaagttgcgaaaacacaagtttacgtctgataagatcaacgatgagatctgcaaacatatcttgaactacaatgaacgggagttgttaagtgtggggcagactaccatgactgggggtcagctggaaaagtacgtaaatgaaggtgacaatggtgataaaatactcagagcattcatcacatgcttcacttgtgatgaaaagttcaatcaagggaacatcacaaccgtcatcccgccacatgaagtatccgaagagggtgaactctccaaagttgatgctgcacaacttgtagaagaaatcaaagctgtactcaaaggcaccaatgttgcacgtgtacgcaaagacaccgaatccaccaaagatcccaaagtgaaagtctttcgaaacatgaggaggacatttatattttttcctttctacaagaatgaagaattgtttgtatttcatgtcgatacgaaaagactacccatcattgatgctctgttttgcaagatgtcatcattgtcgtttgaagatagatcctgactaggaaagtctatcatgggctgtctactcaaagccatgaaggattccggcttcatggtgaaaaaatatggtgattgtaggttcacagttactgtaactgaactcgaattcaaagatagtgcctcagcgctcataagttttattgagaacttcacttctaagttggacgacaatgccaagaaactgaaaaagggtgacaaggactggctggaaccttacaagaagtcgacagtggcataccttgtttgtcacactgaaaataaggtggtgttgcctgacgatattgtgaagtacaagcaaaacaagtgaggtggttgagtcgttaatgggtccagtggctgtgttttaagacttgtatcacactacttgtatggctttattctctgaagctgttccattgttgccgttagtaacaggtgttgcttttgtctctgctcagtgggtgattcatttcatccagagttgctgcaactttaatcagtctatagtgttgggttcctagctcagtgttgagttctaaatgatcgtgttgtgttcctaccaagtgttgagctgcacgacggcgtgcgcagccgcagccgcaccggcgaggagcgtttagaactctgttgatctacatagtgtttacaccggctcaacagagttctcatgttgatttttgaaggacccacgtgttgggttcctgctcagtgttgagttctgaacgatagtgttatgttccatgggcccttgttgatttcgagaggacccacgggccgaacggcgtgtcactttcatgcgtctatagtgttgggttcctgtctagtgttgagttctcaactatggtgttgtgttcctccaagaagttgagtttcaggggcctattatattgtctcagttaatgggtaactcagttaatcctatatattgtgtcagttaatgggaactcagttaatggtatatgttgtctcagttaatgggtaactcagttaatccagcatatcattgatgagatc

SEQ ID NO: 51988 - DNA, 6857 bp, Zea Mays
attgagacacagacagagcagctgagcaccgcacacacggacgccataccctagattggagcgcaccacgggcgccggcggccggcggcccgccaccggtgattgacgccccctcctcggtccccagcgcggcgagcaggctatttgaggagatgccgtcattgtcatccttactctctggctccaatactgcgagtgctgagcttcctctaatcccttgcaagctctgcaatggggtggtgattgagcgggtctccaaacaaccagaaaccacgtcgaggaagttctaccggtgcagagccaagaaaacggatgggtcttaatgtgattttttccactggcaagcgagctatgttgttttgttaatcgaggatgggtttgtcagtggtgatcgacgccttgagttgttaatgatcgcacttaatgatcatggcaaagccgttgaatctctaaccaattccatcagagagatgaagaaaaagctgtccaacctggagttagtgatggaagagctggataacgtgaaaaatttgatgaaggcagccatggttgaaattgaggaaaacaagaaatcgacagctgctgcattgaaactgatggagaatgagctgcaaaagctgaaagggtcaactaaagtgaaacctaggaatatggcacagtgttttctgcttttggcattgattgggtgtgttatgttccatgtcccgtgtcactttctggagtctaccgtggtgctcctgctaagtgttgagtcggatgttgattttgggaggacccacgggcgaagggcgtgtcactttcatgaggtatagtgttgggttccttctcagtgtagcgttccttcaaggtgttgagttttagggtcccatgttgatttttgggaggacccacggtccgaagcccgtgtcactttccggagtccacagtgttgcgctctgaatgctagtgttaggttccatgtcccgtgtcactttctggagtctactgtggggctactgctaagtgttgagtcagattggcggatgttgattttgggaggacccactggcgaaccccgtgtcactttcataagttcatagtgttgagttctggaaggtagtgttacgttccatgtcccgtgtcacttctaggagtctacagtgttgcgttcctgatcagtgttgagctctaaacgatggtgttgcgttgctgatcagtattgagttgggcgcatgttgattttgggaggacccacgggccaacgacgtgtcactttcatgagttataagtgtcgggttccaggtcagtgttgggttctgaacgatggtgttgcgttcctccaaggtgttgagtttcaggggcccatgttgatttttgaaggacccacgggccgaaccccgtgtcactttcatgaggtatagtgttgggttccttatcagagttgcgttcggatatatagagttgtgttcctccaatctgtgctgggtttcagggttccatgttgatttttgggaggacccgcggtcggaagcccgtgtcactttccggagtctacagcgttgcgttctgaatgctagtgttatgttccatgtcccgtgtcactttctggagtctaccgtggcgctcctgctaagtgttgagtcggatgggcggatgttgattttgggaggacccacgggtgaagggtgtgtccctttcatgcggtatagtgttgggttccttatcagtgttgcgttccttcaaggcgttgagtttcagggtcccatgttgatttttgggaggacccacgtgttggagtctaccatggggctcctgctaagtgttgagtcagatgggcagatgttggttttgggaggacccacgggcgaagggcgtgtcactttcatgcggtatagtgttgcgttcctccaatctgttgggtttcagggtcccatgttgatttttgggaggacccgcggtccgtagtccgtgtcactttccggagtctacagtgttgcgttctgaatgctagtgttatgttccataacccgtgtcactttctggagtctaccgtggggcccttctaagtgttgagtcggatggggggatgttggttttcggaggacccacgggcgaagggcgtgtcactttcatgcggtatagtgttgtgttccttcatctgttgcgtttcagggttccatgttgattttttggaggacccgtggtccgtagtccgtgtcactttccggagtctacagtgttgcgttctgaatgctagtgttatgttccataacccgtgtcactttctggagtctaccgtggggctccttctaagtgttgagtcggatgggcggatgttggttttgggaggacccacgggcgaacgacggtcccatgttgatttttggcaggacccgcagtctgaagcccgtgtcactttccggagtctacagtgttgcgttctgaatactagtgttatgttccatgtcccgtgtcactttctggagtctaccgtggcgctcctgctaagtgttgagtcagatttgcggatgttgattttgggaggacccacggcaaacgcaggcttcccaaagcggcatggtcagttcgagctcgccctggggatgccgccgctctgcccatcgcagacgccgtggagcatcgacggcgacgtcgcaggacatgaggtcgcctaccagctggtgacccgaaacacccaggcggcccgccgccacgtcgagataacggccctgacggtgccgacattttggggcagcgggcattgcccggagccgctcgtcatcctaagaaagggcagcacggtggcctgctacggctacccccggagccactcgtcgtccatgaaaagggcgacgaactggcctggcaagatctggcggcgcggggatcgaatggacggacgacaagagcgagcgaagaagtcctggcggcttggtgagaaaatggtggcgctgggggcgatgggaacggaggtgcggatggtggcagcagtggagaatgaagcgacggcgacgtcgagactgattgtcgtcgtccgcggccatggggcggagcaccttccggagaagtcgagacttatacgattaaaaaagggaaccgcctcaccgattctgatgtcgaaggtaacctggtgccgatccgcaggggtgaagaagaaagccaacatgccacaggggaagagtaagaagaacgtggtgaaggagaaagccaaaaagattaagaagaacgcggaatcgagagccaaagttcatgaaaatacagatcaaattgagatcaacattagagaaggtgtttcaatttggataacaaaggctgcagtgcaaaaatgttttgagtttccccctggtacagataagaagctgccaatagatccaactacaaaaacatttgattcactctacagagtattgagtgtttcagaaaaaaaaatcaatgtaaagaagaagaagatgaaggagaatatgaaggagaagcaggttgaggaggagaagattgagatgaacatggaggagaagaagcagaatctggttgaggatgaaggtagtcaacaggaggaaagtgaagaggaggacggtgaagatggggaaattggagaggaggaaggtgaagatggggcaattggagatgctaaagtggggggagatggagacaaggaaagtgctaaaaggggggggataaaggttgctgtcagaagaaatgttttgactcctttgaacatcaatttgatgttacagaacatcaacaacgatgagattctcaaacttcttgttaaaagaaatgaagacactgatggtacagaaccgaatcttgacattgacctgattgtcagatgtttctttgcggtgagcagtgttgctgagtttggcaaggataagaagaaactgatatcagggtgtacaactgtgctaatggttgttttcttggaccatctcgtggaaaaccctttggatcctttgaccatccctaggatcaacttgtatacttcagattttatcgcagacctgataatggtacccaaggatagccctggccctgaaaaaaagcgtcgtaagactcaagatgaaaaagaagactagtaatgttataaagaatctcgctactctcaattttaagaattcggaggatacatgctatcatgaagattcagaaatggtgccaagtccagggagagcatcgccggttgttgcttctgtacaatctcataagaactttgttgatcatgcagatttagaaattgtgccatctcatgagaactctgttgatctacatagtgtttacatggcacatgtattggaaagaagcagacaaagcatagtagtggacatattggactacaatatacctgaatctacttttgcagattgtttgctacctacaggtcatatgcacacagatgtattttatttacaatgccaactgttgtcaaaggattggaaggataaagtaattcttagctggaaagctactcaagaactgattcatcaagatattggagttaaggagctggacaaggaacttactgcagaggttatgaacaaagtggatctgatatttattcctatcattcatgccggtcactggtcccttgttattctttccactgccaaacaagagacatatatccttgactcctacccaaggcacagtggggtggccaaggatgttttaactcaactgcagaagtatttggataataaacacaactttgacatgtctaactacactgaccatgtgccacctgttcagcatcaaaaaaacaattacgattgtggctttcatgttttattgtatattgaagaattcatgaaggagaagatgtataaaatcaacaaaaaaatggtgttgaaattcagaaagcagctttgcatgaatctcttgtaccatcctttgaacagaataaatcttgtggaattcagaaagaagctgggtattacattgaaaagaaaacttcctggtatacttgatcttactattgaaggtgagaggagtgaatctgaggctgcagtgataattgaaatagagaacagagatgataagactctagaggatgaacatatttcagttgagaaagagtaaggtaaaaaagaagagcatgtactatcaactgacacaaagaatgacgaagcttcatccccatctgacgaagagcctgagcagagtgagtcatctgagcagactgtgtatgaaagatggatgattccaaaggatcattatcacctgagaaagagcaagctggagaaaaatatcctcaaacgaaaaaagaggttgggcaaagacaacatgtcctctcaggatatgatttctccagtgtttggcaagaggcttgtgcctgcaaacacacattttacctctcttaggaagttgcgaaaacacaagtttacgtctgataagatcaacgatgagatctgcaaacatatcttgaactacaatgaacgggagttgttaagtgtggggcagactaccatgactgggggtcagctggaaaagtacgtaaatgaaggtgacaatggtgataaaatactcagagcattcatcacatgcttcacttgtgatgaaaagttcaatcaagggaacatcacaaccgtcatcccgccacatgaagtatccgaagagggtgaactctccaaagttgatgctgcacaacttgtagaagaaatcaaagctgtactcaaaggcaccaatgttgcacgtgtacgcaaagacaccgaatccaccaaagatcccaaagtgaaagtctttcgaaacatgaggaggacatttatattttttcctttctacaagaatgaagaattgtttgtatttcatgtcgatacgaaaagactacccatcattgatgctctgttttgcaagatgtcatcattgtcgtttgaagatagatcctgactaggaaagtctatcatgggctgtctactcaaagccatgaaggattccggcttcatggtgaaaaaatatggtgattgtaggttcacagttactgtaactgaactcgaattcaaagatagtgcctcagcgctcataagttttattgagaacttcacttctaagttggacgacaatgccaagaaactgaaaaagggtgacaaggactggctggaaccttacaagaagtcgacagtggcataccttgtttgtcacactgaaaataaggtggtgttgcctgacgatattgtgaagtacaagcaaaacaagtgaggtggttgagtcgttaatgggtccagtggctgtgttttaagacttgtatcacactacttgtatggctttattctctgaagctgttccattgttgccgttagtaacaggtgttgcttttgtctctgctcagtgggtgattcatttcatccagagttgctgcaactttaatcagtctatagtgttgggttcctagctcagtgttgagttctaaatgatcgtgttgtgttcctaccaagtgttgagctgcacgacggcgtgcgcagccgcagccgcaccggcgaggagcgtttagaactctgttgatctacatagtgtttacaccggctcaacagagttctcatgttgatttttgaaggacccacgtgttgggttcctgctcagtgttgagttctgaacgatagtgttatgttccatgggcccttgttgatttcgagaggacccacgggccgaacggcgtgtcactttcatgcgtctatagtgttgggttcctgtctagtgttgagttctcaactatggtgttgtgttcctccaagaagttgagtttcaggggcctattatattgtctcagttaatgggtaactcagttaatcctatatattgtgtcagttaatgggaactcagttaatggtatatgttgtctcagttaatgggtaactcagttaatccagcatatcattgatgagatc

SEQ ID NO: 51989 - DNA, 7203 bp, Zea Mays
attgagacacagacagagcagctgagcaccgcacacacggacgccataccctagattggagcgcaccacgggcgccggcggccggcggcccgccaccggtgattgacgccccctcctcggtccccagcgcggcgagcaggctatttgaggagatgccgtcattgtcatccttactctctggctccaatactgcgagtgctgagcttcctctaatcccttgcaagctctgcaatggggtggtgattgagcgggtctccaaacaaccagaaaccacgtcgaggaagttctaccggtgcagagccaagaaaacggatgggtcttaatgtgattttttccactggcaagcgagctatgttgttttgttaatcgaggatgggtttgtcagtggtgatcgacgccttgagttgttaatgatcgcacttaatgatcatggcaaagccgttgaatctctaaccaattccatcagagagatgaagaaaaagctgtccaacctggagttagtgatggaagagctggataacgtgaaaaatttgatgaaggcagccatggttgaaattgaggaaaacaagaaatcgacagctgctgcattgaaactgatggagaatgagctgcaaaagctgaaagggtcaactaaagtgaaacctaggaatatggcacagtgttttctgcttttggcattgattgggtggtttgtggtgggacagatgaattggggggaggaagcatccagccgatttctgctgagaggctaatgaacataggatggacttttcaatagctagatgtaatcagaactggtttatattttctctgctaacatggcgtagtagccaggacactttgcttgtcgattattatttttagcaagatgttggtgtgaagttggaaaggcttcccacggtccgaagcccgtgtcactttccagagtctacagtgttgcgttctgaatgctagtgttatgttccatgtcccgtgtcactttctggagtctaccgtggtgctcctgctaagtgttgagtcggatgttgattttgggaggacccacgggcgaagggcgtgtcactttcatgaggtatagtgttgggttccttctcagtgtagcgttccttcaaggtgttgagttttagggtcccatgttgatttttgggaggacccacggtccgaagcccgtgtcactttccggagtccacagtgttgcgctctgaatgctagtgttaggttccatgtcccgtgtcactttctggagtctactgtggggctactgctaagtgttgagtcagattggcggatgttgattttgggaggacccactggcgaaccccgtgtcactttcataagttcatagtgttgagttctggaaggtagtgttacgttccatgtcccgtgtcacttctaggagtctacagtgttgcgttcctgatcagtgttgagctctaaacgatggtgttgcgttgctgatcagtattgagttgggcgcatgttgattttgggaggacccacgggccaacgacgtgtcactttcatgagttataagtgtcgggttccaggtcagtgttgggttctgaacgatggtgttgcgttcctccaaggtgttgagtttcaggggcccatgttgatttttgaaggacccacgggccgaaccccgtgtcactttcatgaggtatagtgttgggttccttatcagagttgcgttcggatatatagagttgtgttcctccaatctgtgctgggtttcagggttccatgttgatttttgggaggacccgcggtcggaagcccgtgtcactttccggagtctacagcgttgcgttctgaatgctagtgttatgttccatgtcccgtgtcactttctggagtctaccgtggcgctcctgctaagtgttgagtcggatgggcggatgttgattttgggaggacccacgggtgaagggtgtgtccctttcatgcggtatagtgttgggttccttatcagtgttgcgttccttcaaggcgttgagtttcagggtcccatgttgatttttgggaggacccacgtgttggagtctaccatggggctcctgctaagtgttgagtcagatgggcagatgttggttttgggaggacccacgggcgaagggcgtgtcactttcatgcggtatagtgttgcgttcctccaatctgttgggtttcagggtcccatgttgatttttgggaggacccgcgggttccatgttgattttttggaggacccgtggtccgtagtccgtgtcactttccggagtctacagtgttgcgttctgaatgctagtgttatgttccataacccgtgtcactttctggagtctaccgtggggctccttctaagtgttgagtcggatgggcggatgttggttttgggaggacccacgggcgaacgacgtgtcactttcatgagttcgtagtgttgagttccatatcccgtgtcactttcaggagtatatagtgttgcgttcctgatccatgttgagttctaaacgatggtgtggcgttcctaatcagtattgagttgggcgcatgttgattttgggaggacccacgggcgaacgacgtgtcactttcatgagttatagtgttgatttttgaaggacccacgagccgaaccccgtgtcactttcatgaggtatagtgttgggttcgtgctcagtgtggcgttcgacactatggtgttgcgttcctccaatctgttgggtttcagggtcccatgttgatttttggcaggacccgcagtctgaagcccgtgtcactttccggagtctacagtgttgcgttctgaatactagtgttatgttccatgtcccgtgtcactttctggagtctaccgtggcgctcctgctaagtgttgagtcagatttgcggatgttgattttgggaggacccacggcaaacgcaggcttcccaaagcggcatggtcagttcgagctcgccctggggatgccgccgctctgcccatcgcagacgccgtggagcatcgacggcgacgtcgcaggacatgaggtcgcctaccagctggtgacccgaaacacccaggcggcccgccgccacgtcgagataacggccctgacggtgccgacattttggggcagcgggcattgcccggagccgctcgtcatcctaagaaagggcagcacggtggcctgctacggctacccccggagccactcgtcgtccatgaaaagggcgacgaactggcctggcaagatctggcggcgcggggatcgaatggacggacgacaagagcgagcgaagaagtcctggcggcttggtgagaaaatggtggcgctgggggcgatgggaacggaggtgcggatggtggcagcagtggagaatgaagcgacggcgacgtcgagactgattgtcgtcgtccgcggccatggggcggagcaccttccggagaagtcgagacttatacgattaaaaaagggaaccgcctcaccgattctgatgtcgaaggtaacctggtgccgatccgcaggggtgaagaagaaagccaacatgccacaggggaagagtaagaagaacgtggtgaaggagaaagccaaaaagattaagaagaacgcggaatcgagagccaaagttcatgaaaatacagatcaaattgagatcaacattagagaaggtgtttcaatttggataacaaaggctgcagtgcaaaaatgttttgagtttccccctggtacagataagaagctgccaatagatccaactacaaaaacatttgattcactctacagagtattgagtgtttcagaaaaaaaaatcaatgtaaagaagaagaagatgaaggagaatatgaaggagaagcaggttgaggaggagaagattgagatgaacatggaggagaagaagcagaatctggttgaggatgaaggtagtcaacaggaggaaagtgaagaggaggacggtgaagatggggaaattggagaggaggaaggtgaagatggggcaattggagatgctaaagtggggggagatggagacaaggaaagtgctaaaaggggggggataaaggttgctgtcagaagaaatgttttgactcctttgaacatcaatttgatgttacagaacatcaacaacgatgagattctcaaacttcttgttaaaagaaatgaagacactgatggtacagaaccgaatcttgacattgacctgattgtcagatgtttctttgcggtgagcagtgttgctgagtttggcaaggataagaagaaactgatatcagggtgtacaactgtgctaatggttgttttcttggaccatctcgtggaaaaccctttggatcctttgaccatccctaggatcaacttgtatacttcagattttatcgcagacctgataatggtacccaaggatagccctggccctgaaaaaaagcgtcgtaagactcaagatgaaaaagaagactagtaatgttataaagaatctcgctactctcaattttaagaattcggaggatacatgctatcatgaagattcagaaatggtgccaagtccagggagagcatcgccggttgttgcttctgtacaatctcataagaactttgttgatcatgcagatttagaaattgtgccatctcatgagaactctgttgatctacatagtgtttacatggcacatgtattggaaagaagcagacaaagcatagtagtggacatattggactacaatatacctgaatctacttttgcagattgtttgctacctacaggtcatatgcacacagatgtattttatttacaatgccaactgttgtcaaaggattggaaggataaagtaattcttagctggaaagctactcaagaactgattcatcaagatattggagttaaggagctggacaaggaacttactgcagagatatttattcctatcattcatgccggtcactggtcccttgttattctttccactgccaaacaagagacatatatccttgactcctacccaaggcacagtggggtggccaaggatgttttaactcaactgcagaagtatttggataataaacacaactttgacatgtctaactacactgaccatgtgccacctgttcagcatcaaaaaaacaattacgattgtggctttcatgttttattgtatattgaagaattcatgaaggagaagatgtataaaatcaacaaaaaaatggtgttgaaattcagaaagcagctttgcatgaatctcttgtaccatcctttgaacagaataaatcttgtggaattcagaaagaagctgggtattacattgaaaagaaaacttcctggtatacttgatcttactattgaaggtgagaggagtgaatctgaggctgcagtgataattgaaatagagaacagagatgataagactctagaggatgaacatatttcagttgagaaagagtaaggtaaaaaagaagagcatgtactatcaactgacacaaagaatgacgaagcttcatccccatctgacgaagagcctgagcagagtgagtcatctgagcagactgtgtatgaaagatggatgattccaaaggatcattatcacctgagaaagagcaagctggagaaaaatatcctcaaacgaaaaaagaggttgggcaaagacaacatgtcctctcaggatatgatttctccagtgtttggcaagaggcttgtgcctgcaaacacacattttacctctcttaggaagttgcgaaaacacaagtttacgtctgataagatcaacgatgagatctgcaaacatatcttgaactacaatgaacgggagttgttaagtgtggggcagactaccatgactgggggtcagctggaaaagtacgtaaatgaaggtgacaatggtgataaaatactcagagcattcatcacatgcttcacttgtgatgaaaagttcaatcaagggaacatcacaaccgtcatcccgccacatgaagtatccgaagagggtgaactctccaaagttgatgctgcacaacttgtagaagaaatcaaagctgtactcaaaggcaccaatgttgcacgtgtacgcaaagacaccgaatccaccaaagatcccaaagtgaaagtctttcgaaacatgaggaggacatttatattttttcctttctacaagaatgaagaattgtttgtatttcatgtcgatacgaaaagactacccatcattgatgctctgttttgcaagatgtcatcattgtcgtttgaagatagatcctgactaggaaagtctatcatgggctgtctactcaaagccatgaaggattccggcttcatggtgaaaaaatatggtgattgtaggttcacagttactgtaactgaactcgaattcaaagatagtgcctcagcgctcataagttttattgagaacttcacttctaagttggacgacaatgccaagaaactgaaaaagggtgacaaggactggctggaaccttacaagaagtcgacagtggcataccttgtttgtcacactgaaaataaggtggtgttgcctgacgatattgtgaagtacaagcaaaacaagtgaggtggttgagtcgttaatgggtccagtggctgtgttttaagacttgtatcacactacttgtatggctttattctctgaagctgttccattgttgccgttagtaacaggtgttgcttttgtctctgctcagtgggtgattcatttcatccagagttgctgcaactttaatcagtctatagtgttgggttcctagctcagtgttgagttctaaatgatcgtgttgtgttcctaccaagtgttgagctgcacgacggcgtgcgcagccgcagccgcaccggcgaggagcgtttagaactctgttgatctacatagtgtttacaccggctcaacagagttctcatgttgatttttgaaggacccacgtgttgggttcctgctcagtgttgagttctgaacgatagtgttatgttccatgggcccttgttgatttcgagaggacccacgggccgaacggcgtgtcactttcatgcgtctatagtgttgggttcctgtctagtgttgagttctcaactatggtgttgtgttcctccaagaagttgagtttcaggggcctattatattgtctcagttaatgggtaactcagttaatcctatatattgtgtcagttaatgggaactcagttaatggtatatgttgtctcagttaatgggtaactcagttaatccagcatatcattgatgagatc

SEQ ID NO: 51990 - DNA, 7266 bp, Zea Mays
attgagacacagacagagcagctgagcaccgcacacacggacgccataccctagattggagcgcaccacgggcgccggcggccggcggcccgccaccggtgattgacgccccctcctcggtccccagcgcggcgagcaggctatttgaggagatgccgtcattgtcatccttactctctggctccaatactgcgagtgctgagcttcctctaatcccttgcaagctctgcaatggggtggtgattgagcgggtctccaaacaaccagaaaccacgtcgaggaagttctaccggtgcagagccaagaaaacggatgggtcttaatgtgattttttccactggcaagcgagctatgttgttttgttaatcgaggatgggtttgtcagtggtgatcgacgccttgagttgttaatgatcgcacttaatgatcatggcaaagccgttgaatctctaaccaattccatcagagagatgaagaaaaagctgtccaacctggagttagtgatggaagagctggataacgtgaaaaatttgatgaaggcagccatggttgaaattgaggaaaacaagaaatcgacagctgctgcattgaaactgatggagaatgagctgcaaaagctgaaagggtcaactaaagtgaaacctaggaatatggcacagtgttttctgcttttggcattgattgggtgtgttatgttccatgtcccgtgtcactttctggagtctaccgtggtgctcctgctaagtgttgagtcggatgttgattttgggaggacccacgggcgaagggcgtgtcactttcatgaggacccacgggccgaaccccgtgtcactttcatgaggtatagtgttgggttccttatcagagttgcgttcggatatatagagttgtgttcctccaatctgtgctgggtttcagggttccatgttgatttttgggaggacccgcggtcggaagcccgtgtcactttccggagtctacagcgttgcgttctgaatgctagtgttatgttccatgtcccgtgtcactttctggagtctaccgtggcgctcctgctaagtgttgagtcggatgggcggatgttgattttgggaggacccacgggtgaagggtgtgtccctttcatgcggtatagtgttgggttccttatcagtgttgcgttccttcaaggcgttgagtttcagggtcccatgttgatttttgggaggacccacgtgttggagtctaccatggggctcctgctaagtgttgagtcagatgggcagatgttggttttgggaggacccacgggcgaagggcgtgtcactttcatgcggtatagtgttgcgttcctccaatctgttgggtttcagggtcccatgttgatttttgggaggacccgcggtccgtagtccgtgtcactttccggagtctacagtgttgcgttctgaatgctagtgttatgttccataacccgtgtcactttctggagtctaccgtggggcccttctaagtgttgagtcggatggggggatgttggttttcggaggacccacgggcgaagggcgtgtcactttcatgcggtatagtgttgtgttccttcatctgttgcgtttcagggttccatgttgattttttggaggacccgtggtccgtagtccgtgtcactttccggagtctacagtgttgcgttctgaatgctagtgttatgttccataacccgtgtcactttctggagtctaccgtggggctccttctaagtgttgagtcggatgggcggatgttggttttgggaggacccacgggcgaacgacgtgtcactttcatgagttcgtagtgttgagttccatatcccgtgtcactttcaggagtatatagtgttgcgttcctgatccatgttgagttctaaacgatggtgtggcgttcctaatcagtattgagttgggcgcatgttgattttgggaggacccacgggcgaacgacgtgtcactttcatgagttatagtgttgatttttgaaggacccacgagccgaaccccgtgtcactttcatgaggtatagtgttgggttcgtgctcagtgtggcgttcgacactatggtgttgcgttcctccaatctgttgggtttcagggtcccatgttgatttttggcaggacccgcagtctgaagcccgtgtcactttccggagtctacagtgttgcgttctgaatactagtgttatgttccatgtcccgtgtcactttctggagtctaccgtggcgctcctgctaagtgttgagtcagatttgcggatgttgattttgggaggacccacggcaaacgcaggcttcccaaagcggcatggtcagttcgagctcgccctggggatgccgccgctctgcccatcgcagacgccgtggagcatcgacggcgacgtcgcaggacatgaggtcgcctaccagctggtgacccgaaacacccaggcggcccgccgccacgtcgagataacggccctgacggtgccgacattttggggcagcgggcattgcccggagccgctcgtcatcctaagaaagggcagcacggtggcctgctagtacgtgacgggatctggcagcgcagggaacggagggacagacggcaagagcatgcaccacatcgacgtgaacatggagtgagcgagccaacggagaaatggcgatgggaatggaggtgcagctggtgggagcagttggcacgccgatgaccggacgaagcaagtgaggcaagggatggacgtcgcacttcaatacgtgcctggcggcaccgacattccgatgcagcggctacccccggagccactcgtcgtccatgaaaagggcgacgaactggcctggcaagatctggcggcgcggggatcgaatggacggacgacaagagcgagcgaagaagtcctggcggcttggtgagaaaatggtggcgctgggggcgatgggaacggaggtgcggatggtggcagcagtggagtgagcgagcgtggcctggtttcttcttgaggaaatggcattgcagaggcgatgggaatggagatgcgaatggggggaggagttgccgtgccgacggccgaccgcgatttttttgggaagaatcgtgagaagggataacacacagagagaaaaatgagtgttaccttcgcgttacaggaatgaagcgacggcgacgtcgagactgattgtcgtcgtccgcggccatggggcggagcaccttccggagaagtcgagacttatacgattaaaaaaggtaggcgaagagtcggcgcagcatttcacacgcagtagtgactgacacctggatggttggattagtggcacggacaaacgatcttacggctacggaaatttggacgatgtgtccaccttcgtttgcgagcagcggaccctggtttgatatattaaaaaaaggcagccgaagagtcggcgcagcatttcacacgcagtagtgagtgacacctggatggttggattagtggcacggacaaacgatcttacggctacggaaatttggacgacgtgtccaccctcgtttgcgagtagcggaccctggtttaatatatagaaatagtgttgagttctcaacactgtatactcctgaaagtgacacgggcccatggaatgtgacactatcgttcagaactcatgaaagtgacacgttgttcggtgtgaaagtgttgatttagggtttagtgtaaccgcccgttcggtgtggaagtgttcaaatttctctacgcgcgttcggtagcctcaccgacggcgacggcgacctcacctcaccgacggcgacggcctcggcgacggcgacaacgatccccaattctcttcgcgacctgaccgtctccacttcggggtgaagaagaaagccaacatgccacaggggaagagtaagaagaacgtggtgaaggagaaagccaaaaagattaagaagaacgcggaatcgagagccaaagttcatgaaaatacagatcaaattgagatcaacattagagaaggtgtttcaatttggataacaaaggctgcagtgcaaaaatgttttgagtttccccctggtacagataagaagctgccaatagatccaactacaaaaacatttgattcactctacagagtattgagtgtttcagaaaaaaaaatcaatgtaaagaagaagaagatgaaggagaatatgaaggagaagcaggttgaggaggagaagattgagatgaacatggaggagaagaagcagaatctggttgaggatgaaggtagtcaacaggaggaaagtgaagaggaggacggtgaagatggggaaattggagaggaggaaggtgaagatggggcaattggagatgctaaagtggggggagatggagacaaggaaagtgctaaaaggggggggataaaggttgctgtcagaagaaatgttttgactcctttgaacatcaatttgatgttacagaacatcaacaacgatgagattctcaaacttcttgttaaaagaaatgaagacactgatggtacagaaccgaatcttgacattgacctgattgtcagatgtttctttgcggtgagcagtgttgctgagtttggcaaggataagaagaaactgatatcagggtgtacaactgtgctaatggttgttttcttggaccatctcgtggaaaaccctttggatcctttgaccatccctaggatcaacttgtatacttcagattttatcgcagacctgataatggtacccaaggatagccctggccctgaaaaaaagcgtcgtaagactcaagatgaaaaagaagactagtaatgttataaagaatctcgctactctcaattttaagaattcggaggatacatgctatcatgaagattcagaaatggtgccaagtccagggagagcatcgccggttgttgcttctgtacaatctcataagaactttgttgatcatgcagatttagaaattgtgccatctcatgagaactctgttgatctacatagtgtttacatggcacatgtattggaaagaagcagacaaagcatagtagtggacatattggactacaatatacctgaatctacttttgcagattgtttgctacctacaggtcatatgcacacagatgtattttatttacaatgccaactgttgtcaaaggattggaaggataaagtaattcttagctggaaagctactcaagaactgattcatcaagatattggagttaaggagctggacaaggaacttactgcagagatatttattcctatcattcatgccggtcactggtcccttgttattctttccactgccaaacaagagacatatatccttgactcctacccaaggcacagtggggtggccaaggatgttttaactcaactgcagaagtatttggataataaacacaactttgacatgtctaactacactgaccatgtgccacctgttcagcatcaaaaaaacaattacgattgtggctttcatgttttattgtatattgaagaattcatgaaggagaagatgtataaaatcaacaaaaaaatggtgttgaaattcagaaagcagctttgcatgaatctcttgtaccatcctttgaacagaataaatcttgtggaattcagaaagaagctgggtattacattgaaaagaaaacttcctggtatacttgatcttactattgaaggtgagaggagtgaatctgaggctgcagtgataattgaaatagagaacagagatgataagactctagaggatgaacatatttcagttgagaaagagaagttgcgaaaacacaagtttacgtctgataagatcaacgatgagatctgcaaacatatcttgaactacaatgaacgggagttgttaagtgtggggcagactaccatgactgggggtcagctggaaaagtacgtaaatgaaggtgacaatggtgataaaatactcagagcattcatcacatgcttcacttgtgatgaaaagttcaatcaagggaacatcacaaccgtcatcccgccacatgaagtatccgaagagggtgaactctccaaagttgatgctgcacaacttgtagaagaaatcaaagctgtactcaaaggcaccaatgttgcacgtgtacgcaaagacaccgaatccaccaaagatcccaaagtgaaagtctttcgaaacatgaggaggacatttatattttttcctttctacaagaatgaagaattgtttgtatttcatgtcgatacgaaaagactacccatcattgatgctctgttttgcaagatgtcatcattgtcgtttgaagatagatcctgactaggaaagtctatcatgggctgtctactcaaagccatgaaggattccggcttcatggtgaaaaaatatggtgattgtaggttcacagttactgtaactgaactcgaattcaaagatagtgcctcagcgctcataagttttattgagaacttcacttctaagttggacgacaatgccaagaaactgaaaaagggtgacaaggactggctggaaccttacaagaagtcgacagtggcataccttgtttgtcacactgaaaataaggtggtgttgcctgacgatattgtgaagtacaagcaaaacaagtgaggtggttgagtcgttaatgggtccagtggctgtgttttaagacttgtatcacactacttgtatggctttattctctgaagctgttccattgttgccgttagtaacaggtgttgcttttgtctctgctcagtgggtgattcatttcatccagagttgctgcaactttaatcagtctatagtgttgggttcctagctcagtgttgagttctaaatgatcgtgttgtgttcctaccaagtgttgagctgcacgacggcgtgcgcagccgcagccgcaccggcgaggagcgtttagaactctgttgatctacatagtgtttacaccggctcaacagagttctcatgttgatttttgaaggacccacgtgttgggttcctgctcagtgttgagttctgaacgatagtgttatgttccatgggcccttgttgatttcgagaggacccacgggccgaacggcgtgtcactttcatgcgtctatagtgttgggttcctgtctagtgttgagttctcaactatggtgttgtgttcctccaagaagttgagtttcaggggcctattatattgtctcagttaatgggtaactcagttaatcctatatattgtgtcagttaatgggaactcagttaatggtatatgttgtctcagttaatgggtaactcagttaatccagcatatcattgatgagatc

SEQ ID NO: 51991 - DNA, 8956 bp, Zea Mays
attgagacacagacagagcagctgagcaccgcacacacggacgccataccctagattggagcgcaccacgggcgccggcggccggcggcccgccaccggtgattgacgccccctcctcggtccccagcgcggcgagcaggctatttgaggagatgccgtcattgtcatccttactctctggctccaatactgcgagtgctgagcttcctctaatcccttgcaagctctgcaatggggtggtgattgagcgggtctccaaacaaccagaaaccacgtcgaggaagttctaccggtgcagagccaagaaaacggatgggtcttaatgtgattttttccactggcaagcgagctatgttgttttgttaatcgaggatgggtttgtcagtggtgatcgacgccttgagttgttaatgatcgcacttaatgatcatggcaaagccgttgaatctctaaccaattccatcagagagatgaagaaaaagctgtccaacctggagttagtgatggaagagctggataacgtgaaaaatttgatgaaggcagccatggttgaaattgaggaaaacaagaaatcgacagctgctgcattgaaactgatggagaatgagctgcaaaagctgaaagggtcaactaaagtgaaacctaggaatatggcacagtgttttctgcttttggcattgattgggtgtgttatgttccatgtcccgtgtcactttctggagtctaccgtggtgctcctgctaagtgttgagtcggatgttgattttgggaggacccacgggcgaagggcgtgtcactttcatgaggacccacgggccgaaccccgtgtcactttcatgaggtatagtgttgggttccttatcagagttgcgttcggatatatagagttgtgttcctccaatctgtgctgggtttcagggttccatgttgatttttgggaggacccgcggtcggaagcccgtgtcactttccggagtctacagcgttgcgttctgaatgctagtgttatgttccatgtcccgtgtcactttctggagtctaccgtggcgctcctgctaagtgttgagtcggatgggcggatgttgattttgggaggacccacgggtgaagggtgtgtccctttcatgcggtatagtgttgggttccttatcagtgttgcgttccttcaaggcgttgagtttcagggtcccatgttgatttttgggaggacccacggtccgaagcccgtgtcactttccggtgtctacagtgttgcgctctgaatgcttgtgttaggttccatgtcccatgtcactttctggagtctaccgtggggctcctgctaagtgttgattcggatgggcggatgttgattttgggataggactgggcgttcgggttacccgattagttcgggtcgggtagttcgggttttgataaattcgggtaatagaaactaatacccgatcacagctttaaaaacccgcgacccgtaatttcgggtacccgtaatttcgggttcgggtttgggtatacccaatttacccgaaatatataaagcacatgcgagggcgcgtttggctggtggcgcggcggcttgacagcgaggctgcgtacgcgtgtggccgcctggccgctaggtagtgcagcggcttgccggcgagggcgctgtccgctgtctgcgcttggtcgcctggccggtggcgcgacggcttgccggtgaggcagcctgttcgctgtacgcctgtccgctgtctgcgcgtggccgcctgtccgcctggccggtggccgcctgtccgctgtacggctgtacgcgcttcggcgcttggctgcctggcgcctggtgtgtggttgctagttaccgttgtgccttgttgtgagttgctgttgccgccatgccttgctgttgccggagaacaaagatctgaagtgctccttgctctggagtactagccttgaagttgcaggtggcgatagccgatggggattgggggacgtcgtagccaacgctggacaaggcagcggctgtggggctagcgttgtgcctggacgatgttggttatttcgggtcgaatgggtacttcgggtaccgcgggttaatacccgattaggcccgaacttagttcgggtatttagtttcgttacccgctagagctgttcgggtaacgggcttcgggctaaacgggtacgggttcgggtatttcgggtatagggcttcgggctcgggttttatgcccagatctattttgggatgacccacgggcgaacccccgtgtcactttcatgagttcacagtgttgagttctgaaggtagtgttacgttccatgtcccgtgtcactttcaggagtctacagcgttgcgttcctgatcagtgttgagctctaaacgatggtgttgcattgctgatcagtattgagttgggcgcatgttgattttgggaggacccacgggcgaacgatgtgtcactttcatgagttagtgtcgggttccaggttgagtttcggggggccatgttgattttttgaaggactcacgggccgaacctcgtgtcactttcattaggtatagtgttgggttccttctcaatgtggcgttcggaactatggtgttgcgttcctccaatctgttgggtttcagggtcccatgttgatttttgggaggacccgcggtccgaagcccgtgtaactttccggagtctacagtgttgcattctgaaaagcagtgttaggttccatgtacagtgttggagtctaccatggggctcctgctaagtgttgagtcagatgggcagatgttggttttgggaggacccacgggcgaagggcgtgtcactttcatgcggtatagtgttgcgttcctccaatctgttgggtttcagggtcccatgttgatttttgggaggacccgcggtccgtagtccgtgtcactttccggagtctacagtgttgcgttctgaatgctagtgttatgttccataacccgtgtcactttctggagtctaccgtggggcccttctaagtgttgagtcggatggggggatgttggttttcggaggacccacgggcgaagggcgtgtcactttcatgcggtatagtgttgtgttccttcatctgttgcgtttcagggttccatgttgattttttggaggacccgtggtccgtagtccgtgtcactttccggagtctacagtgttgcgttctgaatgctagtgttatgttccataacccgtgtcactttctggagtctaccgtggggctccttctaagtgttgagtcggatgggcggatgttggttttgggaggacccacgggcgaacgacgtgtcactttcatgagttcgtagtgttgagttccatatcccgtgtcactttcaggagtatatagtgttgcgttcctgatccatgttgagttctaaacgatggtgtggcgttcctaatcagtattgagttgggcgcatgttgattttgggaggacccacgggcgaacgacgtgtcactttcatgagttatagtgttgatttttgaaggacccacgagccgaaccccgtgtcactttcatgaggtatagtgttgggttcgtgctcagtgtggcgttcgacactatggtgttgcgttcctccaatctgttgggtttcagggtcccatgttgatttttggcaggacccgcagtctgaagcccgtgtcactttccggagtctacagtgttgcgttctgaatactagtgttatgttccatgtcccgtgtcactttctggagtctaccgtggcgctcctgctaagtgttgagtcagatttgcggatgttgattttgggaggacccacgggtgaagggcgtgtcactttcatgaggtatagtgttgggctccttctcagtgttgtgttcggaactatgctgttgcgttccttcaaggtgttgagtttcagggtcccatgttgatttttgggagttatagtgttgagtttcagggtcccttttagactggaaaagtcttctgccataatcgtcagatttacctaaatgatgtaaaaaatggtttggaaaactctaaaacattaaataaagatcacataacattaattaataaaaaatgatataatacacaaacattaagtaagaattatagaaagttgaggcaccagtttgtatgcaggattcttcctcctaagatgtggaaagctaattagttttaaaccataatccacctcaatatatatgaattaaagtgcatagatgtggcaacaacgttgaagataaacatctatttgtacagcaaacgcaggcttcccaaagcggcatggtcagttcgagctcgccctggggatgccgccgctctgcccatcgcagacgccgtggagcatcgacggcgacgtcgcaggacatgaggtcgcctaccagctggtgacccgaaacacccaggcggcccgccgccacgtcgagataacggccctgacggtgccgacattttggggcagcgggcattgcccggagccgctcgtcatcctaagaaagggcagcacggtggcctgctagtacgtgacgggatctggcagcgcagggaacggagggacagacggcaagagcatgcaccacatcgacgtgaacatggagtgagcgagccaacggagaaatggcgatgggaatggaggtgcagctggtgggagcagttggcacgccgatgaccggacgaagcaagtgaggcaagggatggacgtcgcacttcaatacgtgcctggcggcaccgacattccgatgcagcggctacccccggagccactcgtcgtccatgaaaagggcgacgaactggcctggcaagatctggcggcgcggggatcgaatggacggacgacaagagcgagcgaagaagtcctggcggcttggtgagaaaatggtggcgctgggggcgatgggaacggaggtgcggatggtggcagcagtggagaatgaagcgacggcgacgtcgagactgattgtcgtcgtccgcggccatggggcggagcaccttccggagaagtcgagacttatacgattaaaaaagggaaccgcctcaccgattctgatgtcgaaggtaacctggtgccgatccgcaggggtgaagaagaaagccaacatgccacaggggaagagtaagaagaacgtggtgaaggagaaagccaaaaagattaagaagaacgcggaatcgaggtattcactaggatcagtaacaaagttaatccaactccttccacctgctgcccgttagaaaattgtagaccttgatttccaaaacttactcaatctgaagttaggaaacaccaatagagtttttacccactttctcatggatagagccaaagttcatgaaaatacagatcaaattgagatcaacattagagaaggtgtttcaatttggataacaaaggctgcagtgcaaaaatgttttgagtttccccctggtacagataagaagctgccaatagatccaactacaaaaacatttgattcactctacagagtattgagtgtttcagaaaaaaaaatcaatgtaaagaagaagaagatgaaggagaatatgaaggagaagcaggttgaggaggagaagattgagatgaacatggaggagaagaagcagaatctggttgaggatgaaggtagtcaacaggaggaaagtgaagaggaggacggtgaagatggggaaattggagaggaggaaggtgaagatggggcaattggagatgctaaagtggggggagatggagacaaggaaagtgctaaaaggggggggataaaggttgctgtcagaagaaatgttttgactcctttgaacatcaatttgatgttacagaacatcaacaacgatgagattctcaaacttcttgttaaaagaaatgaagacactgatggtacagaaccgaatcttgacattgacctgattgtcagatgtttctttgcggtgagcagtgttgctgagtttggcaaggataagaagaaactgatatcagggtgtacaactgtgctaatggttgttttcttggaccatctcgtggaaaaccctttggatcctttgaccatccctaggatcaacttgtatacttcagattttatcgcagacctgataatggtacccaaggatagccctggccctgaaaaaaagcgtcgtaagtttaagaattcggaggatacatgctatcatgaagattcagaaatggtgccaagtccagggagagcatcgccggttgttgcttctgtacaatctcataagaactttgttgatcatgcagatttagaaattgtgccatctcatgagaactctgttgatctacatagtgtttacatggcacatgtattggaaagaagcagacaaagcatagtagtggacatattggactacaatatacctgaatctacttttgcagattgtttgctacctacaggtcatatgcacacagatgtattttatttacaatgccaactgttgtcaaaggattggaaggataaagtaattcttagctggaaagctactcaagaactgattcatcaagatattggagttaaggagctggacaaggaacttactgcagaggttatgaacaaagtggatctggtttgtgctttgttttatattacagtagagttttttcagattgacagtagagtttgtgctttttttagatatttattcctatcattcatgccggtcactggtcccttgttattctttccactgccaaacaagagacatatatccttgactcctacccaaggcacagtggggtggccaaggatgttttaactcaactgcagaagtatttggataataaacacaactttgacatgtctaactacactgaccatgtgccacctgttcagcatcaaaaaaacaattacgattgtggctttcatgttttattgtatattgaagaattcatgaaggagaagatgtataaaatcaacaaaaaaatggtgttgaaattcagaaagcagctttgcatgaatctcttgtaccatcctttgaacagaataaatcttgtggaattcagaaagaagctgggtattacattgaaaagaaaacttcctggtatacttgatcttactattgaaggtgagaggagtgaatctgaggctgcagtgataattgaaatagagaacagagatgataagactctagaggatgaacatatttcagttgagaaagagtaaggtaaaaaagaagagcatgtactatcaactgacacaaagaatgacgaagcttcatccccatctgacgaagagcctgagcagagtgagtcatctgagcagactgtgtatgaaagatggatgattccaaaggatcattatcacctgagaaagagcaagctggagaaaaatatcctcaaacgaaaaaagaggttgggcaaagacaacatgtcctctcaggatatgatttctccagtgtttggcaagaggcttgtgcctgcaaacacacattttacctctcttaggaagttgcgaaaacacaagtttacgtctgataagatcaacgatgagatctgcaaacatatcttgaactacaatgaacgggagttgttaagtgtggggcagactaccatgactgggggtcagctggaaaagtacgtaaatgaaggtgacaatggtgataaaatactcagagcattcatcacatgcttcacttgtgatgaaaagttcaatcaagggaacatcacaaccgtcatcccgccacatgaagtatccgaagagggtgaactctccaaagttgatgctgcacaacttgtagaagaaatcaaagctgtactcaaaggcaccaatgttgcacgtgtacgcaaagacaccgaatccaccaaagatcccaaagtgaaagtctttcgaaacatgaggaggacatttatattttttcctttctacaagaatgaagaattgtttgtatttcatgtcgatacgaaaagactacccatcattgatgctctgttttgcaagatgtcatcattgtcgtttgaagatagatcctgactaggaaagtctatcatgggctgtctactcaaagccatgaaggattccggcttcatggtgaaaaaatatggtgattgtaggttcacagttactgtaactgaactcgaattcaaagatagtgcctcagcgctcataagttttattgagaacttcacttctaagttggacgacaatgccaagaaactgaaaaagggtgacaaggactggctggaaccttacaagaagtcgacagtggcataccttgtttgtcacactgaaaataaggtggtgttgcctgacgatattgtgaagtacaagcaaaacaagtgaggtggttgagtcgttaatgggtccagtggctgtgttttaagacttgtatcacactacttgtatggctttattctctgaagctgttccattgttgccgttagtaacaggtgttgcttttgtctctgctcagtgggtgattcatttcatccagagttgctgcaactttaatcagtctatagtgttgggttcctagctcagtgttgagttctaaatgatcgtgttgtgttcctaccaagtgttgagctgcacgacggcgtgcgcagccgcagccgcaccggcgaggagcgtttagaactctgttgatctacatagtgtttacaccggctcaacagagttctcatgttgatttttgaaggacccacgtgttgggttcctgctcagtgttgagttctgaacgatagtgttatgttccatgggcccttgttgatttcgagaggacccacgggccgaacggcgtgtcactttcatgcgtctatagtgttgggttcctgtctagtgttgagttctcaactatggtgttgtgttcctccaagaagttgagtttcaggggcctattatattgtctcagttaatgggtaactcagttaatcctatatattgtgtcagttaatgggaactcagttaatggtatatgttgtctcagttaatgggtaactcagttaatccagcatatcattgatgagatc

SEQ ID NO: 51992 - DNA, 8683 bp, Zea Mays
attgagacacagacagagcagctgagcaccgcacacacggacgccataccctagattggagcgcaccacgggcgccggcggccggcggcccgccaccggtgattgacgccccctcctcggtccccagcgcggcgagcaggctatttgaggagatgccgtcattgtcatccttactctctggctccaatactgcgagtgctgagcttcctctaatcccttgcaagctctgcaatggggtggtgattgagcgggtctccaaacaaccagaaaccacgtcgaggaagttctaccggtgcagagccaagaaaacggatgggtcttaatgtgattttttccactggcaagcgagctatgttgttttgttaatcgaggatgggtttgtcagtggtgatcgacgccttgagttgttaatgatcgcacttaatgatcatggcaaagccgttgaatctctaaccaattccatcagagagatgaagaaaaagctgtccaacctggagttagtgatggaagagctggataacgtgaaaaatttgatgaaggcagccatggttgaaattgaggaaaacaagaaatcgacagctgctgcattgaaactgatggagaatgagctgcaaaagctgaaagggtcaactaaagtgaaacctaggaatatggcacagtgttttctgcttttggcattgattgggtggtttgtggtgggacagatgaattggggggaggaagcatccagccgatttctgctgagaggctaatgaacataggatggacttttcaatagctagatgtaatcagaactggtttatattttctctgctaacatggcgtagtagccaggacactttgcttgtcgattattatttttagcaagatgttggtgtgaagttggaaaggcttcccacggtccgaagcccgtgtcactttccagagtctacagtgttgcgttctgaatgctagtgttatgttccatgtcccgtgtcactttctggagtctaccgtggtgctcctgctaagtgttgagtcggatgttgattttgggaggacccacgggcgaagggcgtgtcactttcatgaggtatagtgttgggttccttctcagtgtagcgttccttcaaggtgttgagttttagggtcccatgttgatttttgggaggacccacggtccgaagcccgtgtcactttccggagtccacagtgttgcgctctgaatgctagtgttaggttccatgtcccgtgtcactttctggagtctactgtggggctactgctaagtgttgagtcagattggcggatgttgattttgggaggacccactggcgaaccccgtgtcactttcataagttcatagtgttgagttctggaaggtagtgttacgttccatgtcccgtgtcacttctaggagtctacagtgttgcgttcctgatcagtgttgagctctaaacgatggtgttgcgttgctgatcagtattgagttgggcgcatgttgattttgggaggacccacgggccaacgacgtgtcactttcatgagttataagtgtcgggttccaggtcagtgttgggttctgaacgatggtgttgcgttcctccaaggtgttgagtttcaggggcccatgttgatttttgaaggacccacgggccgaaccccgtgtcactttcatgaggtatagtgttgggttccttatcagagttgcgttcggatatatagagttgtgttcctccaatctgtgctgggtttcagggttccatgttgatttttgggaggacccgcggtcggaagcccgtgtcactttccggagtctacagcgttgcgttctgaatgctagtgttatgttccatgtcccgtgtcactttctggagtctaccgtggcgctcctgctaagtgttgagtcggatgggcggatgttgattttgggaggacccacgggtgaagggtgtgtccctttcatgcggtatagtgttgggttccttatcagtgttgcgttccttcaaggcgttgagtttcagggtcccatgttgatttttgggaggacccacgtgttggagtctaccatggggctcctgctaagtgttgagtcagatgggcagatgttggttttgggaggacccacgggcgaagggcgtgtcactttcatgcggtatagtgttgcgttcctccaatctgttgggtttcagggtcccatgttgatttttgggaggacccgcggtccgtagtccgtgtcactttccggagtctacagtgttgcgttctgaatgctagtgttatgttccataacccgtgtcactttctggagtctaccgtggggcccttctaagtgttgagtcggatggggggatgttggttttcggaggacccacgggcgaagggcgtgtcactttcatgcggtatagtgttgtgttccttcatctgttgcgtttcagggttccatgttgattttttggaggacccgtggtccgtagtccgtgtcactttccggagtctacagtgttgcgttctgaatgctagtgttatgttccataacccgtgtcactttctggagtctaccgtggggctccttctaagtgttgagtcggatgggcggatgttggttttgggaggacccacgggcgaacgacgtgtcactttcatgagttcgtagtgttgagttccatatcccgtgtcactttcaggagtatatagtgttgcgttcctgatccatgttgagttctaaacgatggtgtggcgttcctaatcagtattgagttgggcgcatgttgattttgggaggacccacgggcgaacgacgtgtcactttcatgagttatagtgttgatttttgaaggacccacgagccgaaccccgtgtcactttcatgaggtatagtgttgggttcgtgctcagtgtggcgttcgacactatggtgttgcgttcctccaatctgttgggtttcagggtcccatgttgatttttggcaggacccgcagtctgaagcccgtgtcactttccggagtctacagtgttgcgttctgaatactagtgttatgttccatgtcccgtgtcactttctggagtctaccgtggcgctcctgctaagtgttgagtcagatttgcggatgttgattttgggaggacccacgggtgaagggcgtgtcactttcatgaggtatagtgttgggctccttctcagtgttgtgttcggaactatgctgttgcgttccttcaaggtgttgagtttcagggtcccatgttgatttttgggagttatagtgttgagtttcagggtcccttttagactggaaaagtcttctgccataatcgtcagatttacctaaatgatgtaaaaaatggtttggaaaactctaaaacattaaataaagatcacataacattaattaataaaaaatgatataatacacaaacattaagtaagaattatagaaagttgaggcaccagtttgtatgcaggattcttcctcctaagatgtggaaagctaattagttttaaaccataatccacctcaatatatatgaattaaagtgcatagatgtggcaacaacgttgaagataaacatctatttgtacagcaaacgcaggcttcccaaagcggcatggtcagttcgagctcgccctggggatgccgccgctctgcccatcgcagacgccgtggagcatcgacggcgacgtcgcaggacatgaggtcgcctaccagctggtgacccgaaacacccaggcggcccgccgccacgtcgagataacggccctgacggtgccgacattttggggcagcgggcattgcccggagccgctcgtcatcctaagaaagggcagcacggtggcctgctagtacgtgacgggatctggcagcgcagggaacggagggacagacggcaagagcatgcaccacatcgacgtgaacatggagtgagcgagccaacggagaaatggcgatgggaatggaggtgcagctggtgggagcagttggcacgccgatgaccggacgaagcaagtgaggcaagggatggacgtcgcacttcaatacgtgcctggcggcaccgacattccgatgcagcggctacccccggagccactcgtcgtccatgaaaagggcgacgaactggcctggcaagatctggcggcgcggggatcgaatggacggacgacaagagcgagcgaagaagtcctggcggcttggtgagaaaatggtggcgctgggggcgatgggaacggaggtgcggatggtggcagcagtggagtgagcgagcgtggcctggtttcttcttgaggaaatggcattgcagaggcgatgggaatggagatgcgaatggggggaggagttgccgtgccgacggccgaccgcgatttttttgggaagaatcgtgagaagggataacacacagagagaaaaatgagtgttaccttcgcgttacaggaatgaagcgacggcgacgtcgagactgattgtcgtcgtccgcggccatggggcggagcaccttccggagaagtcgagacttatacgattaaaaaaggtaggcgaagagtcggcgcagcatttcacacgcagtagtgactgacacctggatggttggattagtggcacggacaaacgatcttacggctacggaaatttggacgatgtgtccaccttcgtttgcgagcagcggaccctggtttgatatattaaaaaaaggcagccgaagagtcggcgcagcatttcacacgcagtagtgagtgacacctggatggttggattagtggcacggacaaacgatcttacggctacggaaatttggacgacgtgtccaccctcgtttgcgagtagcggaccctggtttaatatatagaaatagtgttgagttctcaacactgtatactcctgaaagtgacacgggcccatggaatgtgacactatcgttcagaactcatgaaagtgacacgttgttcggtgtgaaagtgttgatttagggtttagtgtaaccgcccgttcggtgtggaagtgttcaaatttctctacgcgcgttcggtagcctcaccgacggcgacggcgacctcacctcaccgacggcgacggcctcggcgacggcgacaacgatccccaattctcttcgcgacctgaccgtctccacttcggtaaacccaccttcccttctctcctcgttccttgtcagggaaccgcctcaccgattctgatgtcgaaggtaacctggtgccgatccgcaggggtgaagaagaaagccaacatgccacaggggaagagtaagaagaacgtggtgaaggagaaagccaaaaagattaagaagaacgcggaatcgagagccaaagttcatgaaaatacagatcaaattgagatcaacattagagaaggtgtttcaatttggataacaaaggctgcagtgcaaaaatgttttgagtttccccctggtacagataagaagctgccaatagatccaactacaaaaacatttgattcactctacagagtattgagtgtttcagaaaaaaaaatcaatgtaaagaagaagaagatgaaggagaatatgaaggagaagcaggttgaggaggagaagattgagatgaacatggaggagaagaagcagaatctggttgaggatgaaggtagtcaacaggaggaaagtgaagaggaggacggtgaagatggggaaattggagaggaggaaggtgaagatggggcaattggagatgctaaagtggggggagatggagacaaggaaagtgctaaaaggggggggataaaggttgctgtcagaagaaatgttttgactcctttgaacatcaatttgatgttacagaacatcaacaacgatgagattctcaaacttcttgttaaaagaaatgaagacactgatggtacagaaccgaatcttgacattgacctgattgtcagatgtttctttgcggtgagcagtgttgctgagtttggcaaggataagaagaaactgatatcagggtgtacaactgtgctaatggttgttttcttggaccatctcgtggaaaaccctttggatcctttgaccatccctaggatcaacttgtatacttcagattttatcgcagacctgataatggtacccaaggatagccctggccctgaaaaaaagcgtcgtaagtttaagaattcggaggatacatgctatcatgaagattcagaaatggtgccaagtccagggagagcatcgccggttgttgcttctattgtttgctacctacaggtcatatgcacacagatgtattttatttacaatgccaactgttgtcaaaggattggaaggataaagtaattcttagctggaaagctactcaagaactgattcatcaagatattggagttaaggagctggacaaggaacttactgcagagatatttattcctatcattcatgccggtcactggtcccttgttattctttccactgccaaacaagagacatatatccttgactcctacccaaggcacagtggggtggccaaggatgttttaactcaactgcagaagtatttggataataaacacaactttgacatgtctaactacactgaccatgtgccacctgttcagcatcaaaaaaacaattacgattgtggctttcatgttttattgtatattgaagaattcatgaaggagaagatgtataaaatcaacaaaaaaatggtgttgaaattcagaaagcagctttgcatgaatctcttgtaccatcctttgaacagaataaatcttgtggaattcagaaagaagctgggtattacattgaaaagaaaacttcctggtatacttgatcttactattgaaggtgagaggagtgaatctgaggctgcagtgataattgaaatagagaacagagatgataagactctagaggatgaacatatttcagttgagaaagagtaaggtaaaaaagaagagcatgtactatcaactgacacaaagaatgacgaagcttcatccccatctgacgaagagcctgagcagagtgagtcatctgagcagactgtgtatgaaagatggatgattccaaaggatcattatcacctgagaaagagcaagctggagaaaaatatcctcaaacgaaaaaagaggttgggcaaagacaacatgtcctctcaggatatgatttctccagtgtttggcaagaggcttgtgcctgcaaacacacattttacctctcttaggaagttgcgaaaacacaagtttacgtctgataagatcaacgatgagatctgcaaacatatcttgaactacaatgaacgggagttgttaagtgtggggcagactaccatgactgggggtcagctggaaaagtacgtaaatgaaggtgacaatggtgataaaatactcagagcattcatcacatgcttcacttgtgatgaaaagttcaatcaagggaacatcacaaccgtcatcccgccacatgaagtatccgaagagggtgaactctccaaagttgatgctgcacaacttgtagaagaaatcaaagctgtactcaaaggcaccaatgttgcacgtgtacgcaaagacaccgaatccaccaaagatcccaaagtgaaagtctttcgaaacatgaggaggacatttatattttttcctttctacaagaatgaagaattgtttgtatttcatgtcgatacgaaaagactacccatcattgatgctctgttttgcaagatgtcatcattgtcgtttgaagatagatcctgactaggaaagtctatcatgggctgtctactcaaagccatgaaggattccggcttcatggtgaaaaaatatggtgattgtaggttcacagttactgtaactgaactcgaattcaaagatagtgcctcagcgctcataagttttattgagaacttcacttctaagttggacgacaatgccaagaaactgaaaaagggtgacaaggactggctggaaccttacaagaagtcgacagtggcataccttgtttgtcacactgaaaataaggtggtgttgcctgacgatattgtgaagtacaagcaaaacaagtgaggtggttgagtcgttaatgggtccagtggctgtgttttaagacttgtatcacactacttgtatggctttattctctgaagctgttccattgttgccgttagtaacaggtgttgcttttgtctctgctcagtgggtgattcatttcatccagagttgctgcaactttaatcagtctatagtgttgggttcctagctcagtgttgagttctaaatgatcgtgttgtgttcctaccaagtgttgagctgcacgacggcgtgcgcagccgcagccgcaccggcgaggagcgtttagaactctgttgatctacatagtgtttacaccggctcaacagagttctcatgttgatttttgaaggacccacgtgttgggttcctgctcagtgttgagttctgaacgatagtgttatgttccatgggcccttgttgatttcgagaggacccacgggccgaacggcgtgtcactttcatgcgtctatagtgttgggttcctgtctagtgttgagttctcaactatggtgttgtgttcctccaagaagttgagtttcaggggcctattatattgtctcagttaatgggtaactcagttaatcctatatattgtgtcagttaatgggaactcagttaatggtatatgttgtctcagttaatgggtaactcagttaatccagcatatcattgatgagatc

SEQ ID NO: 51993 - DNA, 8549 bp, Zea Mays
attgagacacagacagagcagctgagcaccgcacacacggacgccataccctagattggagcgcaccacgggcgccggcggccggcggcccgccaccggtgattgacgccccctcctcggtccccagcgcggcgagcaggctatttgaggagatgccgtcattgtcatccttactctctggctccaatactgcgagtgctgagcttcctctaatcccttgcaagctctgcaatggggtggtgattgagcgggtctccaaacaaccagaaaccacgtcgaggaagttctaccggtgcagagccaagaaaacggatgggtcttaatgtgattttttccactggcaagcgagctatgttgttttgttaatcgaggatgggtttgtcagtggtgatcgacgccttgagttgttaatgatcgcacttaatgatcatggcaaagccgttgaatctctaaccaattccatcagagagatgaagaaaaagctgtccaacctggagttagtgatggaagagctggataacgtgaaaaatttgatgaaggcagccatggttgaaattgaggaaaacaagaaatcgacagctgctgcattgaaactgatggagaatgagctgcaaaagctgaaagggtcaactaaagtgaaacctaggaatatggcacagtgttttctgcttttggcattgattgggtggtttgtggtgggacagatgaattggggggaggaagcatccagccgatttctgctgagaggctaatgaacataggatggacttttcaatagctagatgtaatcagaactggtttatattttctctgctaacatggcgtagtagccaggacactttgcttgtcgattattatttttagcaagatgttggtgtgaagttggaaaggcttcccacggtccgaagcccgtgtcactttccagagtctacagtgttgcgttctgaatgctagtgttatgttccatgtcccgtgtcactttctggagtctaccgtggtgctcctgctaagtgttgagtcggatgttgattttgggaggacccacgggcgaagggcgtgtcactttcatgaggtatagtgttgggttccttctcagtgtagcgttccttcaaggtgttgagttttagggtcccatgttgatttttgggaggacccacggtccgaagcccgtgtcactttccggagtccacagtgttgcgctctgaatgctagtgttaggttccatgtcccgtgtcactttctggagtctactgtggggctactgctaagtgttgagtcagattggcggatgttgattttgggaggacccactggcgaaccccgtgtcactttcataagttcatagtgttgagttctggaaggtagtgttacgttccatgtcccgtgtcacttctaggagtctacagtgttgcgttcctgatcagtgttgagctctaaacgatggtgttgcgttgctgatcagtattgagttgggcgcatgttgattttgggaggacccacgggccaacgacgtgtcactttcatgagttataagtgtcgggttccaggtcagtgttgggttctgaacgatggtgttgcgttcctccaaggtgttgagtttcaggggcccatgttgatttttgaaggacccacgggccgaaccccgtgtcactttcatgaggtatagtgttgggttccttatcagagttgcgttcggatatatagagttgtgttcctccaatctgtgctgggtttcagggttccatgttgatttttgggaggacccgcggtcggaagcccgtgtcactttccggagtctacagcgttgcgttctgaatgctagtgttatgttccatgtcccgtgtcactttctggagtctaccgtggcgctcctgctaagtgttgagtcggatgggcggatgttgattttgggaggacccacgggtgaagggtgtgtccctttcatgcggtatagtgttgggttccttatcagtgttgcgttccttcaaggcgttgagtttcagggtcccatgttgatttttgggaggacccacgtgttggagtctaccatggggctcctgctaagtgttgagtcagatgggcagatgttggttttgggaggacccacgggcgaagggcgtgtcactttcatgcggtatagtgttgcgttcctccaatctgttgggtttcagggtcccatgttgatttttgggaggacccgcggtccgtagtccgtgtcactttccggagtctacagtgttgcgttctgaatgctagtgttatgttccataacccgtgtcactttctggagtctaccgtggggcccttctaagtgttgagtcggatggggggatgttggttttcggaggacccacgggcgaagggcgtgtcactttcatgcggtatagtgttgtgttccttcatctgttgcgtttcagggttccatgttgattttttggaggacccgtggtccgtagtccgtgtcactttccggagtctacagtgttgcgttctgaatgctagtgttatgttccataacccgtgtcactttctggagtctaccgtggggctccttctaagtgttgagtcggatgggcggatgttggttttgggaggacccacgggcgaacgacgtgtcactttcatgagttcgtagtgttgagttccatatcccgtgtcactttcaggagtatatagtgttgcgttcctgatccatgttgagttctaaacgatggtgtggcgttcctaatcagtattgagttgggcgcatgttgattttgggaggacccacgggcgaacgacgtgtcactttcatgagttatagtgttgatttttgaaggacccacgagccgaaccccgtgtcactttcatgaggtatagtgttgggttcgtgctcagtgtggcgttcgacactatggtgttgcgttcctccaatctgttgggtttcagggtcccatgttgatttttggcaggacccgcagtctgaagcccgtgtcactttccggagtctacagtgttgcgttctgaatactagtgttatgttccatgtcccgtgtcactttctggagtctaccgtggcgctcctgctaagtgttgagtcagatttgcggatgttgattttgggaggacccacggcaaacgcaggcttcccaaagcggcatggtcagttcgagctcgccctggggatgccgccgctctgcccatcgcagacgccgtggagcatcgacggcgacgtcgcaggacatgaggtcgcctaccagctggtgacccgaaacacccaggcggcccgccgccacgtcgagataacggccctgacggtgccgacattttggggcagcgggcattgcccggagccgctcgtcatcctaagaaagggcagcacggtggcctgctagtacgtgacgggatctggcagcgcagggaacggagggacagacggcaagagcatgcaccacatcgacgtgaacatggagtgagcgagccaacggagaaatggcgatgggaatggaggtgcagctggtgggagcagttggcacgccgatgaccggacgaagcaagtgaggcaagggatggacgtcgcacttcaatacgtgcctggcggcaccgacattccgatgcagcggctacccccggagccactcgtcgtccatgaaaagggcgacgaactggcctggcaagatctggcggcgcggggatcgaatggacggacgacaagagcgagcgaagaagtcctggcggcttggtgagaaaatggtggcgctgggggcgatgggaacggaggtgcggatggtggcagcagtggagtgagcgagcgtggcctggtttcttcttgaggaaatggcattgcagaggcgatgggaatggagatgcgaatggggggaggagttgccgtgccgacggccgaccgcgatttttttgggaagaatcgtgagaagggataacacacagagagaaaaatgagtgttaccttcgcgttacaggaatgaagcgacggcgacgtcgagactgattgtcgtcgtccgcggccatggggcggagcaccttccggagaagtcgagacttatacgattaaaaaaggtaggcgaagagtcggcgcagcatttcacacgcagtagtgactgacacctggatggttggattagtggcacggacaaacgatcttacggctacggaaatttggacgatgtgtccaccttcgtttgcgagcagcggaccctggtttgatatattaaaaaaaggcagccgaagagtcggcgcagcatttcacacgcagtagtgagtgacacctggatggttggattagtggcacggacaaacgatcttacggctacggaaatttggacgacgtgtccaccctcgtttgcgagtagcggaccctggtttaatatatagaaatagtgttgagttctcaacactgtatactcctgaaagtgacacgggcccatggaatgtgacactatcgttcagaactcatgaaagtgacacgttgttcggtgtgaaagtgttgatttagggtttagtgtaaccgcccgttcggtgtggaagtgttcaaatttctctacgcgcgttcggtagcctcaccgacggcgacggcgacctcacctcaccgacggcgacggcctcggcgacggcgacaacgatccccaattctcttcgcgacctgaccgtctccacttcggtaaacccaccttcccttctctcctcgttccttgtcagggaaccgcctcaccgattctgatgtcgaaggtaacctggtgccgatccgcaggggtgaagaagaaagccaacatgccacaggggaagagtaagaagaacgtggtgaaggagaaagccaaaaagattaagaagaacgcggaatcgagagccaaagttcatgaaaatacagatcaaattgagatcaacattagagaaggtgtttcaatttggataacaaaggctgcagtgcaaaaatgttttgagtttccccctggtacagataagaagctgccaatagatccaactacaaaaacatttgattcactctacagagtattgagtgtttcagaaaaaaaaatcaatgtaaagaagaagaagatgaaggagaatatgaaggagaagcaggttgaggaggagaagattgagatgaacatggaggagaagaagcagaatctggttgaggatgaaggtagtcaacaggaggaaagtgaagaggaggacggtgaagatggggaaattggagaggaggaaggtgaagatggggcaattggagatgctaaagtggggggagatggagacaaggaaagtgctaaaaggggggggataaaggttgctgtcagaagaaatgttttgactcctttgaacatcaatttgatgttacagaacatcaacaacgatgagattctcaaacttcttgttaaaagaaatgaagacactgatggtacagaaccgaatcttgacattgacctgattgtcagatgtttctttgcggtgagcagtgttgctgagtttggcaaggataagaagaaactgatatcagggtgtacaactgtgctaatggttgttttcttggaccatctcgtggaaaaccctttggatcctttgaccatccctaggatcaacttgtatacttcagattttatcgcagacctgataatggtacccaaggatagccctggccctgaaaaaaagcgtcgtaagactcaagatgaaaaagaagactagtaatgttataaagaatctcgctactctcaattttaagaattcggaggatacatgctatcatgaagattcagaaatggtgccaagtccagggagagcatcgccggttgttgcttctgtacaatctcataagaactttgttgatcatgcagatttagaaattgtgccatctcatgagaactctgttgatctacatagtgtttacatggcacatgtattggaaagaagcagacaaagcatagtagtggacatattggactacaatatacctgaatctacttttgcagattgtttgctacctacaggtcatatgcacacagatgtattttatttacaatgccaactgttgtcaaaggattggaaggataaagtaattcttagctggaaagctactcaagaactgattcatcaagatattggagttaaggagctggacaaggaacttactgcagaggttatgaacaaagtggatctggtttgtgctttgttttatattacagtagagttttttcagattgacagtagagtttgtgctttttttagatatttattcctatcattcatgccggtcactggtcccttgttattctttccactgccaaacaagagacatatatccttgactcctacccaaggcacagtggggtggccaaggatgttttaactcaactgcagaagtatttggataataaacacaactttgacatgtctaactacactgaccatgtgccacctgttcagcatcaaaaaaacaattacgattgtggctttcatgttttattgtatattgaagaattcatgaaggagaagatgtataaaatcaacaaaaaaatggtgttgaaattcagaaagcagctttgcatgaatctcttgtaccatcctttgaacagaataaatcttgtggaattcagaaagaagctgggtattacattgaaaagaaaacttcctggtatacttgatcttactattgaaggtgagaggagtgaatctgaggctgcagtgataattgaaatagagaacagagatgataagactctagaggatgaacatatttcagttgagaaagagtaaggtaaaaaagaagagcatgtactatcaactgacacaaagaatgacgaagcttcatccccatctgacgaagagcctgagcagagtgagtcatctgagcagactgtgtatgaaagatggatgattccaaaggatcattatcacctgagaaagagcaagctggagaaaaatatcctcaaacgaaaaaagaggttgggcaaagacaacatgtcctctcaggatatgatttctccagtgtttggcaagaggcttgtgcctgcaaacacacattttacctctcttaggaagttgcgaaaacacaagtttacgtctgataagatcaacgatgagatctgcaaacatatcttgaactacaatgaacgggagttgttaagtgtggggcagactaccatgactgggggtcagctggaaaagtacgtaaatgaaggtgacaatggtgataaaatactcagagcattcatcacatgcttcacttgtgatgaaaagttcaatcaagggaacatcacaaccgtcatcccgccacatgaagtatccgaagagggtgaactctccaaagttgatgctgcacaacttgtagaagaaatcaaagctgtactcaaaggcaccaatgttgcacgtgtacgcaaagacaccgaatccaccaaagatcccaaagtgaaagtctttcgaaacatgaggaggacatttatattttttcctttctacaagaatgaagaattgtttgtatttcatgtcgatacgaaaagactacccatcattgatgctctgttttgcaagatgtcatcattgtcgtttgaagatagatcctgactaggaaagtctatcatgggctgtctactcaaagccatgaaggattccggcttcatggtgaaaaaatatggtgattgtaggttcacagttactgtaactgaactcgaattcaaagatagtgcctcagcgctcataagttttattgagaacttcacttctaagttggacgacaatgccaagaaactgaaaaagggtgacaaggactggctggaaccttacaagaagtcgacagtggcataccttgtttgtcacactgaaaataaggtggtgttgcctgacgatattgtgaagtacaagcaaaacaagtgaggtggttgagtcgttaatgggtccagtggctgtgttttaagacttgtatcacactacttgtatggctttattctctgaagctgttccattgttgccgttagtaacaggtgttgcttttgtctctgctcagtgggtgattcatttcatccagagttgctgcaactttaatcagtctatagtgttgggttcctagctcagtgttgagttctaaatgatcgtgttgtgttcctaccaagtgttgagctgcacgacggcgtgcgcagccgcagccgcaccggcgaggagcgtttagaactctgttgatctacatagtgtttacaccggctcaacagagttctcatgttgatttttgaaggacccacgtgttgggttcctgctcagtgttgagttctgaacgatagtgttatgttccatgggcccttgttgatttcgagaggacccacgggccgaacggcgtgtcactttcatgcgtctatagtgttgggttcctgtctagtgttgagttctcaactatggtgttgtgttcctccaagaagttgagtttcaggggcctattatattgtctcagttaatgggtaactcagttaatcctatatattgtgtcagttaatgggaactcagttaatggtatatgttgtctcagttaatgggtaactcagttaatccagcatatcattgatgagatc

SEQ ID NO: 51994 - DNA, 8180 bp, Zea Mays
attgagacacagacagagcagctgagcaccgcacacacggacgccataccctagattggagcgcaccacgggcgccggcggccggcggcccgccaccggtgattgacgccccctcctcggtccccagcgcggcgagcaggctatttgaggagatgccgtcattgtcatccttactctctggctccaatactgcgagtgctgagcttcctctaatcccttgcaagctctgcaatggggtggtgattgagcgggtctccaaacaaccagaaaccacgtcgaggaagttctaccggtgcagagccaagaaaacggatgggtcttaatgtgattttttccactggcaagcgagctatgttgttttgttaatcgaggatgggtttgtcagtggtgatcgacgccttgagttgttaatgatcgcacttaatgatcatggcaaagccgttgaatctctaaccaattccatcagagagatgaagaaaaagctgtccaacctggagttagtgatggaagagctggataacgtgaaaaatttgatgaaggcagccatggttgaaattgaggaaaacaagaaatcgacagctgctgcattgaaactgatggagaatgagctgcaaaagctgaaagggtcaactaaagtgaaacctaggaatatggcacagtgttttctgcttttggcattgattgggtggtttgtggtgggacagatgaattggggggaggaagcatccagccgatttctgctgagaggctaatgaacataggatggacttttcaatagctagatgtaatcagaactggtttatattttctctgctaacatggcgtagtagccaggacactttgcttgtcgattattatttttagcaagatgttggtgtgaagttggaaaggcttcccacggtccgaagcccgtgtcactttccagagtctacagtgttgcgttctgaatgctagtgttatgttccatgtcccgtgtcactttctggagtctaccgtggtgctcctgctaagtgttgagtcggatgttgattttgggaggacccacgggcgaagggcgtgtcactttcatgaggtatagtgttgggttccttctcagtgtagcgttccttcaaggtgttgagttttagggtcccatgttgatttttgggaggacccacggtccgaagcccgtgtcactttccggagtccacagtgttgcgctctgaatgctagtgttaggttccatgtcccgtgtcactttctggagtctactgtggggctactgctaagtgttgagtcagattggcggatgttgattttgggaggacccactggcgaaccccgtgtcactttcataagttcatagtgttgagttctggaaggtagtgttacgttccatgtcccgtgtcacttctaggagtctacagtgttgcgttcctgatcagtgttgagctctaaacgatggtgttgcgttgctgatcagtattgagttgggcgcatgttgattttgggaggacccacgggccaacgacgtgtcactttcatgagttataagtgtcgggttccaggtcagtgttgggttctgaacgatggtgttgcgttcctccaaggtgttgagtttcaggggcccatgttgatttttgaaggacccacgggccgaaccccgtgtcactttcatgaggtatagtgttgggttccttatcagagttgcgttcggatatatagagttgtgttcctccaatctgtgctgggtttcagggttccatgttgatttttgggaggacccgcggtcggaagcccgtgtcactttccggagtctacagcgttgcgttctgaatgctagtgttatgttccatgtcccgtgtcactttctggagtctaccgtggcgctcctgctaagtgttgagtcggatgggcggatgttgattttgggaggacccacgggtgaagggtgtgtccctttcatgcggtatagtgttgggttccttatcagtgttgcgttccttcaaggcgttgagtttcagggtcccatgttgatttttgggaggacccacgtgttggagtctaccatggggctcctgctaagtgttgagtcagatgggcagatgttggttttgggaggacccacgggcgaagggcgtgtcactttcatgcggtatagtgttgcgttcctccaatctgttgggtttcagggtcccatgttgatttttgggaggacccgcggtccgtagtccgtgtcactttccggagtctacagtgttgcgttctgaatgctagtgttatgttccataacccgtgtcactttctggagtctaccgtggggcccttctaagtgttgagtcggatggggggatgttggttttcggaggacccacgggcgaagggcgtgtcactttcatgcggtatagtgttgtgttccttcatctgttgcgtttcagggttccatgttgattttttggaggacccgtggtccgtagtccgtgtcactttccggagtctacagtgttgcgttctgaatgctagtgttatgttccataacccgtgtcactttctggagtctaccgtggggctccttctaagtgttgagtcggatgggcggatgttggttttgggaggacccacgggcgaacgacgtgtcactttcatgagttcgtagtgttgagttccatatcccgtgtcactttcaggagtatatagtgttgcgttcctgatccatgttgagttctaaacgatggtgtggcgttcctaatcagtattgagttgggcgcatgttgattttgggaggacccacgggcgaacgacgtgtcactttcatgagttatagtgttgatttttgaaggacccacgagccgaaccccgtgtcactttcatgaggtatagtgttgggttcgtgctcagtgtggcgttcgacactatggtgttgcgttcctccaatctgttgggtttcagggtcccatgttgatttttggcaggacccgcagtctgaagcccgtgtcactttccggagtctacagtgttgcgttctgaatactagtgttatgttccatgtcccgtgtcactttctggagtctaccgtggcgctcctgctaagtgttgagtcagatttgcggatgttgattttgggaggacccacgggtgaagggcgtgtcactttcatgaggtatagtgttgggctccttctcagtgttgtgttcggaactatgctgttgcgttccttcaaggtgttgagtttcagggtcccatgttgatttttgggagttatagtgttgagtttcagggtcccttttagactggaaaagtcttctgccataatcgtcagatttacctaaatgatgtaaaaaatggtttggaaaactctaaaacattaaataaagatcacataacattaattaataaaaaatgatataatacacaaacattaagtaagaattatagaaagttgaggcaccagtttgtatgcaggattcttcctcctaagatgtggaaagctaattagttttaaaccataatccacctcaatatatatgaattaaagtgcatagatgtggcaacaacgttgaagataaacatctatttgtacagcaaacgcaggcttcccaaagcggcatggtcagttcgagctcgccctggggatgccgccgctctgcccatcgcagacgccgtggagcatcgacggcgacgtcgcaggacatgaggtcgcctaccagctggtgacccgaaacacccaggcggcccgccgccacgtcgagataacggccctgacggtgccgacattttggggcagcgggcattgcccggagccgctcgtcatcctaagaaagggcagcacggtggcctgctagtacgtgacgggatctggcagcgcagggaacggagggacagacggcaagagcatgcaccacatcgacgtgaacatggagtgagcgagccaacggagaaatggcgatgggaatggaggtgcagctggtgggagcagttggcacgccgatgaccggacgaagcaagtgaggcaagggatggacgtcgcacttcaatacgtgcctggcggcaccgacattccgatgcagcggctacccccggagccactcgtcgtccatgaaaagggcgacgaactggcctggcaagatctggcggcgcggggatcgaatggacggacgacaagagcgagcgaagaagtcctggcggcttggtgagaaaatggtggcgctgggggcgatgggaacggaggtgcggatggtggcagcagtggagaatgaagcgacggcgacgtcgagactgattgtcgtcgtccgcggccatggggcggagcaccttccggagaagtcgagacttatacgattaaaaaagggaaccgcctcaccgattctgatgtcgaaggtaacctggtgccgatccgcaggggtgaagaagaaagccaacatgccacaggggaagagtaagaagaacgtggtgaaggagaaagccaaaaagattaagaagaacgcggaatcgagagccaaagttcatgaaaatacagatcaaattgagatcaacattagagaaggtgtttcaatttggataacaaaggctgcagtgcaaaaatgttttgagtttccccctggtacagataagaagctgccaatagatccaactacaaaaacatttgattcactctacagagtattgagtgtttcagaaaaaaaaatcaatgtaaagaagaagaagatgaaggagaatatgaaggagaagcaggttgaggaggagaagattgagatgaacatggaggagaagaagcagaatctggttgaggatgaaggtagtcaacaggaggaaagtgaagaggaggacggtgaagatggggaaattggagaggaggaaggtgaagatggggcaattggagatgctaaagtggggggagatggagacaaggaaagtgctaaaaggggggggataaaggttgctgtcagaagaaatgttttgactcctttgaacatcaatttgatgttacagaacatcaacaacgatgagattctcaaacttcttgttaaaagaaatgaagacactgatggtacagaaccgaatcttgacattgacctgattgtcagatgtttctttgcggtgagcagtgttgctgagtttggcaaggataagaagaaactgatatcagggtgtacaactgtgctaatggttgttttcttggaccatctcgtggaaaaccctttggatcctttgaccatccctaggatcaacttgtatacttcagattttatcgcagacctgataatggtacccaaggatagccctggccctgaaaaaaagcgtcgtaagactcaagatgaaaaagaagactagtaatgttataaagaatctcgctactctcaattttaagaattcggaggatacatgctatcatgaagattcagaaatggtgccaagtccagggagagcatcgccggttgttgcttctgtacaatctcataagaactttgttgatcatgcagatttagaaattgtgccatctcatgagaactctgttgatctacatagtgtttacatggcacatgtattggaaagaagcagacaaagcatagtagtggacatattggactacaatatacctgaatctacttttgcagattgtttgctacctacaggtcatatgcacacagatgtattttatttacaatgccaactgttgtcaaaggattggaaggataaagtaattcttagctggaaagctactcaagaactgattcatcaagatattggagttaaggagctggacaaggaacttactgcagaggttatgaacaaagtggatctggtttgtgctttgttttatattacagtagagttttttcagattgacagtagagtttgtgctttttttagatatttattcctatcattcatgccggtcactggtcccttgttattctttccactgccaaacaagagacatatatccttgactcctacccaaggcacagtggggtggccaaggatgttttaactcaactgcagaagtatttggataataaacacaactttgacatgtctaactacactgaccatgtgccacctgttcagcatcaaaaaaacaattacgattgtggctttcatgttttattgtatattgaagaattcatgaaggagaagatgtataaaatcaacaaaaaaatggtgttgaaattcagaaagcagctttgcatgaatctcttgtaccatcctttgaacagaataaatcttgtggaattcagaaagaagctgggtattacattgaaaagaaaacttcctggtatacttgatcttactattgaaggtgagaggagtgaatctgaggctgcagtgataattgaaatagagaacagagatgataagactctagaggatgaacatatttcagttgagaaagagtaaggtaaaaaagaagagcatgtactatcaactgacacaaagaatgacgaagcttcatccccatctgacgaagagcctgagcagagtgagtcatctgagcagactgtgtatgaaagatggatgattccaaaggatcattatcacctgagaaagagcaagctggagaaaaatatcctcaaacgaaaaaagaggttgggcaaagacaacatgtcctctcaggatatgatttctccagtgtttggcaagaggcttgtgcctgcaaacacacattttacctctcttaggaagttgcgaaaacacaagtttacgtctgataagatcaacgatgagatctgcaaacatatcttgaactacaatgaacgggagttgttaagtgtggggcagactaccatgactgggggtcagctggaaaagtacgtaaatgaaggtgacaatggtgataaaatactcagagcattcatcacatgcttcacttgtgatgaaaagttcaatcaagggaacatcacaaccgtcatcccgccacatgaagtatccgaagagggtgaactctccaaagttgatgctgcacaacttgtagaagaaatcaaagctgtactcaaaggcaccaatgttgcacgtgtacgcaaagacaccgaatccaccaaagatcccaaagtgaaagtctttcgaaacatgaggaggacatttatattttttcctttctacaagaatgaagaattgtttgtatttcatgtcgatacgaaaagactacccatcattgatgctctgttttgcaagatgtcatcattgtcgtttgaagatagatcctgactaggaaagtctatcatgggctgtctactcaaagccatgaaggattccggcttcatggtgaaaaaatatggtgattgtaggttcacagttactgtaactgaactcgaattcaaagatagtgcctcagcgctcataagttttattgagaacttcacttctaagttggacgacaatgccaagaaactgaaaaagggtgacaaggactggctggaaccttacaagaagtcgacagtggcataccttgtttgtcacactgaaaataaggtggtgttgcctgacgatattgtgaagtacaagcaaaacaagtgaggtggttgagtcgttaatgggtccagtggctgtgttttaagacttgtatcacactacttgtatggctttattctctgaagctgttccattgttgccgttagtaacaggtgttgcttttgtctctgctcagtgggtgattcatttcatccagagttgctgcaactttaatcagtctatagtgttgggttcctagctcagtgttgagttctaaatgatcgtgttgtgttcctaccaagtgttgagctgcacgacggcgtgcgcagccgcagccgcaccggcgaggagcgtttagaactctgttgatctacatagtgtttacaccggctcaacagagttctcatgttgatttttgaaggacccacgtgttgggttcctgctcagtgttgagttctgaacgatagtgttatgttccatgggcccttgttgatttcgagaggacccacgggccgaacggcgtgtcactttcatgcgtctatagtgttgggttcctgtctagtgttgagttctcaactatggtgttgtgttcctccaagaagttgagtttcaggggcctattatattgtctcagttaatgggtaactcagttaatcctatatattgtgtcagttaatgggaactcagttaatggtatatgttgtctcagttaatgggtaactcagttaatccagcatatcattgatgagatc

SEQ ID NO: 51995 - DNA, 7928 bp, Zea Mays
attgagacacagacagagcagctgagcaccgcacacacggacgccataccctagattggagcgcaccacgggcgccggcggccggcggcccgccaccggtgattgacgccccctcctcggtccccagcgcggcgagcaggctatttgaggagatgccgtcattgtcatccttactctctggctccaatactgcgagtgctgagcttcctctaatcccttgcaagctctgcaatggggtggtgattgagcgggtctccaaacaaccagaaaccacgtcgaggaagttctaccggtgcagagccaagaaaacggatgggtcttaatgtgattttttccactggcaagcgagctatgttgttttgttaatcgaggatgggtttgtcagtggtgatcgacgccttgagttgttaatgatcgcacttaatgatcatggcaaagccgttgaatctctaaccaattccatcagagagatgaagaaaaagctgtccaacctggagttagtgatggaagagctggataacgtgaaaaatttgatgaaggcagccatggttgaaattgaggaaaacaagaaatcgacagctgctgcattgaaactgatggagaatgagctgcaaaagctgaaagggtcaactaaagtgaaacctaggaatatggcacagtgttttctgcttttggcattgattgggtggtttgtggtgggacagatgaattggggggaggaagcatccagccgatttctgctgagaggctaatgaacataggatggacttttcaatagctagatgtaatcagaactggtttatattttctctgctaacatggcgtagtagccaggacactttgcttgtcgattattatttttagcaagatgttggtgtgaagttggaaaggcttcccacggtccgaagcccgtgtcactttccagagtctacagtgttgcgttctgaatgctagtgttatgttccatgtcccgtgtcactttctggagtctaccgtggtgctcctgctaagtgttgagtcggatgttgattttgggaggacccacgggcgaagggcgtgtcactttcatgaggtatagtgttgggttccttctcagtgtagcgttccttcaaggtgttgagttttagggtcccatgttgatttttgggaggacccacggtccgaagcccgtgtcactttccggagtccacagtgttgcgctctgaatgctagtgttaggttccatgtcccgtgtcactttctggagtctactgtggggctactgctaagtgttgagtcagattggcggatgttgattttgggaggacccactggcgaaccccgtgtcactttcataagttcatagtgttgagttctggaaggtagtgttacgttccatgtcccgtgtcacttctaggagtctacagtgttgcgttcctgatcagtgttgagctctaaacgatggtgttgcgttgctgatcagtattgagttgggcgcatgttgattttgggaggacccacgggccaacgacgtgtcactttcatgagttataagtgtcgggttccaggtcagtgttgggttctgaacgatggtgttgcgttcctccaaggtgttgagtttcaggggcccatgttgatttttgaaggacccacgggccgaaccccgtgtcactttcatgaggtatagtgttgggttccttatcagagttgcgttcggatatatagagttgtgttcctccaatctgtgctgggtttcagggttccatgttgatttttgggaggacccgcggtcggaagcccgtgtcactttccggagtctacagcgttgcgttctgaatgctagtgttatgttccatgtcccgtgtcactttctggagtctaccgtggcgctcctgctaagtgttgagtcggatgggcggatgttgattttgggaggacccacgggtgaagggtgtgtccctttcatgcggtatagtgttgggttccttatcagtgttgcgttccttcaaggcgttgagtttcagggtcccatgttgatttttgggaggacccacgtgttggagtctaccatggggctcctgctaagtgttgagtcagatgggcagatgttggttttgggaggacccacgggcgaagggcgtgtcactttcatgcggtatagtgttgcgttcctccaatctgttgggtttcagggtcccatgttgatttttgggaggacccgcgggttccatgttgattttttggaggacccgtggtccgtagtccgtgtcactttccggagtctacagtgttgcgttctgaatgctagtgttatgttccataacccgtgtcactttctggagtctaccgtggggctccttctaagtgttgagtcggatgggcggatgttggttttgggaggacccacgggcgaacgacggtcccatgttgatttttggcaggacccgcagtctgaagcccgtgtcactttccggagtctacagtgttgcgttctgaatactagtgttatgttccatgtcccgtgtcactttctggagtctaccgtggcgctcctgctaagtgttgagtcagatttgcggatgttgattttgggaggacccacggcaaacgcaggcttcccaaagcggcatggtcagttcgagctcgccctggggatgccgccgctctgcccatcgcagacgccgtggagcatcgacggcgacgtcgcaggacatgaggtcgcctaccagctggtgacccgaaacacccaggcggcccgccgccacgtcgagataacggccctgacggtgccgacattttggggcagcgggcattgcccggagccgctcgtcatcctaagaaagggcagcacggtggcctgctagtacgtgacgggatctggcagcgcagggaacggagggacagacggcaagagcatgcaccacatcgacgtgaacatggagtgagcgagccaacggagaaatggcgatgggaatggaggtgcagctggtgggagcagttggcacgccgatgaccggacgaagcaagtgaggcaagggatggacgtcgcacttcaatacgtgcctggcggcaccgacattccgatgcagcggctacccccggagccactcgtcgtccatgaaaagggcgacgaactggcctggcaagatctggcggcgcggggatcgaatggacggacgacaagagcgagcgaagaagtcctggcggcttggtgagaaaatggtggcgctgggggcgatgggaacggaggtgcggatggtggcagcagtggagtgagcgagcgtggcctggtttcttcttgaggaaatggcattgcagaggcgatgggaatggagatgcgaatggggggaggagttgccgtgccgacggccgaccgcgatttttttgggaagaatcgtgagaagggataacacacagagagaaaaatgagtgttaccttcgcgttacaggaatgaagcgacggcgacgtcgagactgattgtcgtcgtccgcggccatggggcggagcaccttccggagaagtcgagacttatacgattaaaaaaggtaggcgaagagtcggcgcagcatttcacacgcagtagtgactgacacctggatggttggattagtggcacggacaaacgatcttacggctacggaaatttggacgatgtgtccaccttcgtttgcgagcagcggaccctggtttgatatattaaaaaaaggcagccgaagagtcggcgcagcatttcacacgcagtagtgagtgacacctggatggttggattagtggcacggacaaacgatcttacggctacggaaatttggacgacgtgtccaccctcgtttgcgagtagcggaccctggtttaatatatagaaatagtgttgagttctcaacactgtatactcctgaaagtgacacgggcccatggaatgtgacactatcgttcagaactcatgaaagtgacacgttgttcggtgtgaaagtgttgatttagggtttagtgtaaccgcccgttcggtgtggaagtgttcaaatttctctacgcgcgttcggtagcctcaccgacggcgacggcgacctcacctcaccgacggcgacggcctcggcgacggcgacaacgatccccaattctcttcgcgacctgaccgtctccacttcggggtgaagaagaaagccaacatgccacaggggaagagtaagaagaacgtggtgaaggagaaagccaaaaagattaagaagaacgcggaatcgagagccaaagttcatgaaaatacagatcaaattgagatcaacattagagaaggtgtttcaatttggataacaaaggctgcagtgcaaaaatgttttgagtttccccctggtacagataagaagctgccaatagatccaactacaaaaacatttgattcactctacagagtattgagtgtttcagaaaaaaaaatcaatgtaaagaagaagaagatgaaggagaatatgaaggagaagcaggttgaggaggagaagattgagatgaacatggaggagaagaagcagaatctggttgaggatgaaggtagtcaacaggaggaaagtgaagaggaggacggtgaagatggggaaattggagaggaggaaggtgaagatggggcaattggagatgctaaagtggggggagatggagacaaggaaagtgctaaaaggggggggataaaggttgctgtcagaagaaatgttttgactcctttgaacatcaatttgatgttacagaacatcaacaacgatgagattctcaaacttcttgttaaaagaaatgaagacactgatggtacagaaccgaatcttgacattgacctgattgtcagatgtttctttgcggtgagcagtgttgctgagtttggcaaggataagaagaaactgatatcagggtgtacaactgtgctaatggttgttttcttggaccatctcgtggaaaaccctttggatcctttgaccatccctaggatcaacttgtatacttcagattttatcgcagacctgataatggtacccaaggatagccctggccctgaaaaaaagcgtcgtaagactcaagatgaaaaagaagactagtaatgttataaagaatctcgctactctcaattttaagaattcggaggatacatgctatcatgaagattcagaaatggtgccaagtccagggagagcatcgccggttgttgcttctgtacaatctcataagaactttgttgatcatgcagatttagaaattgtgccatctcatgagaactctgttgatctacatagtgtttacatggcacatgtattggaaagaagcagacaaagcatagtagtggacatattggactacaatatacctgaatctacttttgcagattgtttgctacctacaggtcatatgcacacagatgtattttatttacaatgccaactgttgtcaaaggattggaaggataaagtaattcttagctggaaagctactcaagaactgattcatcaagatattggagttaaggagctggacaaggaacttactgcagaggttatgaacaaagtggatctggtttgtgctttgttttatattacagtagagttttttcagattgacagtagagtttgtgctttttttagatatttattcctatcattcatgccggtcactggtcccttgttattctttccactgccaaacaagagacatatatccttgactcctacccaaggcacagtggggtggccaaggatgttttaactcaactgcagaagtatttggataataaacacaactttgacatgtctaactacactgaccatgtgccacctgttcagcatcaaaaaaacaattacgattgtggctttcatgttttattgtatattgaagaattcatgaaggagaagatgtataaaatcaacaaaaaaatggtgttgaaattcagaaagcagctttgcatgaatctcttgtaccatcctttgaacagaataaatcttgtggaattcagaaagaagctgggtattacattgaaaagaaaacttcctggtatacttgatcttactattgaaggtgagaggagtgaatctgaggctgcagtgataattgaaatagagaacagagatgataagactctagaggatgaacatatttcagttgagaaagagtaaggtaaaaaagaagagcatgtactatcaactgacacaaagaatgacgaagcttcatccccatctgacgaagagcctgagcagagtgagtcatctgagcagactgtgtatgaaagatggatgattccaaaggatcattatcacctgagaaagagcaagctggagaaaaatatcctcaaacgaaaaaagaggttgggcaaagacaacatgtcctctcaggatatgatttctccagtgtttggcaagaggcttgtgcctgcaaacacacattttacctctcttaggaagttgcgaaaacacaagtttacgtctgataagatcaacgatgagatctgcaaacatatcttgaactacaatgaacgggagttgttaagtgtggggcagactaccatgactgggggtcagctggaaaagtacgtaaatgaaggtgacaatggtgataaaatactcagagcattcatcacatgcttcacttgtgatgaaaagttcaatcaagggaacatcacaaccgtcatcccgccacatgaagtatccgaagagggtgaactctccaaagttgatgctgcacaacttgtagaagaaatcaaagctgtactcaaaggcaccaatgttgcacgtgtacgcaaagacaccgaatccaccaaagatcccaaagtgaaagtctttcgaaacatgaggaggacatttatattttttcctttctacaagaatgaagaattgtttgtatttcatgtcgatacgaaaagactacccatcattgatgctctgttttgcaagatgtcatcattgtcgtttgaagatagatcctgactaggaaagtctatcatgggctgtctactcaaagccatgaaggattccggcttcatggtgaaaaaatatggtgattgtaggttcacagttactgtaactgaactcgaattcaaagatagtgcctcagcgctcataagttttattgagaacttcacttctaagttggacgacaatgccaagaaactgaaaaagggtgacaaggactggctggaaccttacaagaagtcgacagtggcataccttgtttgtcacactgaaaataaggtggtgttgcctgacgatattgtgaagtacaagcaaaacaagtgaggtggttgagtcgttaatgggtccagtggctgtgttttaagacttgtatcacactacttgtatggctttattctctgaagctgttccattgttgccgttagtaacaggtgttgcttttgtctctgctcagtgggtgattcatttcatccagagttgctgcaactttaatcagtctatagtgttgggttcctagctcagtgttgagttctaaatgatcgtgttgtgttcctaccaagtgttgagctgcacgacggcgtgcgcagccgcagccgcaccggcgaggagcgtttagaactctgttgatctacatagtgtttacaccggctcaacagagttctcatgttgatttttgaaggacccacgtgttgggttcctgctcagtgttgagttctgaacgatagtgttatgttccatgggcccttgttgatttcgagaggacccacgggccgaacggcgtgtcactttcatgcgtctatagtgttgggttcctgtctagtgttgagttctcaactatggtgttgtgttcctccaagaagttgagtttcaggggcctattatattgtctcagttaatgggtaactcagttaatcctatatattgtgtcagttaatgggaactcagttaatggtatatgttgtctcagttaatgggtaactcagttaatccagcatatcattgatgagatc

SEQ ID NO: 51996 - DNA, 8143 bp, Zea Mays
attgagacacagacagagcagctgagcaccgcacacacggacgccataccctagattggagcgcaccacgggcgccggcggccggcggcccgccaccggtgattgacgccccctcctcggtccccagcgcggcgagcaggctatttgaggagatgccgtcattgtcatccttactctctggctccaatactgcgagtgctgagcttcctctaatcccttgcaagctctgcaatggggtggtgattgagcgggtctccaaacaaccagaaaccacgtcgaggaagttctaccggtgcagagccaagaaaacggatgggtcttaatgtgattttttccactggcaagcgagctatgttgttttgttaatcgaggatgggtttgtcagtggtgatcgacgccttgagttgttaatgatcgcacttaatgatcatggcaaagccgttgaatctctaaccaattccatcagagagatgaagaaaaagctgtccaacctggagttagtgatggaagagctggataacgtgaaaaatttgatgaaggcagccatggttgaaattgaggaaaacaagaaatcgacagctgctgcattgaaactgatggagaatgagctgcaaaagctgaaagggtcaactaaagtgaaacctaggaatatggcacagtgttttctgcttttggcattgattgggtggtttgtggtgggacagatgaattggggggaggaagcatccagccgatttctgctgagaggctaatgaacataggatggacttttcaatagctagatgtaatcagaactggtttatattttctctgctaacatggcgtagtagccaggacactttgcttgtcgattattatttttagcaagatgttggtgtgaagttggaaaggcttcccacggtccgaagcccgtgtcactttccagagtctacagtgttgcgttctgaatgctagtgttatgttccatgtcccgtgtcactttctggagtctaccgtggtgctcctgctaagtgttgagtcggatgttgattttgggaggacccacgggcgaagggcgtgtcactttcatgaggtatagtgttgggttccttctcagtgtagcgttccttcaaggtgttgagttttagggtcccatgttgatttttgggaggacccacggtccgaagcccgtgtcactttccggagtccacagtgttgcgctctgaatgctagtgttaggttccatgtcccgtgtcactttctggagtctactgtggggctactgctaagtgttgagtcagattggcggatgttgattttgggaggacccactggcgaaccccgtgtcactttcataagttcatagtgttgagttctggaaggtagtgttacgttccatgtcccgtgtcacttctaggagtctacagtgttgcgttcctgatcagtgttgagctctaaacgatggtgttgcgttgctgatcagtattgagttgggcgcatgttgattttgggaggacccacgggccaacgacgtgtcactttcatgagttataagtgtcgggttccaggtcagtgttgggttctgaacgatggtgttgcgttcctccaaggtgttgagtttcaggggcccatgttgatttttgaaggacccacgggccgaaccccgtgtcactttcatgaggtatagtgttgggttccttatcagagttgcgttcggatatatagagttgtgttcctccaatctgtgctgggtttcagggttccatgttgatttttgggaggacccgcggtcggaagcccgtgtcactttccggagtctacagcgttgcgttctgaatgctagtgttatgttccatgtcccgtgtcactttctggagtctaccgtggcgctcctgctaagtgttgagtcggatgggcggatgttgattttgggaggacccacgggtgaagggtgtgtccctttcatgcggtatagtgttgggttccttatcagtgttgcgttccttcaaggcgttgagtttcagggtcccatgttgatttttgggaggacccacgtgttggagtctaccatggggctcctgctaagtgttgagtcagatgggcagatgttggttttgggaggacccacgggcgaagggcgtgtcactttcatgcggtatagtgttgcgttcctccaatctgttgggtttcagggtcccatgttgatttttgggaggacccgcggtccgtagtccgtgtcactttccggagtctacagtgttgcgttctgaatgctagtgttatgttccataacccgtgtcactttctggagtctaccgtggggcccttctaagtgttgagtcggatggggggatgttggttttcggaggacccacgggcgaagggcgtgtcactttcatgcggtatagtgttgtgttccttcatctgttgcgtttcagggttccatgttgattttttggaggacccgtggtccgtagtccgtgtcactttccggagtctacagtgttgcgttctgaatgctagtgttatgttccataacccgtgtcactttctggagtctaccgtggggctccttctaagtgttgagtcggatgggcggatgttggttttgggaggacccacgggcgaacgacggtcccatgttgatttttggcaggacccgcagtctgaagcccgtgtcactttccggagtctacagtgttgcgttctgaatactagtgttatgttccatgtcccgtgtcactttctggagtctaccgtggcgctcctgctaagtgttgagtcagatttgcggatgttgattttgggaggacccacggcaaacgcaggcttcccaaagcggcatggtcagttcgagctcgccctggggatgccgccgctctgcccatcgcagacgccgtggagcatcgacggcgacgtcgcaggacatgaggtcgcctaccagctggtgacccgaaacacccaggcggcccgccgccacgtcgagataacggccctgacggtgccgacattttggggcagcgggcattgcccggagccgctcgtcatcctaagaaagggcagcacggtggcctgctagtacgtgacgggatctggcagcgcagggaacggagggacagacggcaagagcatgcaccacatcgacgtgaacatggagtgagcgagccaacggagaaatggcgatgggaatggaggtgcagctggtgggagcagttggcacgccgatgaccggacgaagcaagtgaggcaagggatggacgtcgcacttcaatacgtgcctggcggcaccgacattccgatgcagcggctacccccggagccactcgtcgtccatgaaaagggcgacgaactggcctggcaagatctggcggcgcggggatcgaatggacggacgacaagagcgagcgaagaagtcctggcggcttggtgagaaaatggtggcgctgggggcgatgggaacggaggtgcggatggtggcagcagtggagtgagcgagcgtggcctggtttcttcttgaggaaatggcattgcagaggcgatgggaatggagatgcgaatggggggaggagttgccgtgccgacggccgaccgcgatttttttgggaagaatcgtgagaagggataacacacagagagaaaaatgagtgttaccttcgcgttacaggaatgaagcgacggcgacgtcgagactgattgtcgtcgtccgcggccatggggcggagcaccttccggagaagtcgagacttatacgattaaaaaaggtaggcgaagagtcggcgcagcatttcacacgcagtagtgactgacacctggatggttggattagtggcacggacaaacgatcttacggctacggaaatttggacgatgtgtccaccttcgtttgcgagcagcggaccctggtttgatatattaaaaaaaggcagccgaagagtcggcgcagcatttcacacgcagtagtgagtgacacctggatggttggattagtggcacggacaaacgatcttacggctacggaaatttggacgacgtgtccaccctcgtttgcgagtagcggaccctggtttaatatatagaaatagtgttgagttctcaacactgtatactcctgaaagtgacacgggcccatggaatgtgacactatcgttcagaactcatgaaagtgacacgttgttcggtgtgaaagtgttgatttagggtttagtgtaaccgcccgttcggtgtggaagtgttcaaatttctctacgcgcgttcggtagcctcaccgacggcgacggcgacctcacctcaccgacggcgacggcctcggcgacggcgacaacgatccccaattctcttcgcgacctgaccgtctccacttcggggtgaagaagaaagccaacatgccacaggggaagagtaagaagaacgtggtgaaggagaaagccaaaaagattaagaagaacgcggaatcgagagccaaagttcatgaaaatacagatcaaattgagatcaacattagagaaggtgtttcaatttggataacaaaggctgcagtgcaaaaatgttttgagtttccccctggtacagataagaagctgccaatagatccaactacaaaaacatttgattcactctacagagtattgagtgtttcagaaaaaaaaatcaatgtaaagaagaagaagatgaaggagaatatgaaggagaagcaggttgaggaggagaagattgagatgaacatggaggagaagaagcagaatctggttgaggatgaaggtagtcaacaggaggaaagtgaagaggaggacggtgaagatggggaaattggagaggaggaaggtgaagatggggcaattggagatgctaaagtggggggagatggagacaaggaaagtgctaaaaggggggggataaaggttgctgtcagaagaaatgttttgactcctttgaacatcaatttgatgttacagaacatcaacaacgatgagattctcaaacttcttgttaaaagaaatgaagacactgatggtacagaaccgaatcttgacattgacctgattgtcagatgtttctttgcggtgagcagtgttgctgagtttggcaaggataagaagaaactgatatcagggtgtacaactgtgctaatggttgttttcttggaccatctcgtggaaaaccctttggatcctttgaccatccctaggatcaacttgtatacttcagattttatcgcagacctgataatggtacccaaggatagccctggccctgaaaaaaagcgtcgtaagactcaagatgaaaaagaagactagtaatgttataaagaatctcgctactctcaattttaagaattcggaggatacatgctatcatgaagattcagaaatggtgccaagtccagggagagcatcgccggttgttgcttctgtacaatctcataagaactttgttgatcatgcagatttagaaattgtgccatctcatgagaactctgttgatctacatagtgtttacatggcacatgtattggaaagaagcagacaaagcatagtagtggacatattggactacaatatacctgaatctacttttgcagattgtttgctacctacaggtcatatgcacacagatgtattttatttacaatgccaactgttgtcaaaggattggaaggataaagtaattcttagctggaaagctactcaagaactgattcatcaagatattggagttaaggagctggacaaggaacttactgcagaggttatgaacaaagtggatctggtttgtgctttgttttatattacagtagagttttttcagattgacagtagagtttgtgctttttttagatatttattcctatcattcatgccggtcactggtcccttgttattctttccactgccaaacaagagacatatatccttgactcctacccaaggcacagtggggtggccaaggatgttttaactcaactgcagaagtatttggataataaacacaactttgacatgtctaactacactgaccatgtgccacctgttcagcatcaaaaaaacaattacgattgtggctttcatgttttattgtatattgaagaattcatgaaggagaagatgtataaaatcaacaaaaaaatggtgttgaaattcagaaagcagctttgcatgaatctcttgtaccatcctttgaacagaataaatcttgtggaattcagaaagaagctgggtattacattgaaaagaaaacttcctggtatacttgatcttactattgaaggtgagaggagtgaatctgaggctgcagtgataattgaaatagagaacagagatgataagactctagaggatgaacatatttcagttgagaaagagtaaggtaaaaaagaagagcatgtactatcaactgacacaaagaatgacgaagcttcatccccatctgacgaagagcctgagcagagtgagtcatctgagcagactgtgtatgaaagatggatgattccaaaggatcattatcacctgagaaagagcaagctggagaaaaatatcctcaaacgaaaaaagaggttgggcaaagacaacatgtcctctcaggatatgatttctccagtgtttggcaagaggcttgtgcctgcaaacacacattttacctctcttaggaagttgcgaaaacacaagtttacgtctgataagatcaacgatgagatctgcaaacatatcttgaactacaatgaacgggagttgttaagtgtggggcagactaccatgactgggggtcagctggaaaagtacgtaaatgaaggtgacaatggtgataaaatactcagagcattcatcacatgcttcacttgtgatgaaaagttcaatcaagggaacatcacaaccgtcatcccgccacatgaagtatccgaagagggtgaactctccaaagttgatgctgcacaacttgtagaagaaatcaaagctgtactcaaaggcaccaatgttgcacgtgtacgcaaagacaccgaatccaccaaagatcccaaagtgaaagtctttcgaaacatgaggaggacatttatattttttcctttctacaagaatgaagaattgtttgtatttcatgtcgatacgaaaagactacccatcattgatgctctgttttgcaagatgtcatcattgtcgtttgaagatagatcctgactaggaaagtctatcatgggctgtctactcaaagccatgaaggattccggcttcatggtgaaaaaatatggtgattgtaggttcacagttactgtaactgaactcgaattcaaagatagtgcctcagcgctcataagttttattgagaacttcacttctaagttggacgacaatgccaagaaactgaaaaagggtgacaaggactggctggaaccttacaagaagtcgacagtggcataccttgtttgtcacactgaaaataaggtggtgttgcctgacgatattgtgaagtacaagcaaaacaagtgaggtggttgagtcgttaatgggtccagtggctgtgttttaagacttgtatcacactacttgtatggctttattctctgaagctgttccattgttgccgttagtaacaggtgttgcttttgtctctgctcagtgggtgattcatttcatccagagttgctgcaactttaatcagtctatagtgttgggttcctagctcagtgttgagttctaaatgatcgtgttgtgttcctaccaagtgttgagctgcacgacggcgtgcgcagccgcagccgcaccggcgaggagcgtttagaactctgttgatctacatagtgtttacaccggctcaacagagttctcatgttgatttttgaaggacccacgtgttgggttcctgctcagtgttgagttctgaacgatagtgttatgttccatgggcccttgttgatttcgagaggacccacgggccgaacggcgtgtcactttcatgcgtctatagtgttgggttcctgtctagtgttgagttctcaactatggtgttgtgttcctccaagaagttgagtttcaggggcctattatattgtctcagttaatgggtaactcagttaatcctatatattgtgtcagttaatgggaactcagttaatggtatatgttgtctcagttaatgggtaactcagttaatccagcatatcattgatgagatc

SEQ ID NO: 51997 - DNA, 8083 bp, Zea Mays
aggtcgtggacgattagtttgtctgcgattgagaacttccgattttggcccagttcgtttcttggttcgtttcggccaagtacagcccactacaccgtccacactccacagcccacgcaagcattgaccattgagacacagacagagcagctgagcaccgcacacacggacgccataccctagattggagcgcaccacgggcgccggcggccggcggcccgccaccggtgattgacgccccctcctcggtccccagcgcggcgagcaggctatttgaggagatgccgtcattgtcatccttactctctggctccaatactgcgagtgctgagcttcctctaatcccttgcaagctctgcaatggggtggtgattgagcgggtctccaaacaaccagaaaccacgtcgaggaagttctaccggtgcagagccaagaaaacggatgggtcttaatgtgattttttccactggcaagcgagctatgttgttttgttaatcgaggatgggtttgtcagtggtgatcgacgccttgagttgttaatgatcgcacttaatgatcatggcaaagccgttgaatctctaaccaattccatcagagagatgaagaaaaagctgtccaacctggagttagtgatggaagagctggataacgtgaaaaatttgatgaaggcagccatggttgaaattgaggaaaacaagaaatcgacagctgctgcattgaaactgatggagaatgagctgcaaaagctgaaagggtcaactaaagtgaaacctaggaatatggcacagtgttttctgcttttggcattgattgggtggtttgtggtgggacagatgaattggggggaggaagcatccagccgatttctgctgagaggctaatgaacataggatggacttttcaatagctagatgtaatcagaactggtttatattttctctgctaacatggcgtagtagccaggacactttgcttgtcgattattatttttagcaagatgttggtgtgaagttggaaaggcttcccacggtccgaagcccgtgtcactttccagagtctacagtgttgcgttctgaatgctagtgttatgttccatgtcccgtgtcactttctggagtctaccgtggtgctcctgctaagtgttgagtcggatgttgattttgggaggacccacgggcgaagggcgtgtcactttcatgaggtatagtgttgggttccttctcagtgtagcgttccttcaaggtgttgagttttagggtcccatgttgatttttgggaggacccacggtccgaagcccgtgtcactttccggagtccacagtgttgcgctctgaatgctagtgttaggttccatgtcccgtgtcactttctggagtctactgtggggctactgctaagtgttgagtcagattggcggatgttgattttgggaggacccactggcgaaccccgtgtcactttcataagttcatagtgttgagttctggaaggtagtgttacgttccatgtcccgtgtcacttctaggagtctacagtgttgcgttcctgatcagtgttgagctctaaacgatggtgttgcgttgctgatcagtattgagttgggcgcatgttgattttgggaggacccacgggccaacgacgtgtcactttcatgagttataagtgtcgggttccaggtcagtgttgggttctgaacgatggtgttgcgttcctccaaggtgttgagtttcaggggcccatgttgatttttgaaggacccacgggccgaaccccgtgtcactttcatgaggtatagtgttgggttccttatcagagttgcgttcggatatatagagttgtgttcctccaatctgtgctgggtttcagggttccatgttgatttttgggaggacccgcggtcggaagcccgtgtcactttccggagtctacagcgttgcgttctgaatgctagtgttatgttccatgtcccgtgtcactttctggagtctaccgtggcgctcctgctaagtgttgagtcggatgggcggatgttgattttgggaggacccacgggtgaagggtgtgtccctttcatgcggtatagtgttgggttccttatcagtgttgcgttccttcaaggcgttgagtttcagggtcccatgttgatttttgggaggacccacgtgttggagtctaccatggggctcctgctaagtgttgagtcagatgggcagatgttggttttgggaggacccacgggcgaagggcgtgtcactttcatgcggtatagtgttgcgttcctccaatctgttgggtttcagggtcccatgttgatttttgggaggacccgcggtccgtagtccgtgtcactttccggagtctacagtgttgcgttctgaatgctagtgttatgttccataacccgtgtcactttctggagtctaccgtggggcccttctaagtgttgagtcggatggggggatgttggttttcggaggacccacgggcgaagggcgtgtcactttcatgcggtatagtgttgtgttccttcatctgttgcgtttcagggttccatgttgattttttggaggacccgtggtccgtagtccgtgtcactttccggagtctacagtgttgcgttctgaatgctagtgttatgttccataacccgtgtcactttctggagtctaccgtggggctccttctaagtgttgagtcggatgggcggatgttggttttgggaggacccacgggcgaacgacgtgtcactttcatgagttcgtagtgttgagttccatatcccgtgtcactttcaggagtatatagtgttgcgttcctgatccatgttgagttctaaacgatggtgtggcgttcctaatcagtattgagttgggcgcatgttgattttgggaggacccacgggcgaacgacgtgtcactttcatgagttatagtgttgatttttgaaggacccacgagccgaaccccgtgtcactttcatgaggtatagtgttgggttcgtgctcagtgtggcgttcgacactatggtgttgcgttcctccaatctgttgggtttcagggtcccatgttgatttttggcaggacccgcagtctgaagcccgtgtcactttccggagtctacagtgttgcgttctgaatactagtgttatgttccatgtcccgtgtcactttctggagtctaccgtggcgctcctgctaagtgttgagtcagatttgcggatgttgattttgggaggacccacgggtgaagggcgtgtcactttcatgaggtatagtgttgggctccttctcagtgttgtgttcggaactatgctgttgcgttccttcaaggtgttgagtttcagggtcccatgttgatttttgggagttatagtgttgagtttcagggtcccttttagactggaaaagtcttctgccataatcgtcagatttacctaaatgatgtaaaaaatggtttggaaaactctaaaacattaaataaagatcacataacattaattaataaaaaatgatataatacacaaacattaagtaagaattatagaaagttgaggcaccagtttgtatgcaggattcttcctcctaagatgtggaaagctaattagttttaaaccataatccacctcaatatatatgaattaaagtgcatagatgtggcaacaacgttgaagataaacatctatttgtacagcaaacgcaggcttcccaaagcggcatggtcagttcgagctcgccctggggatgccgccgctctgcccatcgcagacgccgtggagcatcgacggcgacgtcgcaggacatgaggtcgcctaccagctggtgacccgaaacacccaggcggcccgccgccacgtcgagataacggccctgacggtgccgacattttggggcagcgggcattgcccggagccgctcgtcatcctaagaaagggcagcacggtggcctgctacggctacccccggagccactcgtcgtccatgaaaagggcgacgaactggcctggcaagatctggcggcgcggggatcgaatggacggacgacaagagcgagcgaagaagtcctggcggcttggtgagaaaatggtggcgctgggggcgatgggaacggaggtgcggatggtggcagcagtggagaatgaagcgacggcgacgtcgagactgattgtcgtcgtccgcggccatggggcggagcaccttccggagaagtcgagacttatacgattaaaaaagggaaccgcctcaccgattctgatgtcgaaggtaacctggtgccgatccgcaggggtgaagaagaaagccaacatgccacaggggaagagtaagaagaacgtggtgaaggagaaagccaaaaagattaagaagaacgcggaatcgagagccaaagttcatgaaaatacagatcaaattgagatcaacattagagaaggtgtttcaatttggataacaaaggctgcagtgcaaaaatgttttgagtttccccctggtacagataagaagctgccaatagatccaactacaaaaacatttgattcactctacagagtattgagtgtttcagaaaaaaaaatcaatgtaaagaagaagaagatgaaggagaatatgaaggagaagcaggttgaggaggagaagattgagatgaacatggaggagaagaagcagaatctggttgaggatgaaggtagtcaacaggaggaaagtgaagaggaggacggtgaagatggggaaattggagaggaggaaggtgaagatggggcaattggagatgctaaagtggggggagatggagacaaggaaagtgctaaaaggggggggataaaggttgctgtcagaagaaatgttttgactcctttgaacatcaatttgatgttacagaacatcaacaacgatgagattctcaaacttcttgttaaaagaaatgaagacactgatggtacagaaccgaatcttgacattgacctgattgtcagatgtttctttgcggtgagcagtgttgctgagtttggcaaggataagaagaaactgatatcagggtgtacaactgtgctaatggttgttttcttggaccatctcgtggaaaaccctttggatcctttgaccatccctaggatcaacttgtatacttcagattttatcgcagacctgataatggtacccaaggatagccctggccctgaaaaaaagcgtcgtaagactcaagatgaaaaagaagactagtaatgttataaagaatctcgctactctcaattttaagaattcggaggatacatgctatcatgaagattcagaaatggtgccaagtccagggagagcatcgccggttgttgcttctgtacaatctcataagaactttgttgatcatgcagatttagaaattgtgccatctcatgagaactctgttgatctacatagtgtttacatggcacatgtattggaaagaagcagacaaagcatagtagtggacatattggactacaatatacctgaatctacttttgcagattgtttgctacctacaggtcatatgcacacagatgtattttatttacaatgccaactgttgtcaaaggattggaaggataaagtaattcttagctggaaagctactcaagaactgattcatcaagatattggagttaaggagctggacaaggaacttactgcagaggttatgaacaaagtggatctggtttgtgctttgttttatattacagtagagttttttcagattgacagtagagtttgtgctttttttagatatttattcctatcattcatgccggtcactggtcccttgttattctttccactgccaaacaagagacatatatccttgactcctacccaaggcacagtggggtggccaaggatgttttaactcaactgcagaagtatttggataataaacacaactttgacatgtctaactacactgaccatgtgccacctgttcagcatcaaaaaaacaattacgattgtggctttcatgttttattgtatattgaagaattcatgaaggagaagatgtataaaatcaacaaaaaaatggtgttgaaattcagaaagcagctttgcatgaatctcttgtaccatcctttgaacagaataaatcttgtggaattcagaaagaagctgggtattacattgaaaagaaaacttcctggtatacttgatcttactattgaaggtgagaggagtgaatctgaggctgcagtgataattgaaatagagaacagagatgataagactctagaggatgaacatatttcagttgagaaagagtaaggtaaaaaagaagagcatgtactatcaactgacacaaagaatgacgaagcttcatccccatctgacgaagagcctgagcagagtgagtcatctgagcagactgtgtatgaaagatggatgattccaaaggatcattatcacctgagaaagagcaagctggagaaaaatatcctcaaacgaaaaaagaggttgggcaaagacaacatgtcctctcaggatatgatttctccagtgtttggcaagaggcttgtgcctgcaaacacacattttacctctcttaggaagttgcgaaaacacaagtttacgtctgataagatcaacgatgagatctgcaaacatatcttgaactacaatgaacgggagttgttaagtgtggggcagactaccatgactgggggtcagctggaaaagtacgtaaatgaaggtgacaatggtgataaaatactcagagcattcatcacatgcttcacttgtgatgaaaagttcaatcaagggaacatcacaaccgtcatcccgccacatgaagtatccgaagagggtgaactctccaaagttgatgctgcacaacttgtagaagaaatcaaagctgtactcaaaggcaccaatgttgcacgtgtacgcaaagacaccgaatccaccaaagatcccaaagtgaaagtctttcgaaacatgaggaggacatttatattttttcctttctacaagaatgaagaattgtttgtatttcatgtcgatacgaaaagactacccatcattgatgctctgttttgcaagatgtcatcattgtcgtttgaagatagatcctgactaggaaagtctatcatgggctgtctactcaaagccatgaaggattccggcttcatggtgaaaaaatatggtgattgtaggttcacagttactgtaactgaactcgaattcaaagatagtgcctcagcgctcataagttttattgagaacttcacttctaagttggacgacaatgccaagaaactgaaaaagggtgacaaggactggctggaaccttacaagaagtcgacagtggcataccttgtttgtcacactgaaaataaggtggtgttgcctgacgatattgtgaagtacaagcaaaacaagtgaggtggttgagtcgttaatgggtccagtggctgtgttttaagacttgtatcacactacttgtatggctttattctctgaagctgttccattgttgccgttagtaacaggtgttgcttttgtctctgctcagtgggtgattcatttcatccagagttgctgcaactttaatcagtctatagtgttgggttcctagctcagtgttgagttctaaatgatcgtgttgtgttcctaccaagtgttgagctgcacgacggcgtgcgcagccgcagccgcaccggcgaggagcgtttagaactctgttgatctacatagtgtttacaccggctcaacagagttctcatgttgatttttgaaggacccacgtgttgggttcctgctcagtgttgagttctgaacgatagtgttatgttccatgggcccttgttgatttcgagaggacccacgggccgaacggcgtgtcactttcatgcgtctatagtgttgggttcctgtctagtgttgagttctcaactatggtgttgtgttcctccaagaagttgagtttcaggggcctattatattgtctcagttaatgggtaactcagttaatcctatatattgtgtcagttaatgggaactcagttaatggtatatgttgtctcagttaatgggtaactcagttaatccagcatatcattgatgagatc

SEQ ID NO: 51998 - DNA, 8258 bp, Zea Mays
attaggtcgtggacgattagtttgtctgcgattgagaacttccgattttggcccagttcgtttcttggttcgtttcggccaagtacagcccactacaccgtccacactccacagcccacgcaagcattgaccattgagacacagacagagcagctgagcaccgcacacacggacgccataccctagattggagcgcaccacgggcgccggcggccggcggcccgccaccggtgattgacgccccctcctcggtccccagcgcggcgagcaggctatttgaggagatgccgtcattgtcatccttactctctggctccaatactgcgagtgctgagcttcctctaatcccttgcaagctctgcaatggggtggtgattgagcgggtctccaaacaaccagaaaccacgtcgaggaagttctaccggtgcagagccaagaaaacggatgggtcttaatgtgattttttccactggcaagcgagctatgttgttttgttaatcgaggatgggtttgtcagtggtgatcgacgccttgagttgttaatgatcgcacttaatgatcatggcaaagccgttgaatctctaaccaattccatcagagagatgaagaaaaagctgtccaacctggagttagtgatggaagagctggataacgtgaaaaatttgatgaaggcagccatggttgaaattgaggaaaacaagaaatcgacagctgctgcattgaaactgatggagaatgagctgcaaaagctgaaagggtcaactaaagtgaaacctaggaatatggcacagtgttttctgcttttggcattgattgggtggtttgtggtgggacagatgaattggggggaggaagcatccagccgatttctgctgagaggctaatgaacataggatggacttttcaatagctagatgtaatcagaactggtttatattttctctgctaacatggcgtagtagccaggacactttgcttgtcgattattatttttagcaagatgttggtgtgaagttggaaaggcttcccacggtccgaagcccgtgtcactttccagagtctacagtgttgcgttctgaatgctagtgttatgttccatgtcccgtgtcactttctggagtctaccgtggtgctcctgctaagtgttgagtcggatgttgattttgggaggacccacgggcgaagggcgtgtcactttcatgaggacccacgggccgaaccccgtgtcactttcatgaggtatagtgttgggttccttatcagagttgcgttcggatatatagagttgtgttcctccaatctgtgctgggtttcagggttccatgttgatttttgggaggacccgcggtcggaagcccgtgtcactttccggagtctacagcgttgcgttctgaatgctagtgttatgttccatgtcccgtgtcactttctggagtctaccgtggcgctcctgctaagtgttgagtcggatgggcggatgttgattttgggaggacccacgggtgaagggtgtgtccctttcatgcggtatagtgttgggttccttatcagtgttgcgttccttcaaggcgttgagtttcagggtcccatgttgatttttgggaggacccacgtgttggagtctaccatggggctcctgctaagtgttgagtcagatgggcagatgttggttttgggaggacccacgggcgaagggcgtgtcactttcatgcggtatagtgttgcgttcctccaatctgttgggtttcagggtcccatgttgatttttgggaggacccgcgggttccatgttgattttttggaggacccgtggtccgtagtccgtgtcactttccggagtctacagtgttgcgttctgaatgctagtgttatgttccataacccgtgtcactttctggagtctaccgtggggctccttctaagtgttgagtcggatgggcggatgttggttttgggaggacccacgggcgaacgacggtcccatgttgatttttggcaggacccgcagtctgaagcccgtgtcactttccggagtctacagtgttgcgttctgaatactagtgttatgttccatgtcccgtgtcactttctggagtctaccgtggcgctcctgctaagtgttgagtcagatttgcggatgttgattttgggaggacccacgggtgaagggcgtgtcactttcatgaggtatagtgttgggctccttctcagtgttgtgttcggaactatgctgttgcgttccttcaaggtgttgagtttcagggtcccatgttgatttttgggagttatagtgttgagtttcagggtcccttttagactggaaaagtcttctgccataatcgtcagatttacctaaatgatgtaaaaaatggtttggaaaactctaaaacattaaataaagatcacataacattaattaataaaaaatgatataatacacaaacattaagtaagaattatagaaagttgaggcaccagtttgtatgcaggattcttcctcctaagatgtggaaagctaattagttttaaaccataatccacctcaatatatatgaattaaagtgcatagatgtggcaacaacgttgaagataaacatctatttgtacagcaaacgcaggcttcccaaagcggcatggtcagttcgagctcgccctggggatgccgccgctctgcccatcgcagacgccgtggagcatcgacggcgacgtcgcaggacatgaggtcgcctaccagctggtgacccgaaacacccaggcggcccgccgccacgtcgagataacggccctgacggtgccgacattttggggcagcgggcattgcccggagccgctcgtcatcctaagaaagggcagcacggtggcctgctagtacgtgacgggatctggcagcgcagggaacggagggacagacggcaagagcatgcaccacatcgacgtgaacatggagtgagcgagccaacggagaaatggcgatgggaatggaggtgcagctggtgggagcagttggcacgccgatgaccggacgaagcaagtgaggcaagggatggacgtcgcacttcaatacgtgcctggcggcaccgacattccgatgcagcggctacccccggagccactcgtcgtccatgaaaagggcgacgaactggcctggcaagatctggcggcgcggggatcgaatggacggacgacaagagcgagcgaagaagtcctggcggcttggtgagaaaatggtggcgctgggggcgatgggaacggaggtgcggatggtggcagcagtggagtgagcgagcgtggcctggtttcttcttgaggaaatggcattgcagaggcgatgggaatggagatgcgaatggggggaggagttgccgtgccgacggccgaccgcgatttttttgggaagaatcgtgagaagggataacacacagagagaaaaatgagtgttaccttcgcgttacaggaatgaagcgacggcgacgtcgagactgattgtcgtcgtccgcggccatggggcggagcaccttccggagaagtcgagacttatacgattaaaaaaggtaggcgaagagtcggcgcagcatttcacacgcagtagtgactgacacctggatggttggattagtggcacggacaaacgatcttacggctacggaaatttggacgatgtgtccaccttcgtttgcgagcagcggaccctggtttgatatattaaaaaaaggcagccgaagagtcggcgcagcatttcacacgcagtagtgagtgacacctggatggttggattagtggcacggacaaacgatcttacggctacggaaatttggacgacgtgtccaccctcgtttgcgagtagcggaccctggtttaatatatagaaatagtgttgagttctcaacactgtatactcctgaaagtgacacgggcccatggaatgtgacactatcgttcagaactcatgaaagtgacacgttgttcggtgtgaaagtgttgatttagggtttagtgtaaccgcccgttcggtgtggaagtgttcaaatttctctacgcgcgttcggtagcctcaccgacggcgacggcgacctcacctcaccgacggcgacggcctcggcgacggcgacaacgatccccaattctcttcgcgacctgaccgtctccacttcggtaaacccaccttcccttctctcctcgttccttgtcagggaaccgcctcaccgattctgatgtcgaaggtaacctggtgccgatccgcaggggtgaagaagaaagccaacatgccacaggggaagagtaagaagaacgtggtgaaggagaaagccaaaaagattaagaagaacgcggaatcgaggtattcactaggatcagtaacaaagttaatccaactccttccacctgctgcccgttagaaaattgtagaccttgatttccaaaacttactcaatctgaagttaggaaacaccaatagagtttttacccactttctcatggatagagccaaagttcatgaaaatacagatcaaattgagatcaacattagagaaggtgtttcaatttggataacaaaggctgcagtgcaaaaatgttttgagtttccccctggtacagataagaagctgccaatagatccaactacaaaaacatttgattcactctacagagtattgagtgtttcagaaaaaaaaatcaatgtaaagaagaagaagatgaaggagaatatgaaggagaagcaggttgaggaggagaagattgagatgaacatggaggagaagaagcagaatctggttgaggatgaaggtagtcaacaggaggaaagtgaagaggaggacggtgaagatggggaaattggagaggaggaaggtgaagatggggcaattggagatgctaaagtggggggagatggagacaaggaaagtgctaaaaggggggggataaaggttgctgtcagaagaaatgttttgactcctttgaacatcaatttgatgttacagaacatcaacaacgatgagattctcaaacttcttgttaaaagaaatgaagacactgatggtacagaaccgaatcttgacattgacctgattgtcagatgtttctttgcggtggtgttggacagactgttgttgccacaagccaccttttatctgagctcagctacattgaaagcagtgactgatctagacagactgaaaacagttgactggtcaattttattttcgaaaatttgaagagcagtgttgctgagtttggcaaggataagaagaaactgatatcagggtgtacaactgtgctaatggttgttttcttggaccatctcgtggaaaaccctttggatcctttgaccatccctaggatcaacttgtatacttcagattttatcgcagacctgataatggtacccaaggatagccctggccctgaaaaaaagcgtcgtaagtttaagaattcggaggatacatgctatcatgaagattcagaaatggtgccaagtccagggagagcatcgccggttgttgcttctgtacaatctcataagaactttgttgatcatgcagatttagaaattgtgccatctcatgagaactctgttgatctacatagtgtttacatggcacatgtattggaaagaagcagacaaagcatagtagtggacatattggactacaatatacctgaatctacttttgcagattgtttgctacctacaggtcatatgcacacagatgtattttatttacaatgccaactgttgtcaaaggattggaaggataaagtaattcttagctggaaagctactcaagaactgattcatcaagatattggagttaaggagctggacaaggaacttactgcagaggttatgaacaaagtggatctggtttgtgctttgttttatattacagtagagttttttcagattgacagtagagtttgtgctttttttagatatttattcctatcattcatgccggtcactggtcccttgttattctttccactgccaaacaagagacatatatccttgactcctacccaaggcacagtggggtggccaaggatgttttaactcaactgcagaagtatttggataataaacacaactttgacatgtctaactacactgaccatgtgccacctgttcagcatcaaaaaaacaattacgattgtggctttcatgttttattgtatattgaagaattcatgaaggagaagatgtataaaatcaacaaaaaaatggtgttgaaattcagaaagcagctttgcatgaatctcttgtaccatcctttgaacagaataaatcttgtggaattcagaaagaagctgggtattacattgaaaagaaaacttcctggtatacttgatcttactattgaaggtgagaggagtgaatctgaggctgcagtgataattgaaatagagaacagagatgataagactctagaggatgaacatatttcagttgagaaagagtaaggtaaaaaagaagagcatgtactatcaactgacacaaagaatgacgaagcttcatccccatctgacgaagagcctgagcagagtgagtcatctgagcagactgtgtatgaaagatggatgattccaaaggatcattatcacctgagaaagagcaagctggagaaaaatatcctcaaacgaaaaaagaggttgggcaaagacaacatgtcctctcaggatatgatttctccagtgtttggcaagaggcttgtgcctgcaaacacacattttacctctcttaggaagttgcgaaaacacaagtttacgtctgataagatcaacgatgagatctgcaaacatatcttgaactacaatgaacgggagttgttaagtgtggggcagactaccatgactgggggtcagctggaaaagtacgtaaatgaaggtgacaatggtgataaaatactcagagcattcatcacatgcttcacttgtgatgaaaagttcaatcaagggaacatcacaaccgtcatcccgccacatgaagtatccgaagagggtgaactctccaaagttgatgctgcacaacttgtagaagaaatcaaagctgtactcaaaggcaccaatgttgcacgtgtacgcaaagacaccgaatccaccaaagatcccaaagtgaaagtctttcgaaacatgaggaggacatttatattttttcctttctacaagaatgaagaattgtttgtatttcatgtcgatacgaaaagactacccatcattgatgctctgttttgcaagatgtcatcattgtcgtttgaagatagatcctgactaggaaagtctatcatgggctgtctactcaaagccatgaaggattccggcttcatggtgaaaaaatatggtgattgtaggttcacagttactgtaactgaactcgaattcaaagatagtgcctcagcgctcataagttttattgagaacttcacttctaagttggacgacaatgccaagaaactgaaaaagggtgacaaggactggctggaaccttacaagaagtcgacagtggcataccttgtttgtcacactgaaaataaggtggtgttgcctgacgatattgtgaagtacaagcaaaacaagtgaggtggttgagtcgttaatgggtccagtggctgtgttttaagacttgtatcacactacttgtatggctttattctctgaagctgttccattgttgccgttagtaacaggtgttgcttttgtctctgctcagtgggtgattcatttcatccagagttgctgcaactttaatcagtctatagtgttgggttcctagctcagtgttgagttctaaatgatcgtgttgtgttcctaccaagtgttgagctgcacgacggcgtgcgcagccgcagccgcaccggcgaggagcgtttagaactctgttgatctacatagtgtttacaccggctcaacagagttctcatgttgatttttgaaggacccacgtgttgggttcctgctcagtgttgagttctgaacgatagtgttatgttccatgggcccttgttgatttcgagaggacccacgggccgaacggcgtgtcactttcatgcgtctatagtgttgggttcctgtctagtgttgagttctcaactatggtgttgtgttcctccaagaagttgagtttcaggggcctattatattgtctcagttaatgggtaactcagttaatcctatatattgtgtcagttaatgggaactcagttaatggtatatgttgtctcagttaatgggtaactcagttaatccagcatatcattgatgagatc

SEQ ID NO: 51999 - DNA, 8958 bp, Zea Mays
agtcgtccgattaggtcgtggacgattagtttgtctgcgattgagaacttccgattttggcccagttcgtttcttggttcgtttcggccaagtacagcccactacaccgtccacactccacagcccacgcaagcattgaccattgagacacagacagagcagctgagcaccgcacacacggacgccataccctagattggagcgcaccacgggcgccggcggccggcggcccgccaccggtgattgacgccccctcctcggtccccagcgcggcgagcaggctatttgaggagatgccgtcattgtcatccttactctctggctccaatactgcgagtgctgagcttcctctaatcccttgcaagctctgcaatggggtggtgattgagcgggtctccaaacaaccagaaaccacgtcgaggaagttctaccggtgcagagccaagaaaacggatgggtcttaatgtgattttttccactggcaagcgagctatgttgttttgttaatcgaggatgggtttgtcagtggtgatcgacgccttgagttgttaatgatcgcacttaatgatcatggcaaagccgttgaatctctaaccaattccatcagagagatgaagaaaaagctgtccaacctggagttagtgatggaagagctggataacgtgaaaaatttgatgaaggcagccatggttgaaattgaggaaaacaagaaatcgacagctgctgcattgaaactgatggagaatgagctgcaaaagctgaaagggtcaactaaagtgaaacctaggaatatggcacagtgttttctgcttttggcattgattgggtggtttgtggtgggacagatgaattggggggaggaagcatccagccgatttctgctgagaggctaatgaacataggatggacttttcaatagctagatgtaatcagaactggtttatattttctctgctaacatggcgtagtagccaggacactttgcttgtcgattattatttttagcaagatgttggtgtgaagttggaaaggcttcccacggtccgaagcccgtgtcactttccagagtctacagtgttgcgttctgaatgctagtgttatgttccatgtcccgtgtcactttctggagtctaccgtggtgctcctgctaagtgttgagtcggatgttgattttgggaggacccacgggcgaagggcgtgtcactttcatgaggtatagtgttgggttccttctcagtgtagcgttccttcaaggtgttgagttttagggtcccatgttgatttttgggaggacccacggtccgaagcccgtgtcactttccggagtccacagtgttgcgctctgaatgctagtgttaggttccatgtcccgtgtcactttctggagtctactgtggggctactgctaagtgttgagtcagattggcggatgttgattttgggaggacccactggcgaaccccgtgtcactttcataagttcatagtgttgagttctggaaggtagtgttacgttccatgtcccgtgtcacttctaggagtctacagtgttgcgttcctgatcagtgttgagctctaaacgatggtgttgcgttgctgatcagtattgagttgggcgcatgttgattttgggaggacccacgggccaacgacgtgtcactttcatgagttataagtgtcgggttccaggtcagtgttgggttctgaacgatggtgttgcgttcctccaaggtgttgagtttcaggggcccatgttgatttttgaaggacccacgggccgaaccccgtgtcactttcatgaggtatagtgttgggttccttatcagagttgcgttcggatatatagagttgtgttcctccaatctgtgctgggtttcagggttccatgttgatttttgggaggacccgcggtcggaagcccgtgtcactttccggagtctacagcgttgcgttctgaatgctagtgttatgttccatgtcccgtgtcactttctggagtctaccgtggcgctcctgctaagtgttgagtcggatgggcggatgttgattttgggaggacccacgggtgaagggtgtgtccctttcatgcggtatagtgttgggttccttatcagtgttgcgttccttcaaggcgttgagtttcagggtcccatgttgatttttgggaggacccacgtgttggagtctaccatggggctcctgctaagtgttgagtcagatgggcagatgttggttttgggaggacccacgggcgaagggcgtgtcactttcatgcggtatagtgttgcgttcctccaatctgttgggtttcagggtcccatgttgatttttgggaggacccgcggtccgtagtccgtgtcactttccggagtctacagtgttgcgttctgaatgctagtgttatgttccataacccgtgtcactttctggagtctaccgtggggcccttctaagtgttgagtcggatggggggatgttggttttcggaggacccacgggcgaagggcgtgtcactttcatgcggtatagtgttgtgttccttcatctgttgcgtttcagggttccatgttgattttttggaggacccgtggtccgtagtccgtgtcactttccggagtctacagtgttgcgttctgaatgctagtgttatgttccataacccgtgtcactttctggagtctaccgtggggctccttctaagtgttgagtcggatgggcggatgttggttttgggaggacccacgggcgaacgacgtgtcactttcatgagttcgtagtgttgagttccatatcccgtgtcactttcaggagtatatagtgttgcgttcctgatccatgttgagttctaaacgatggtgtggcgttcctaatcagtattgagttgggcgcatgttgattttgggaggacccacgggcgaacgacgtgtcactttcatgagttatagtgttgatttttgaaggacccacgagccgaaccccgtgtcactttcatgaggtatagtgttgggttcgtgctcagtgtggcgttcgacactatggtgttgcgttcctccaatctgttgggtttcagggtcccatgttgatttttggcaggacccgcagtctgaagcccgtgtcactttccggagtctacagtgttgcgttctgaatactagtgttatgttccatgtcccgtgtcactttctggagtctaccgtggcgctcctgctaagtgttgagtcagatttgcggatgttgattttgggaggacccacgggtgaagggcgtgtcactttcatgaggtatagtgttgggctccttctcagtgttgtgttcggaactatgctgttgcgttccttcaaggtgttgagtttcagggtcccatgttgatttttgggagttatagtgttgagtttcagggtcccttttagactggaaaagtcttctgccataatcgtcagatttacctaaatgatgtaaaaaatggtttggaaaactctaaaacattaaataaagatcacataacattaattaataaaaaatgatataatacacaaacattaagtaagaattatagaaagttgaggcaccagtttgtatgcaggattcttcctcctaagatgtggaaagctaattagttttaaaccataatccacctcaatatatatgaattaaagtgcatagatgtggcaacaacgttgaagataaacatctatttgtacagcaaacgcaggcttcccaaagcggcatggtcagttcgagctcgccctggggatgccgccgctctgcccatcgcagacgccgtggagcatcgacggcgacgtcgcaggacatgaggtcgcctaccagctggtgacccgaaacacccaggcggcccgccgccacgtcgagataacggccctgacggtgccgacattttggggcagcgggcattgcccggagccgctcgtcatcctaagaaagggcagcacggtggcctgctagtacgtgacgggatctggcagcgcagggaacggagggacagacggcaagagcatgcaccacatcgacgtgaacatggagtgagcgagccaacggagaaatggcgatgggaatggaggtgcagctggtgggagcagttggcacgccgatgaccggacgaagcaagtgaggcaagggatggacgtcgcacttcaatacgtgcctggcggcaccgacattccgatgcagcggctacccccggagccactcgtcgtccatgaaaagggcgacgaactggcctggcaagatctggcggcgcggggatcgaatggacggacgacaagagcgagcgaagaagtcctggcggcttggtgagaaaatggtggcgctgggggcgatgggaacggaggtgcggatggtggcagcagtggagtgagcgagcgtggcctggtttcttcttgaggaaatggcattgcagaggcgatgggaatggagatgcgaatggggggaggagttgccgtgccgacggccgaccgcgatttttttgggaagaatcgtgagaagggataacacacagagagaaaaatgagtgttaccttcgcgttacaggaatgaagcgacggcgacgtcgagactgattgtcgtcgtccgcggccatggggcggagcaccttccggagaagtcgagacttatacgattaaaaaaggtaggcgaagagtcggcgcagcatttcacacgcagtagtgactgacacctggatggttggattagtggcacggacaaacgatcttacggctacggaaatttggacgatgtgtccaccttcgtttgcgagcagcggaccctggtttgatatattaaaaaaaggcagccgaagagtcggcgcagcatttcacacgcagtagtgagtgacacctggatggttggattagtggcacggacaaacgatcttacggctacggaaatttggacgacgtgtccaccctcgtttgcgagtagcggaccctggtttaatatatagaaatagtgttgagttctcaacactgtatactcctgaaagtgacacgggcccatggaatgtgacactatcgttcagaactcatgaaagtgacacgttgttcggtgtgaaagtgttgatttagggtttagtgtaaccgcccgttcggtgtggaagtgttcaaatttctctacgcgcgttcggtagcctcaccgacggcgacggcgacctcacctcaccgacggcgacggcctcggcgacggcgacaacgatccccaattctcttcgcgacctgaccgtctccacttcggggtgaagaagaaagccaacatgccacaggggaagagtaagaagaacgtggtgaaggagaaagccaaaaagattaagaagaacgcggaatcgagagccaaagttcatgaaaatacagatcaaattgagatcaacattagagaaggtgtttcaatttggataacaaaggctgcagtgcaaaaatgttttgagtttccccctggtacagataagaagctgccaatagatccaactacaaaaacatttgattcactctacagagtattgagtgtttcagaaaaaaaaatcaatgtaaagaagaagaagatgaaggagaatatgaaggagaagcaggttgaggaggagaagattgagatgaacatggaggagaagaagcagaatctggttgaggatgaaggtagtcaacaggaggaaagtgaagaggaggacggtgaagatggggaaattggagaggaggaaggtgaagatggggcaattggagatgctaaagtggggggagatggagacaaggaaagtgctaaaaggggggggataaaggttgctgtcagaagaaatgttttgactcctttgaacatcaatttgatgttacagaacatcaacaacgatgagattctcaaacttcttgttaaaagaaatgaagacactgatggtacagaaccgaatcttgacattgacctgattgtcagatgtttctttgcggtgagcagtgttgctgagtttggcaaggataagaagaaactgatatcagggtgtacaactgtgctaatggttgttttcttggaccatctcgtggaaaaccctttggatcctttgaccatccctaggatcaacttgtatacttcagattttatcgcagacctgataatggtacccaaggatagccctggccctgaaaaaaagcgtcgtaagactcaagatgaaaaagaagactagtaatgttataaagaatctcgctactctcaattttaagaattcggaggatacatgctatcatgaagattcagaaatggtgccaagtccagggagagcatcgccggttgttgcttctgtacaatctcataagaactttgttgatcatgcagatttagaaattgtgccatctcatgagaactctgttgatctacatagtgtttacatggcacatgtattggaaagaagcagacaaagcatagtagtggacatattggactacaatatacctgaatctacttttgcagattgtttgctacctacaggtcatatgcacacagatgtattttatttacaatgccaactgttgtcaaaggattggaaggataaagtaattcttagctggaaagctactcaagaactgattcatcaagatattggagttaaggagctggacaaggaacttactgcagagatatttattcctatcattcatgccggtcactggtcccttgttattctttccactgccaaacaagagacatatatccttgactcctacccaaggcacagtggggtggccaaggatgttttaactcaactgcagaagtatttggataataaacacaactttgacatgtctaactacactgaccatgtgccacctgttcagcatcaaaaaaacaattacgattgtggctttcatgttttattgtatattgaagaattcatgaaggagaagatgtataaaatcaacaaaaaaatggtgttgaaattcagaaagcagctttgcatgaatctcttgtaccatcctttgaacagaataaatcttgtggaattcagaaagaagctgggtattacattgaaaagaaaacttcctggtatacttgatcttactattgaaggtgagaggagtgaatctgaggctgcagtgataattgaaatagagaacagagatgataagactctagaggatgaacatatttcagttgagaaagagtaaggtaaaaaagaagagcatgtactatcaactgacacaaagaatgacgaagcttcatccccatctgacgaagagcctgagcagagtgagtcatctgagcagactgtgtatgaaagatggatgattccaaaggatcattatcacctgagaaagagcaagctggagaaaaatatcctcaaacgaaaaaagaggttgggcaaagacaacatgtcctctcaggatatgatttctccagtgtttggcaagaggcttgtgcctgcaaacacacattttacctctcttaggaagttgcgaaaacacaagtttacgtctgataagatcaacgatgagatctgcaaacatatcttgaactacaatgaacgggagttgttaagtgtggggcagactaccatgactgggggtcagctggaaaagtacgtaaatgaaggtgacaatggtgataaaatactcagagcattcatcacatgcttcacttgtgatgaaaagttcaatcaagggaacatcacaaccgtcatcccgccacatgaagtatccgaagagggtgaactctccaaagttgatgctgcacaacttgtagaagaaatcaaagctgtactcaaaggcaccaatgttgcacgtgtacgcaaagacaccgaatccaccaaagatcccaaagtgaaagtctttcgaaacatgaggaggacatttatattttttcctttctacaagaatgaagaattgtttgtatttcatgtcgatacgaaaagactacccatcattgatgctctgttttgcaagatgtcatcattgtcgtttgaagatagatcctgactaggaaagtctatcatgggctgtctactcaaagccatgaaggattccggcttcatggtgaaaaaatatggtgattgtaggttcacagttactgtaactgaactcgaattcaaagatagtgcctcagcgctcataagttttattgagaacttcacttctaagttggacgacaatgccaagaaactgaaaaagggtgacaaggactggctggaaccttacaagaagtcgacagtggcataccttgtttgtcacactgaaaataaggtggtgttgcctgacgatattgtgaagtacaagcaaaacaagtgaggtggttgagtcgttaatgggtccagtggctgtgttttaagacttgtatcacactacttgtatggctttattctctgaagctgttccattgttgccgttagtaacaggtgttgcttttgtctctgctcagtgggtgattcatttcatccagagttgctgcaactttaatcagtctatagtgttgggttcctagctcagtgttgagttctaaatgatcgtgttgtgttcctaccaagtgttgagctgcacgacggcgtgcgcagccgcagccgcaccggcgaggagcgtttagaactctgttgatctacatagtgtttacaccggctcaacagagttctcatgttgatttttgaaggacccacgtgttgggttcctgctcagtgttgagttctgaacgatagtgttatgttccatgggcccttgttgatttcgagaggacccacgggccgaacggcgtgtcactttcatgcgtctatagtgttgggttcctgtctagtgttgagttctcaactatggtgttgtgttcctccaagaagttgagtttcaggggcctattatattgtctcagttaatgggtaactcagttaatcctatatattgtgtcagttaatgggaactcagttaatggtatatgttgtctcagttaatgggtaactcagttaatccagcatatcattgatgagatc

SEQ ID NO: 52000 - DNA, 7830 bp, Zea Mays
atggacacaccgacgcgagttcttccccctgctgggcaaatccgatccataaatgtaactccgggaaggctcaccgatggcttgttacccttaccaatgatgaacatgggcccagatttgagccgggtctggtcatggttcgtggtcccatgcagacttgatgcgtgtaggcacacaacagcaaaacagctatttgaggagatgccgtcattgtcatccttactctctggctccaatactgcgagtgctgagcttcctctaatcccttgcaagctctgcaatggggtggtgattgagcgggtctccaaacaaccagaaaccacgtcgaggaagttctaccggtgcagagccaagaaaacggatgggtttgtcagtggtgatcgacgccttgagttgttaatgatcgcacttaatgatcatggcaaagccgttgaatctctaaccaattccatcagagagatgaagaaaaagctgtccaacctggagttagtgatggaagagctggataacgtgaaaaatttgatgaaggcagccatggttgaaattgaggaaaacaagaaatcgacagctgctgcattgaaactgatggagaatgagctgcaaaagctgaaagggtcaactaaagtgaaacctaggaatatggcacagtgttttctgcttttggcattgattgggtgtgttatgttccatgtcccgtgtcactttctggagtctaccgtggtgctcctgctaagtgttgagtcggatgttgattttgggaggacccacgggcgaagggcgtgtcactttcatgaggtatagtgttgggttccttctcagtgtagcgttccttcaaggtgttgagttttagggtcccatgttgatttttgggaggacccacggtccgaagcccgtgtcactttccggagtccacagtgttgcgctctgaatgctagtgttaggttccatgtcccgtgtcactttctggagtctactgtggggctactgctaagtgttgagtcagattggcggatgttgattttgggaggacccactggcgaaccccgtgtcactttcataagttcatagtgttgagttctggaaggtagtgttacgttccatgtcccgtgtcacttctaggagtctacagtgttgcgttcctgatcagtgttgagctctaaacgatggtgttgcgttgctgatcagtattgagttgggcgcatgttgattttgggaggacccacgggccaacgacgtgtcactttcatgagttataagtgtcgggttccaggtcagtgttgggttctgaacgatggtgttgcgttcctccaaggtgttgagtttcaggggcccatgttgatttttgaaggacccacgggccgaaccccgtgtcactttcatgaggtatagtgttgggttccttatcagagttgcgttcggatatatagagttgtgttcctccaatctgtgctgggtttcagggttccatgttgatttttgggaggacccgcggtcggaagcccgtgtcactttccggagtctacagcgttgcgttctgaatgctagtgttatgttccatgtcccgtgtcactttctggagtctaccgtggcgctcctgctaagtgttgagtcggatgggcggatgttgattttgggaggacccacgggtgaagggtgtgtccctttcatgcggtatagtgttgggttccttatcagtgttgcgttccttcaaggcgttgagtttcagggtcccatgttgatttttgggaggacccacgtgttggagtctaccatggggctcctgctaagtgttgagtcagatgggcagatgttggttttgggaggacccacgggcgaagggcgtgtcactttcatgcggtatagtgttgcgttcctccaatctgttgggtttcagggtcccatgttgatttttgggaggacccgcgggttccatgttgattttttggaggacccgtggtccgtagtccgtgtcactttccggagtctacagtgttgcgttctgaatgctagtgttatgttccataacccgtgtcactttctggagtctaccgtggggctccttctaagtgttgagtcggatgggcggatgttggttttgggaggacccacgggcgaacgacggtcccatgttgatttttggcaggacccgcagtctgaagcccgtgtcactttccggagtctacagtgttgcgttctgaatactagtgttatgttccatgtcccgtgtcactttctggagtctaccgtggcgctcctgctaagtgttgagtcagatttgcggatgttgattttgggaggacccacggcaaacgcaggcttcccaaagcggcatggtcagttcgagctcgccctggggatgccgccgctctgcccatcgcagacgccgtggagcatcgacggcgacgtcgcaggacatgaggtcgcctaccagctggtgacccgaaacacccaggcggcccgccgccacgtcgagataacggccctgacggtgccgacattttggggcagcgggcattgcccggagccgctcgtcatcctaagaaagggcagcacggtggcctgctagtacgtgacgggatctggcagcgcagggaacggagggacagacggcaagagcatgcaccacatcgacgtgaacatggagtgagcgagccaacggagaaatggcgatgggaatggaggtgcagctggtgggagcagttggcacgccgatgaccggacgaagcaagtgaggcaagggatggacgtcgcacttcaatacgtgcctggcggcaccgacattccgatgcagcggctacccccggagccactcgtcgtccatgaaaagggcgacgaactggcctggcaagatctggcggcgcggggatcgaatggacggacgacaagagcgagcgaagaagtcctggcggcttggtgagaaaatggtggcgctgggggcgatgggaacggaggtgcggatggtggcagcagtggagtgagcgagcgtggcctggtttcttcttgaggaaatggcattgcagaggcgatgggaatggagatgcgaatggggggaggagttgccgtgccgacggccgaccgcgatttttttgggaagaatcgtgagaagggataacacacagagagaaaaatgagtgttaccttcgcgttacaggaatgaagcgacggcgacgtcgagactgattgtcgtcgtccgcggccatggggcggagcaccttccggagaagtcgagacttatacgattaaaaaaggtaggcgaagagtcggcgcagcatttcacacgcagtagtgactgacacctggatggttggattagtggcacggacaaacgatcttacggctacggaaatttggacgatgtgtccaccttcgtttgcgagcagcggaccctggtttgatatattaaaaaaaggcagccgaagagtcggcgcagcatttcacacgcagtagtgagtgacacctggatggttggattagtggcacggacaaacgatcttacggctacggaaatttggacgacgtgtccaccctcgtttgcgagtagcggaccctggtttaatatatagaaatagtgttgagttctcaacactgtatactcctgaaagtgacacgggcccatggaatgtgacactatcgttcagaactcatgaaagtgacacgttgttcggtgtgaaagtgttgatttagggtttagtgtaaccgcccgttcggtgtggaagtgttcaaatttctctacgcgcgttcggtagcctcaccgacggcgacggcgacctcacctcaccgacggcgacggcctcggcgacggcgacaacgatccccaattctcttcgcgacctgaccgtctccacttcggtaaacccaccttcccttctctcctcgttccttgtcagggaaccgcctcaccgattctgatgtcgaaggtaacctggtgccgatccgcaggggtgaagaagaaagccaacatgccacaggggaagagtaagaagaacgtggtgaaggagaaagccaaaaagattaagaagaacgcggaatcgaggtattcactaggatcagtaacaaagttaatccaactccttccacctgctgcccgttagaaaattgtagaccttgatttccaaaacttactcaatctgaagttaggaaacaccaatagagtttttacccactttctcatggatagagccaaagttcatgaaaatacagatcaaattgagatcaacattagagaaggtgtttcaatttggataacaaaggctgcagtgcaaaaatgttttgagtttccccctggtacagataagaagctgccaatagatccaactacaaaaacatttgattcactctacagagtattgagtgtttcagaaaaaaaaatcaatgtaaagaagaagaagatgaaggagaatatgaaggagaagcaggttgaggaggagaagattgagatgaacatggaggagaagaagcagaatctggttgaggatgaaggtagtcaacaggaggaaagtgaagaggaggacggtgaagatggggaaattggagaggaggaaggtgaagatggggcaattggagatgctaaagtggggggagatggagacaaggaaagtgctaaaaggggggggataaaggttgctgtcagaagaaatgttttgactcctttgaacatcaatttgatgttacagaacatcaacaacgatgagattctcaaacttcttgttaaaagaaatgaagacactgatggtacagaaccgaatcttgacattgacctgattgtcagatgtttctttgcggtgagcagtgttgctgagtttggcaaggataagaagaaactgatatcagggtgtacaactgtgctaatggttgttttcttggaccatctcgtggaaaaccctttggatcctttgaccatccctaggatcaacttgtatacttcagattttatcgcagacctgataatggtacccaaggatagccctggccctgaaaaaaagcgtcgtaagtttaagaattcggaggatacatgctatcatgaagattcagaaatggtgccaagtccagggagagcatcgccggttgttgcttctgtacaatctcataagaactttgttgatcatgcagatttagaaattgtgccatctcatgagaactctgttgatctacatagtgtttacatggcacatgtattggaaagaagcagacaaagcatagtagtggacatattggactacaatatacctgaatctacttttgcagattgtttgctacctacaggtcatatgcacacagatgtattttatttacaatgccaactgttgtcaaaggattggaaggataaagtaattcttagctggaaagctactcaagaactgattcatcaagatattggagttaaggagctggacaaggaacttactgcagaggttatgaacaaagtggatctggtttgtgctttgttttatattacagtagagttttttcagattgacagtagagtttgtgctttttttagatatttattcctatcattcatgccggtcactggtcccttgttattctttccactgccaaacaagagacatatatccttgactcctacccaaggcacagtggggtggccaaggatgttttaactcaactgcagaagtatttggataataaacacaactttgacatgtctaactacactgaccatgtgccacctgttcagcatcaaaaaaacaattacgattgtggctttcatgttttattgtatattgaagaattcatgaaggagaagatgtataaaatcaacaaaaaaatggtgttgaaattcagaaagcagctttgcatgaatctcttgtaccatcctttgaacagaataaatcttgtggaattcagaaagaagctgggtattacattgaaaagaaaacttcctggtatacttgatcttactattgaaggtgagaggagtgaatctgaggctgcagtgataattgaaatagagaacagagatgataagactctagaggatgaacatatttcagttgagaaagagtaaggtaaaaaagaagagcatgtactatcaactgacacaaagaatgacgaagcttcatccccatctgacgaagagcctgagcagagtgagtcatctgagcagactgtgtatgaaagatggatgattccaaaggatcattatcacctgagaaagagcaagctggagaaaaatatcctcaaacgaaaaaagaggttgggcaaagacaacatgtcctctcaggatatgatttctccagtgtttggcaagaggcttgtgcctgcaaacacacattttacctctcttaggaagttgcgaaaacacaagtttacgtctgataagatcaacgatgagatctgcaaacatatcttgaactacaatgaacgggagttgttaagtgtggggcagactaccatgactgggggtcagctggaaaagtacgtaaatgaaggtgacaatggtgataaaatactcagagcattcatcacatgcttcacttgtgatgaaaagttcaatcaagggaacatcacaaccgtcatcccgccacatgaagtatccgaagagggtgaactctccaaagttgatgctgcacaacttgtagaagaaatcaaagctgtactcaaaggcaccaatgttgcacgtgtacgcaaagacaccgaatccaccaaagatcccaaagtgaaagtctttcgaaacatgaggaggacatttatattttttcctttctacaagaatgaagaattgtttgtatttcatgtcgatacgaaaagactacccatcattgatgctctgttttgcaagatgtcatcattgtcgtttgaagatagatcctgactaggaaagtctatcatgggctgtctactcaaagccatgaaggattccggcttcatggtgaaaaaatatggtgattgtaggttcacagttactgtaactgaactcgaattcaaagatagtgcctcagcgctcataagttttattgagaacttcacttctaagttggacgacaatgccaagaaactgaaaaagggtgacaaggactggctggaaccttacaagaagtcgacagtggcataccttgtttgtcacactgaaaataaggtggtgttgcctgacgatattgtgaagtacaagcaaaacaagtgaggtggttgagtcgttaatgggtccagtggctgtgttttaagacttgtatcacactacttgtatggctttattctctgaagctgttccattgttgccgttagtaacaggtgttgcttttgtctctgctcagtgggtgattcatttcatccagagttgctgcaactttaatcagtctatagtgttgggttcctagctcagtgttgagttctaaatgatcgtgttgtgttcctaccaagtgttgagctgcacgacggcgtgcgcagccgcagccgcaccggcgaggagcgtttagaactctgttgatctacatagtgtttacaccggctcaacagagttctcatgttgatttttgaaggacccacgtgttgggttcctgctcagtgttgagttctgaacgatagtgttatgttccatgggcccttgttgatttcgagaggacccacgggccgaacggcgtgtcactttcatgcgtctatagtgttgggttcctgtctagtgttgagttctcaactatggtgttgtgttcctccaagaagttgagtttcaggggcctattatattgtctcagttaatgggtaactcagttaatcctatatattgtgtcagttaatgggaactcagttaatggtatatgttgtctcagttaatgggtaactcagttaatccagcatatcattgatgagatc

SEQ ID NO: 52001 - DNA, 8198 bp, Zea Mays
atggacacaccgacgcgagttcttccccctgctgggcaaatccgatccataaatgtaactccgggaaggctcaccgatggcttgttacccttaccaatgatgaacatgggcccagatttgagccgggtctggtcatggttcgtggtcccatgcagacttgatgcgtgtaggcacacaacagcaaaacagctatttgaggagatgccgtcattgtcatccttactctctggctccaatactgcgagtgctgagcttcctctaatcccttgcaagctctgcaatggggtggtgattgagcgggtctccaaacaaccagaaaccacgtcgaggaagttctaccggtgcagagccaagaaaacggatgggtcttaatgtgattttttccactggcaagcgagctatgttgttttgttaatcgaggatgggtttgtcagtggtgatcgacgccttgagttgttaatgatcgcacttaatgatcatggcaaagccgttgaatctctaaccaattccatcagagagatgaagaaaaagctgtccaacctggagttagtgatggaagagctggataacgtgaaaaatttgatgaaggcagccatggttgaaattgaggaaaacaagaaatcgacagctgctgcattgaaactgatggagaatgagctgcaaaagctgaaagggtcaactaaagtgaaacctaggaatatggcacagtgttttctgcttttggcattgattgggtggtttgtggtgggacagatgaattggggggaggaagcatccagccgatttctgctgagaggctaatgaacataggatggacttttcaatagctagatgtaatcagaactggtttatattttctctgctaacatggcgtagtagccaggacactttgcttgtcgattattatttttagcaagatgttggtgtgaagttggaaaggcttcccacggtccgaagcccgtgtcactttccagagtctacagtgttgcgttctgaatgctagtgttatgttccatgtcccgtgtcactttctggagtctaccgtggtgctcctgctaagtgttgagtcggatgttgattttgggaggacccacgggcgaagggcgtgtcactttcatgaggtatagtgttgggttccttctcagtgtagcgttccttcaaggtgttgagttttagggtcccatgttgatttttgggaggacccacggtccgaagcccgtgtcactttccggagtccacagtgttgcgctctgaatgctagtgttaggttccatgtcccgtgtcactttctggagtctactgtggggctactgctaagtgttgagtcagattggcggatgttgattttgggaggacccactggcgaaccccgtgtcactttcataagttcatagtgttgagttctggaaggtagtgttacgttccatgtcccgtgtcacttctaggagtctacagtgttgcgttcctgatcagtgttgagctctaaacgatggtgttgcgttgctgatcagtattgagttgggcgcatgttgattttgggaggacccacgggccaacgacgtgtcactttcatgagttataagtgtcgggttccaggtcagtgttgggttctgaacgatggtgttgcgttcctccaaggtgttgagtttcaggggcccatgttgatttttgaaggacccacgggccgaaccccgtgtcactttcatgaggtatagtgttgggttccttatcagagttgcgttcggatatatagagttgtgttcctccaatctgtgctgggtttcagggttccatgttgatttttgggaggacccgcggtcggaagcccgtgtcactttccggagtctacagcgttgcgttctgaatgctagtgttatgttccatgtcccgtgtcactttctggagtctaccgtggcgctcctgctaagtgttgagtcggatgggcggatgttgattttgggaggacccacgggtgaagggtgtgtccctttcatgcggtatagtgttgggttccttatcagtgttgcgttccttcaaggcgttgagtttcagggtcccatgttgatttttgggaggacccacgtgttggagtctaccatggggctcctgctaagtgttgagtcagatgggcagatgttggttttgggaggacccacgggcgaagggcgtgtcactttcatgcggtatagtgttgcgttcctccaatctgttgggtttcagggtcccatgttgatttttgggaggacccgcgggttccatgttgattttttggaggacccgtggtccgtagtccgtgtcactttccggagtctacagtgttgcgttctgaatgctagtgttatgttccataacccgtgtcactttctggagtctaccgtggggctccttctaagtgttgagtcggatgggcggatgttggttttgggaggacccacgggcgaacgacggtcccatgttgatttttggcaggacccgcagtctgaagcccgtgtcactttccggagtctacagtgttgcgttctgaatactagtgttatgttccatgtcccgtgtcactttctggagtctaccgtggcgctcctgctaagtgttgagtcagatttgcggatgttgattttgggaggacccacgggtgaagggcgtgtcactttcatgaggtatagtgttgggctccttctcagtgttgtgttcggaactatgctgttgcgttccttcaaggtgttgagtttcagggtcccatgttgatttttgggagttatagtgttgagtttcagggtcccttttagactggaaaagtcttctgccataatcgtcagatttacctaaatgatgtaaaaaatggtttggaaaactctaaaacattaaataaagatcacataacattaattaataaaaaatgatataatacacaaacattaagtaagaattatagaaagttgaggcaccagtttgtatgcaggattcttcctcctaagatgtggaaagctaattagttttaaaccataatccacctcaatatatatgaattaaagtgcatagatgtggcaacaacgttgaagataaacatctatttgtacagcaaacgcaggcttcccaaagcggcatggtcagttcgagctcgccctggggatgccgccgctctgcccatcgcagacgccgtggagcatcgacggcgacgtcgcaggacatgaggtcgcctaccagctggtgacccgaaacacccaggcggcccgccgccacgtcgagataacggccctgacggtgccgacattttggggcagcgggcattgcccggagccgctcgtcatcctaagaaagggcagcacggtggcctgctacggctacccccggagccactcgtcgtccatgaaaagggcgacgaactggcctggcaagatctggcggcgcggggatcgaatggacggacgacaagagcgagcgaagaagtcctggcggcttggtgagaaaatggtggcgctgggggcgatgggaacggaggtgcggatggtggcagcagtggagtgagcgagcgtggcctggtttcttcttgaggaaatggcattgcagaggcgatgggaatggagatgcgaatggggggaggagttgccgtgccgacggccgaccgcgatttttttgggaagaatcgtgagaagggataacacacagagagaaaaatgagtgttaccttcgcgttacaggaatgaagcgacggcgacgtcgagactgattgtcgtcgtccgcggccatggggcggagcaccttccggagaagtcgagacttatacgattaaaaaaggtaggcgaagagtcggcgcagcatttcacacgcagtagtgactgacacctggatggttggattagtggcacggacaaacgatcttacggctacggaaatttggacgatgtgtccaccttcgtttgcgagcagcggaccctggtttgatatattaaaaaaaggcagccgaagagtcggcgcagcatttcacacgcagtagtgagtgacacctggatggttggattagtggcacggacaaacgatcttacggctacggaaatttggacgacgtgtccaccctcgtttgcgagtagcggaccctggtttaatatatagaaatagtgttgagttctcaacactgtatactcctgaaagtgacacgggcccatggaatgtgacactatcgttcagaactcatgaaagtgacacgttgttcggtgtgaaagtgttgatttagggtttagtgtaaccgcccgttcggtgtggaagtgttcaaatttctctacgcgcgttcggtagcctcaccgacggcgacggcgacctcacctcaccgacggcgacggcctcggcgacggcgacaacgatccccaattctcttcgcgacctgaccgtctccacttcggggtgaagaagaaagccaacatgccacaggggaagagtaagaagaacgtggtgaaggagaaagccaaaaagattaagaagaacgcggaatcgagagccaaagttcatgaaaatacagatcaaattgagatcaacattagagaaggtgtttcaatttggataacaaaggctgcagtgcaaaaatgttttgagtttccccctggtacagataagaagctgccaatagatccaactacaaaaacatttgattcactctacagagtattgagtgtttcagaaaaaaaaatcaatgtaaagaagaagaagatgaaggagaatatgaaggagaagcaggttgaggaggagaagattgagatgaacatggaggagaagaagcagaatctggttgaggatgaaggtagtcaacaggaggaaagtgaagaggaggacggtgaagatggggaaattggagaggaggaaggtgaagatggggcaattggagatgctaaagtggggggagatggagacaaggaaagtgctaaaaggggggggataaaggttgctgtcagaagaaatgttttgactcctttgaacatcaatttgatgttacagaacatcaacaacgatgagattctcaaacttcttgttaaaagaaatgaagacactgatggtacagaaccgaatcttgacattgacctgattgtcagatgtttctttgcggtgagcagtgttgctgagtttggcaaggataagaagaaactgatatcagggtgtacaactgtgctaatggttgttttcttggaccatctcgtggaaaaccctttggatcctttgaccatccctaggatcaacttgtatacttcagattttatcgcagacctgataatggtacccaaggatagccctggccctgaaaaaaagcgtcgtaagactcaagatgaaaaagaagactagtaatgttataaagaatctcgctactctcaattttaagaattcggaggatacatgctatcatgaagattcagaaatggtgccaagtccagggagagcatcgccggttgttgcttctgtacaatctcataagaactttgttgatcatgcagatttagaaattgtgccatctcatgagaactctgttgatctacatagtgtttacatggcacatgtattggaaagaagcagacaaagcatagtagtggacatattggactacaatatacctgaatctacttttgcagattgtttgctacctacaggtcatatgcacacagatgtattttatttacaatgccaactgttgtcaaaggattggaaggataaagtaattcttagctggaaagctactcaagaactgattcatcaagatattggagttaaggagctggacaaggaacttactgcagaggttatgaacaaagtggatctggtttgtgctttgttttatattacagtagagttttttcagattgacagtagagtttgtgctttttttagatatttattcctatcattcatgccggtcactggtcccttgttattctttccactgccaaacaagagacatatatccttgactcctacccaaggcacagtggggtggccaaggatgttttaactcaactgcagaagtatttggataataaacacaactttgacatgtctaactacactgaccatgtgccacctgttcagcatcaaaaaaacaattacgattgtggctttcatgttttattgtatattgaagaattcatgaaggagaagatgtataaaatcaacaaaaaaatggtgttgaaattcagaaagcagctttgcatgaatctcttgtaccatcctttgaacagaataaatcttgtggaattcagaaagaagctgggtattacattgaaaagaaaacttcctggtatacttgatcttactattgaaggtgagaggagtgaatctgaggctgcagtgataattgaaatagagaacagagatgataagactctagaggatgaacatatttcagttgagaaagagtaaggtaaaaaagaagagcatgtactatcaactgacacaaagaatgacgaagcttcatccccatctgacgaagagcctgagcagagtgagtcatctgagcagactgtgtatgaaagatggatgattccaaaggatcattatcacctgagaaagagcaagctggagaaaaatatcctcaaacgaaaaaagaggttgggcaaagacaacatgtcctctcaggatatgatttctccagtgtttggcaagaggcttgtgcctgcaaacacacattttacctctcttaggaagttgcgaaaacacaagtttacgtctgataagatcaacgatgagatctgcaaacatatcttgaactacaatgaacgggagttgttaagtgtggggcagactaccatgactgggggtcagctggaaaagtacgtaaatgaaggtgacaatggtgataaaatactcagagcattcatcacatgcttcacttgtgatgaaaagttcaatcaagggaacatcacaaccgtcatcccgccacatgaagtatccgaagagggtgaactctccaaagttgatgctgcacaacttgtagaagaaatcaaagctgtactcaaaggcaccaatgttgcacgtgtacgcaaagacaccgaatccaccaaagatcccaaagtgaaagtctttcgaaacatgaggaggacatttatattttttcctttctacaagaatgaagaattgtttgtatttcatgtcgatacgaaaagactacccatcattgatgctctgttttgcaagatgtcatcattgtcgtttgaagatagatcctgactaggaaagtctatcatgggctgtctactcaaagccatgaaggattccggcttcatggtgaaaaaatatggtgattgtaggttcacagttactgtaactgaactcgaattcaaagatagtgcctcagcgctcataagttttattgagaacttcacttctaagttggacgacaatgccaagaaactgaaaaagggtgacaaggactggctggaaccttacaagaagtcgacagtggcataccttgtttgtcacactgaaaataaggtggtgttgcctgacgatattgtgaagtacaagcaaaacaagtgaggtggttgagtcgttaatgggtccagtggctgtgttttaagacttgtatcacactacttgtatggctttattctctgaagctgttccattgttgccgttagtaacaggtgttgcttttgtctctgctcagtgggtgattcatttcatccagagttgctgcaactttaatcagtctatagtgttgggttcctagctcagtgttgagttctaaatgatcgtgttgtgttcctaccaagtgttgagctgcacgacggcgtgcgcagccgcagccgcaccggcgaggagcgtttagaactctgttgatctacatagtgtttacaccggctcaacagagttctcatgttgatttttgaaggacccacgtgttgggttcctgctcagtgttgagttctgaacgatagtgttatgttccatgggcccttgttgatttcgagaggacccacgggccgaacggcgtgtcactttcatgcgtctatagtgttgggttcctgtctagtgttgagttctcaactatggtgttgtgttcctccaagaagttgagtttcaggggcctattatattgtctcagttaatgggtaactcagttaatcctatatattgtgtcagttaatgggaactcagttaatggtatatgttgtctcagttaatgggtaactcagttaatccagcatatcattgatgagatc

SEQ ID NO: 52002 - DNA, 7390 bp, Zea Mays
atggacacaccgacgcgagttcttccccctgctgggcaaatccgatccataaatgtaactccgggaaggctcaccgatggcttgttacccttaccaatgatgaacatgggcccagatttgagccgggtctggtcatggttcgtggtcccatgcagacttgatgcgtgtaggcacacaacagcaaaacagctatttgaggagatgccgtcattgtcatccttactctctggctccaatactgcgagtgctgagcttcctctaatcccttgcaagctctgcaatggggtggtgattgagcgggtctccaaacaaccagaaaccacgtcgaggaagttctaccggtgcagagccaagaaaacggttatttctcaatttttgctcaattggtaagttatatggtttgggtaattttgagggcccaagtctctcttctttacaggatgggtcttaatgtgattttttccactggcaagcgagctatgttgttttgttaatcgaggatgggtttgtcagtggtgatcgacgccttgagttgttaatgatcgcacttaatgatcatggcaaagccgttgaatctctaaccaattccatcagagagatgaagaaaaagctgtccaacctggagttagtgatggaagagctggataacgtgaaaaatttgatgaaggcagccatggttgaaattgaggaaaacaagaaatcgacagctgctgcattgaaactgatggagaatgagctgcaaaagctgaaagggtcaactaaagtgaaacctaggaatatggcacagtgttttctgcttttggcattgattgggtgtgttatgttccatgtcccgtgtcactttctggagtctaccgtggtgctcctgctaagtgttgagtcggatgttgattttgggaggacccacgggcgaagggcgtgtcactttcatgaggacccacgggccgaaccccgtgtcactttcatgaggtatagtgttgggttccttatcagagttgcgttcggatatatagagttgtgttcctccaatctgtgctgggtttcagggttccatgttgatttttgggaggacccgcggtcggaagcccgtgtcactttccggagtctacagcgttgcgttctgaatgctagtgttatgttccatgtcccgtgtcactttctggagtctaccgtggcgctcctgctaagtgttgagtcggatgggcggatgttgattttgggaggacccacgggtgaagggtgtgtccctttcatgcggtatagtgttgggttccttatcagtgttgcgttccttcaaggcgttgagtttcagggtcccatgttgatttttgggaggacccacgtgttggagtctaccatggggctcctgctaagtgttgagtcagatgggcagatgttggttttgggaggacccacgggcgaagggcgtgtcactttcatgcggtatagtgttgcgttcctccaatctgttgggtttcagggtcccatgttgatttttgggaggacccgcgggttccatgttgattttttggaggacccgtggtccgtagtccgtgtcactttccggagtctacagtgttgcgttctgaatgctagtgttatgttccataacccgtgtcactttctggagtctaccgtggggctccttctaagtgttgagtcggatgggcggatgttggttttgggaggacccacgggcgaacgacggtcccatgttgatttttggcaggacccgcagtctgaagcccgtgtcactttccggagtctacagtgttgcgttctgaatactagtgttatgttccatgtcccgtgtcactttctggagtctaccgtggcgctcctgctaagtgttgagtcagatttgcggatgttgattttgggaggacccacgggtgaagggcgtgtcactttcatgaggtatagtgttgggctccttctcagtgttgtgttcggaactatgctgttgcgttccttcaaggtgttgagtttcagggtcccatgttgatttttgggagttatagtgttgagtttcagggtcccttttagactggaaaagtcttctgccataatcgtcagatttacctaaatgatgtaaaaaatggtttggaaaactctaaaacattaaataaagatcacataacattaattaataaaaaatgatataatacacaaacattaagtaagaattatagaaagttgaggcaccagtttgtatgcaggattcttcctcctaagatgtggaaagctaattagttttaaaccataatccacctcaatatatatgaattaaagtgcatagatgtggcaacaacgttgaagataaacatctatttgtacagcaaacgcaggcttcccaaagcggcatggtcagttcgagctcgccctggggatgccgccgctctgcccatcgcagacgccgtggagcatcgacggcgacgtcgcaggacatgaggtcgcctaccagctggtgacccgaaacacccaggcggcccgccgccacgtcgagataacggccctgacggtgccgacattttggggcagcgggcattgcccggagccgctcgtcatcctaagaaagggcagcacggtggcctgctacggctacccccggagccactcgtcgtccatgaaaagggcgacgaactggcctggcaagatctggcggcgcggggatcgaatggacggacgacaagagcgagcgaagaagtcctggcggcttggtgagaaaatggtggcgctgggggcgatgggaacggaggtgcggatggtggcagcagtggagtgagcgagcgtggcctggtttcttcttgaggaaatggcattgcagaggcgatgggaatggagatgcgaatggggggaggagttgccgtgccgacggccgaccgcgatttttttgggaagaatcgtgagaagggataacacacagagagaaaaatgagtgttaccttcgcgttacaggaatgaagcgacggcgacgtcgagactgattgtcgtcgtccgcggccatggggcggagcaccttccggagaagtcgagacttatacgattaaaaaaggtaggcgaagagtcggcgcagcatttcacacgcagtagtgactgacacctggatggttggattagtggcacggacaaacgatcttacggctacggaaatttggacgatgtgtccaccttcgtttgcgagcagcggaccctggtttgatatattaaaaaaaggcagccgaagagtcggcgcagcatttcacacgcagtagtgagtgacacctggatggttggattagtggcacggacaaacgatcttacggctacggaaatttggacgacgtgtccaccctcgtttgcgagtagcggaccctggtttaatatatagaaatagtgttgagttctcaacactgtatactcctgaaagtgacacgggcccatggaatgtgacactatcgttcagaactcatgaaagtgacacgttgttcggtgtgaaagtgttgatttagggtttagtgtaaccgcccgttcggtgtggaagtgttcaaatttctctacgcgcgttcggtagcctcaccgacggcgacggcgacctcacctcaccgacggcgacggcctcggcgacggcgacaacgatccccaattctcttcgcgacctgaccgtctccacttcggggtgaagaagaaagccaacatgccacaggggaagagtaagaagaacgtggtgaaggagaaagccaaaaagattaagaagaacgcggaatcgagagccaaagttcatgaaaatacagatcaaattgagatcaacattagagaaggtgtttcaatttggataacaaaggctgcagtgcaaaaatgttttgagtttccccctggtacagataagaagctgccaatagatccaactacaaaaacatttgattcactctacagagtattgagtgtttcagaaaaaaaaatcaatgtaaagaagaagaagatgaaggagaatatgaaggagaagcaggttgaggaggagaagattgagatgaacatggaggagaagaagcagaatctggttgaggatgaaggtagtcaacaggaggaaagtgaagaggaggacggtgaagatggggaaattggagaggaggaaggtgaagatggggcaattggagatgctaaagtggggggagatggagacaaggaaagtgctaaaaggggggggataaaggttgctgtcagaagaaatgttttgactcctttgaacatcaatttgatgttacagaacatcaacaacgatgagattctcaaacttcttgttaaaagaaatgaagacactgatggtacagaaccgaatcttgacattgacctgattgtcagatgtttctttgcggtgagcagtgttgctgagtttggcaaggataagaagaaactgatatcagggtgtacaactgtgctaatggttgttttcttggaccatctcgtggaaaaccctttggatcctttgaccatccctaggatcaacttgtatacttcagattttatcgcagacctgataatggtacccaaggatagccctggccctgaaaaaaagcgtcgtaagactcaagatgaaaaagaagactagtaatgttataaagaatctcgctactctcaattttaagaattcggaggatacatgctatcatgaagattcagaaatggtgccaagtccagggagagcatcgccggttgttgcttctgtacaatctcataagaactttgttgatcatgcagatttagaaattgtgccatctcatgagaactctgttgatctacatagtgtttacatggcacatgtattggaaagaagcagacaaagcatagtagtggacatattggactacaatatacctgaatctacttttgcagattgtttgctacctacaggtcatatgcacacagatgtattttatttacaatgccaactgttgtcaaaggattggaaggataaagtaattcttagctggaaagctactcaagaactgattcatcaagatattggagttaaggagctggacaaggaacttactgcagaggttatgaacaaagtggatctgatatttattcctatcattcatgccggtcactggtcccttgttattctttccactgccaaacaagagacatatatccttgactcctacccaaggcacagtggggtggccaaggatgttttaactcaactgcagaagtatttggataataaacacaactttgacatgtctaactacactgaccatgtgccacctgttcagcatcaaaaaaacaattacgattgtggctttcatgttttattgtatattgaagaattcatgaaggagaagatgtataaaatcaacaaaaaaatggtgttgaaattcagaaagcagctttgcatgaatctcttgtaccatcctttgaacagaataaatcttgtggaattcagaaagaagctgggtattacattgaaaagaaaacttcctggtatacttgatcttactattgaaggtgagaggagtgaatctgaggctgcagtgataattgaaatagagaacagagatgataagactctagaggatgaacatatttcagttgagaaagagtaaggtaaaaaagaagagcatgtactatcaactgacacaaagaatgacgaagcttcatccccatctgacgaagagcctgagcagagtgagtcatctgagcagactgtgtatgaaagatggatgattccaaaggatcattatcacctgagaaagagcaagctggagaaaaatatcctcaaacgaaaaaagaggttgggcaaagacaacatgtcctctcaggatatgatttctccagtgtttggcaagaggcttgtgcctgcaaacacacattttacctctcttaggaagttgcgaaaacacaagtttacgtctgataagatcaacgatgagatctgcaaacatatcttgaactacaatgaacgggagttgttaagtgtggggcagactaccatgactgggggtcagctggaaaagtacgtaaatgaaggtgacaatggtgataaaatactcagagcattcatcacatgcttcacttgtgatgaaaagttcaatcaagggaacatcacaaccgtcatcccgccacatgaagtatccgaagagggtgaactctccaaagttgatgctgcacaacttgtagaagaaatcaaagctgtactcaaaggcaccaatgttgcacgtgtacgcaaagacaccgaatccaccaaagatcccaaagtgaaagtctttcgaaacatgaggaggacatttatattttttcctttctacaagaatgaagaattgtttgtatttcatgtcgatacgaaaagactacccatcattgatgctctgttttgcaagatgtcatcattgtcgtttgaagatagatcctgactaggaaagtctatcatgggctgtctactcaaagccatgaaggattccggcttcatggtgaaaaaatatggtgattgtaggttcacagttactgtaactgaactcgaattcaaagatagtgcctcagcgctcataagttttattgagaacttcacttctaagttggacgacaatgccaagaaactgaaaaagggtgacaaggactggctggaaccttacaagaagtcgacagtggcataccttgtttgtcacactgaaaataaggtggtgttgcctgacgatattgtgaagtacaagcaaaacaagtgaggtggttgagtcgttaatgggtccagtggctgtgttttaagacttgtatcacactacttgtatggctttattctctgaagctgttccattgttgccgttagtaacaggtgttgcttttgtctctgctcagtgggtgattcatttcatccagagttgctgcaactttaatcagtctatagtgttgggttcctagctcagtgttgagttctaaatgatcgtgttgtgttcctaccaagtgttgagctgcacgacggcgtgcgcagccgcagccgcaccggcgaggagcgtttagaactctgttgatctacatagtgtttacaccggctcaacagagttctcatgttgatttttgaaggacccacgtgttgggttcctgctcagtgttgagttctgaacgatagtgttatgttccatgggcccttgttgatttcgagaggacccacgggccgaacggcgtgtcactttcatgcgtctatagtgttgggttcctgtctagtgttgagttctcaactatggtgttgtgttcctccaagaagttgagtttcaggggcctattatattgtctcagttaatgggtaactcagttaatcctatatattgtgtcagttaatgggaactcagttaatggtatatgttgtctcagttaatgggtaactcagttaatccagcatatcattgatgagatc

SEQ ID NO: 52003 - DNA, 7358 bp, Zea Mays
atggacacaccgacgcgagttcttccccctgctgggcaaatccgatccataaatgtaactccgggaaggctcaccgatggcttgttacccttaccaatgatgaacatgggcccagatttgagccgggtctggtcatggttcgtggtcccatgcagacttgatgcgtgtaggcacacaacagcaaaacagctatttgaggagatgccgtcattgtcatccttactctctggctccaatactgcgagtgctgagcttcctctaatcccttgcaagctctgcaatggggtggtgattgagcgggtctccaaacaaccagaaaccacgtcgaggaagttctaccggtgcagagccaagaaaacggatgggtttgtcagtggtgatcgacgccttgagttgttaatgatcgcacttaatgatcatggcaaagccgttgaatctctaaccaattccatcagagagatgaagaaaaagctgtccaacctggagttagtgatggaagagctggataacgtgaaaaatttgatgaaggcagccatggttgaaattgaggaaaacaagaaatcgacagctgctgcattgaaactgatggagaatgagctgcaaaagctgaaagggtcaactaaagtgaaacctaggaatatggcacagtgttttctgcttttggcattgattgggtgtgttatgttccatgtcccgtgtcactttctggagtctaccgtggtgctcctgctaagtgttgagtcggatgttgattttgggaggacccacgggcgaagggcgtgtcactttcatgaggtatagtgttgggttccttctcagtgtagcgttccttcaaggtgttgagttttagggtcccatgttgatttttgggaggacccacggtccgaagcccgtgtcactttccggagtccacagtgttgcgctctgaatgctagtgttaggttccatgtcccgtgtcactttctggagtctactgtggggctactgctaagtgttgagtcagattggcggatgttgattttgggaggacccactggcgaaccccgtgtcactttcataagttcatagtgttgagttctggaaggtagtgttacgttccatgtcccgtgtcacttctaggagtctacagtgttgcgttcctgatcagtgttgagctctaaacgatggtgttgcgttgctgatcagtattgagttgggcgcatgttgattttgggaggacccacgggccaacgacgtgtcactttcatgagttataagtgtcgggttccaggtcagtgttgggttctgaacgatggtgttgcgttcctccaaggtgttgagtttcaggggcccatgttgatttttgaaggacccacgggccgaaccccgtgtcactttcatgaggtatagtgttgggttccttatcagagttgcgttcggatatatagagttgtgttcctccaatctgtgctgggtttcagggttccatgttgatttttgggaggacccgcggtcggaagcccgtgtcactttccggagtctacagcgttgcgttctgaatgctagtgttatgttccatgtcccgtgtcactttctggagtctaccgtggcgctcctgctaagtgttgagtcggatgggcggatgttgattttgggaggacccacgggtgaagggtgtgtccctttcatgcggtatagtgttgggttccttatcagtgttgcgttccttcaaggcgttgagtttcagggtcccatgttgatttttgggaggacccacgtgttggagtctaccatggggctcctgctaagtgttgagtcagatgggcagatgttggttttgggaggacccacgggcgaagggcgtgtcactttcatgcggtatagtgttgcgttcctccaatctgttgggtttcagggtcccatgttgatttttgggaggacccgcgggttccatgttgattttttggaggacccgtggtccgtagtccgtgtcactttccggagtctacagtgttgcgttctgaatgctagtgttatgttccataacccgtgtcactttctggagtctaccgtggggctccttctaagtgttgagtcggatgggcggatgttggttttgggaggacccacgggcgaacgacgtgtcactttcatgagttcgtagtgttgagttccatatcccgtgtcactttcaggagtatatagtgttgcgttcctgatccatgttgagttctaaacgatggtgtggcgttcctaatcagtattgagttgggcgcatgttgattttgggaggacccacgggcgaacgacgtgtcactttcatgagttatagtgttgatttttgaaggacccacgagccgaaccccgtgtcactttcatgaggtatagtgttgggttcgtgctcagtgtggcgttcgacactatggtgttgcgttcctccaatctgttgggtttcagggtcccatgttgatttttggcaggacccgcagtctgaagcccgtgtcactttccggagtctacagtgttgcgttctgaatactagtgttatgttccatgtcccgtgtcactttctggagtctaccgtggcgctcctgctaagtgttgagtcagatttgcggatgttgattttgggaggacccacggcaaacgcaggcttcccaaagcggcatggtcagttcgagctcgccctggggatgccgccgctctgcccatcgcagacgccgtggagcatcgacggcgacgtcgcaggacatgaggtcgcctaccagctggtgacccgaaacacccaggcggcccgccgccacgtcgagataacggccctgacggtgccgacattttggggcagcgggcattgcccggagccgctcgtcatcctaagaaagggcagcacggtggcctgctacggctacccccggagccactcgtcgtccatgaaaagggcgacgaactggcctggcaagatctggcggcgcggggatcgaatggacggacgacaagagcgagcgaagaagtcctggcggcttggtgagaaaatggtggcgctgggggcgatgggaacggaggtgcggatggtggcagcagtggagtgagcgagcgtggcctggtttcttcttgaggaaatggcattgcagaggcgatgggaatggagatgcgaatggggggaggagttgccgtgccgacggccgaccgcgatttttttgggaagaatcgtgagaagggataacacacagagagaaaaatgagtgttaccttcgcgttacaggaatgaagcgacggcgacgtcgagactgattgtcgtcgtccgcggccatggggcggagcaccttccggagaagtcgagacttatacgattaaaaaaggtaggcgaagagtcggcgcagcatttcacacgcagtagtgactgacacctggatggttggattagtggcacggacaaacgatcttacggctacggaaatttggacgatgtgtccaccttcgtttgcgagcagcggaccctggtttgatatattaaaaaaaggcagccgaagagtcggcgcagcatttcacacgcagtagtgagtgacacctggatggttggattagtggcacggacaaacgatcttacggctacggaaatttggacgacgtgtccaccctcgtttgcgagtagcggaccctggtttaatatatagaaatagtgttgagttctcaacactgtatactcctgaaagtgacacgggcccatggaatgtgacactatcgttcagaactcatgaaagtgacacgttgttcggtgtgaaagtgttgatttagggtttagtgtaaccgcccgttcggtgtggaagtgttcaaatttctctacgcgcgttcggtagcctcaccgacggcgacggcgacctcacctcaccgacggcgacggcctcggcgacggcgacaacgatccccaattctcttcgcgacctgaccgtctccacttcggtaaacccaccttcccttctctcctcgttccttgtcagggaaccgcctcaccgattctgatgtcgaaggtaacctggtgccgatccgcaggggtgaagaagaaagccaacatgccacaggggaagagtaagaagaacgtggtgaaggagaaagccaaaaagattaagaagaacgcggaatcgagagccaaagttcatgaaaatacagatcaaattgagatcaacattagagaaggtgtttcaatttggataacaaaggctgcagtgcaaaaatgttttgagtttccccctggtacagataagaagctgccaatagatccaactacaaaaacatttgattcactctacagagtattgagtgtttcagaaaaaaaaatcaatgtaaagaagaagaagatgaaggagaatatgaaggagaagcaggttgaggaggagaagattgagatgaacatggaggagaagaagcagaatctggttgaggatgaaggtagtcaacaggaggaaagtgaagaggaggacggtgaagatggggaaattggagaggaggaaggtgaagatggggcaattggagatgctaaagtggggggagatggagacaaggaaagtgctaaaaggggggggataaaggttgctgtcagaagaaatgttttgactcctttgaacatcaatttgatgttacagaacatcaacaacgatgagattctcaaacttcttgttaaaagaaatgaagacactgatggtacagaaccgaatcttgacattgacctgattgtcagatgtttctttgcggtggtgttggacagactgttgttgccacaagccaccttttatctgagctcagctacattgaaagcagtgactgatctagacagactgaaaacagttgactggtcaattttattttcgaaaatttgaagagcagtgttgctgagtttggcaaggataagaagaaactgatatcagggtgtacaactgtgctaatggttgttttcttggaccatctcgtggaaaaccctttggatcctttgaccatccctaggatcaacttgtatacttcagattttatcgcagacctgataatggtacccaaggatagccctggccctgaaaaaaagcgtcgtaagactcaagatgaaaaagaagactagtaatgttataaagaatctcgctactctcaattttaagaattcggaggatacatgctatcatgaagattcagaaatggtgccaagtccagggagagcatcgccgattgtttgctacctacaggtcatatgcacacagatgtattttatttacaatgccaactgttgtcaaaggattggaaggataaagtaattcttagctggaaagctactcaagaactgattcatcaagatattggagttaaggagctggacaaggaacttactgcagaggttatgaacaaagtggatctgagacatatatccttgactcctacccaaggcacagtggggtggccaaggatgttttaactcaactgcagaagtatttggataataaacacaactttgacatgtctaactacactgaccatgtgccacctgttcagcatcaaaaaaacaattacgattgtggctttcatgttttattgtatattgaagaattcatgaaggagaagatgtataaaatcaacaaaaaaatggtgttgaaattcagaaagcagctttgcatgaatctcttgtaccatcctttgaacagaataaatcttgtggaattcagaaagaagctgggtattacattgaaaagaaaacttcctggtatacttgatcttactattgaaggtgagaggagtgaatctgaggctgcagtgataattgaaatagagaacagagatgataagactctagaggatgaacatatttcagttgagaaagagaagttgcgaaaacacaagtttacgtctgataagatcaacgatgagatctgcaaacatatcttgaactacaatgaacgggagttgttaagtgtggggcagactaccatgactgggggtcagctggaaaagtacgtaaatgaaggtgacaatggtgataaaatactcagagcattcatcacatgcttcacttgtgatgaaaagttcaatcaagggaacatcacaaccgtcatcccgccacatgaagtatccgaagagggtgaactctccaaagttgatgctgcacaacttgtagaagaaatcaaagctgtactcaaaggcaccaatgttgcacgtgtacgcaaagacaccgaatccaccaaagatcccaaagtgaaagtctttcgaaacatgaggaggacatttatattttttcctttctacaagaatgaagaattgtttgtatttcatgtcgatacgaaaagactacccatcattgatgctctgttttgcaagatgtcatcattgtcgtttgaagatagatcctgactaggaaagtctatcatgggctgtctactcaaagccatgaaggattccggcttcatggtgaaaaaatatggtgattgtaggttcacagttactgtaactgaactcgaattcaaagatagtgcctcagcgctcataagttttattgagaacttcacttctaagttggacgacaatgccaagaaactgaaaaagggtgacaaggactggctggaaccttacaagaagtcgacagtggcataccttgtttgtcacactgaaaataaggtggtgttgcctgacgatattgtgaagtacaagcaaaacaagtgaggtggttgagtcgttaatgggtccagtggctgtgttttaagacttgtatcacactacttgtatggctttattctctgaagctgttccattgttgccgttagtaacaggtgttgcttttgtctctgctcagtgggtgattcatttcatccagagttgctgcaactttaatcagtctatagtgttgggttcctagctcagtgttgagttctaaatgatcgtgttgtgttcctaccaagtgttgagctgcacgacggcgtgcgcagccgcagccgcaccggcgaggagcgtttagaactctgttgatctacatagtgtttacaccggctcaacagagttctcatgttgatttttgaaggacccacgtgttgggttcctgctcagtgttgagttctgaacgatagtgttatgttccatgggcccttgttgatttcgagaggacccacgggccgaacggcgtgtcactttcatgcgtctatagtgttgggttcctgtctagtgttgagttctcaactatggtgttgtgttcctccaagaagttgagtttcaggggcctattatattgtctcagttaatgggtaactcagttaatcctatatattgtgtcagttaatgggaactcagttaatggtatatgttgtctcagttaatgggtaactcagttaatccagcatatcattgatgagatc

SEQ ID NO: 52004 - DNA, 6917 bp, Zea Mays
atggacacaccgacgcgagttcttccccctgctgggcaaatccgatccataaatgtaactccgggaaggctcaccgatggcttgttacccttaccaatgatgaacatgggcccagatttgagccgggtctggtcatggttcgtggtcccatgcagacttgatgcgtgtaggcacacaacagcaaaacagctatttgaggagatgccgtcattgtcatccttactctctggctccaatactgcgagtgctgagcttcctctaatcccttgcaagctctgcaatggggtggtgattgagcgggtctccaaacaaccagaaaccacgtcgaggaagttctaccggtgcagagccaagaaaacggatgggtttgtcagtggtgatcgacgccttgagttgttaatgatcgcacttaatgatcatggcaaagccgttgaatctctaaccaattccatcagagagatgaagaaaaagctgtccaacctggagttagtgatggaagagctggataacgtgaaaaatttgatgaaggcagccatggttgaaattgaggaaaacaagaaatcgacagctgctgcattgaaactgatggagaatgagctgcaaaagctgaaagggtcaactaaagtgaaacctaggaatatggcacagtgttttctgcttttggcattgattgggtgtgttatgttccatgtcccgtgtcactttctggagtctaccgtggtgctcctgctaagtgttgagtcggatgttgattttgggaggacccacgggcgaagggcgtgtcactttcatgaggacccacgggccgaaccccgtgtcactttcatgaggtatagtgttgggttccttatcagagttgcgttcggatatatagagttgtgttcctccaatctgtgctgggtttcagggttccatgttgatttttgggaggacccgcggtcggaagcccgtgtcactttccggagtctacagcgttgcgttctgaatgctagtgttatgttccatgtcccgtgtcactttctggagtctaccgtggcgctcctgctaagtgttgagtcggatgggcggatgttgattttgggaggacccacgggtgaagggtgtgtccctttcatgcggtatagtgttgggttccttatcagtgttgcgttccttcaaggcgttgagtttcagggtcccatgttgatttttgggaggacccacgtgttggagtctaccatggggctcctgctaagtgttgagtcagatgggcagatgttggttttgggaggacccacgggcgaagggcgtgtcactttcatgcggtatagtgttgcgttcctccaatctgttgggtttcagggtcccatgttgatttttgggaggacccgcgggttccatgttgattttttggaggacccgtggtccgtagtccgtgtcactttccggagtctacagtgttgcgttctgaatgctagtgttatgttccataacccgtgtcactttctggagtctaccgtggggctccttctaagtgttgagtcggatgggcggatgttggttttgggaggacccacgggcgaacgacggtcccatgttgatttttggcaggacccgcagtctgaagcccgtgtcactttccggagtctacagtgttgcgttctgaatactagtgttatgttccatgtcccgtgtcactttctggagtctaccgtggcgctcctgctaagtgttgagtcagatttgcggatgttgattttgggaggacccacggcaaacgcaggcttcccaaagcggcatggtcagttcgagctcgccctggggatgccgccgctctgcccatcgcagacgccgtggagcatcgacggcgacgtcgcaggacatgaggtcgcctaccagctggtgacccgaaacacccaggcggcccgccgccacgtcgagataacggccctgacggtgccgacattttggggcagcgggcattgcccggagccgctcgtcatcctaagaaagggcagcacggtggcctgctagtacgtgacgggatctggcagcgcagggaacggagggacagacggcaagagcatgcaccacatcgacgtgaacatggagtgagcgagccaacggagaaatggcgatgggaatggaggtgcagctggtgggagcagttggcacgccgatgaccggacgaagcaagtgaggcaagggatggacgtcgcacttcaatacgtgcctggcggcaccgacattccgatgcagcggctacccccggagccactcgtcgtccatgaaaagggcgacgaactggcctggcaagatctggcggcgcggggatcgaatggacggacgacaagagcgagcgaagaagtcctggcggcttggtgagaaaatggtggcgctgggggcgatgggaacggaggtgcggatggtggcagcagtggagtgagcgagcgtggcctggtttcttcttgaggaaatggcattgcagaggcgatgggaatggagatgcgaatggggggaggagttgccgtgccgacggccgaccgcgatttttttgggaagaatcgtgagaagggataacacacagagagaaaaatgagtgttaccttcgcgttacaggaatgaagcgacggcgacgtcgagactgattgtcgtcgtccgcggccatggggcggagcaccttccggagaagtcgagacttatacgattaaaaaaggtaggcgaagagtcggcgcagcatttcacacgcagtagtgactgacacctggatggttggattagtggcacggacaaacgatcttacggctacggaaatttggacgatgtgtccaccttcgtttgcgagcagcggaccctggtttgatatattaaaaaaaggcagccgaagagtcggcgcagcatttcacacgcagtagtgagtgacacctggatggttggattagtggcacggacaaacgatcttacggctacggaaatttggacgacgtgtccaccctcgtttgcgagtagcggaccctggtttaatatatagaaatagtgttgagttctcaacactgtatactcctgaaagtgacacgggcccatggaatgtgacactatcgttcagaactcatgaaagtgacacgttgttcggtgtgaaagtgttgatttagggtttagtgtaaccgcccgttcggtgtggaagtgttcaaatttctctacgcgcgttcggtagcctcaccgacggcgacggcgacctcacctcaccgacggcgacggcctcggcgacggcgacaacgatccccaattctcttcgcgacctgaccgtctccacttcggggtgaagaagaaagccaacatgccacaggggaagagtaagaagaacgtggtgaaggagaaagccaaaaagattaagaagaacgcggaatcgagagccaaagttcatgaaaatacagatcaaattgagatcaacattagagaaggtgtttcaatttggataacaaaggctgcagtgcaaaaatgttttgagtttccccctggtacagataagaagctgccaatagatccaactacaaaaacatttgattcactctacagagtattgagtgtttcagaaaaaaaaatcaatgtaaagaagaagaagatgaaggagaatatgaaggagaagcaggttgaggaggagaagattgagatgaacatggaggagaagaagcagaatctggttgaggatgaaggtagtcaacaggaggaaagtgaagaggaggacggtgaagatggggaaattggagaggaggaaggtgaagatggggcaattggagatgctaaagtggggggagatggagacaaggaaagtgctaaaaggggggggataaaggttgctgtcagaagaaatgttttgactcctttgaacatcaatttgatgttacagaacatcaacaacgatgagattctcaaacttcttgttaaaagaaatgaagacactgatggtacagaaccgaatcttgacattgacctgattgtcagatgtttctttgcggtgagcagtgttgctgagtttggcaaggataagaagaaactgatatcagggtgtacaactgtgctaatggttgttttcttggaccatctcgtggaaaaccctttggatcctttgaccatccctaggatcaacttgtatacttcagattttatcgcagacctgataatggtacccaaggatagccctggccctgaaaaaaagcgtcgtaagactcaagatgaaaaagaagactagtaatgttataaagaatctcgctactctcaattttaagaattcggaggatacatgctatcatgaagattcagaaatggtgccaagtccagggagagcatcgccgattgtttgctacctacaggtcatatgcacacagatgtattttatttacaatgccaactgttgtcaaaggattggaaggataaagtaattcttagctggaaagctactcaagaactgattcatcaagatattggagttaaggagctggacaaggaacttactgcagaggttatgaacaaagtggatctggtttgtgctttgttttatattacagtagagttttttcagattgacagtagagtttgtgctttttttagatatttattcctatcattcatgccggtcactggtcccttgttattctttccactgccaaacaagagacatatatccttgactcctacccaaggcacagtggggtggccaaggatgttttaactcaactgcagaagtatttggataataaacacaactttgacatgtctaactacactgaccatgtgccacctgttcagcatcaaaaaaacaattacgattgtggctttcatgttttattgtatattgaagaattcatgaaggagaagatgtataaaatcaacaaaaaaatggtgttgaaattcagaaagcagctttgcatgaatctcttgtaccatcctttgaacagaataaatcttgtggaattcagaaagaagctgggtattacattgaaaagaaaacttcctggtatacttgatcttactattgaaggtgagaggagtgaatctgaggctgcagtgataattgaaatagagaacagagatgataagactctagaggatgaacatatttcagttgagaaagagtaaggtaaaaaagaagagcatgtactatcaactgacacaaagaatgacgaagcttcatccccatctgacgaagagcctgagcagagtgagtcatctgagcagactgtgtatgaaagatggatgattccaaaggatcattatcacctgagaaagagcaagctggagaaaaatatcctcaaacgaaaaaagaggttgggcaaagacaacatgtcctctcaggatatgatttctccagtgtttggcaagaggcttgtgcctgcaaacacacattttacctctcttaggaagttgcgaaaacacaagtttacgtctgataagatcaacgatgagatctgcaaacatatcttgaactacaatgaacgggagttgttaagtgtggggcagactaccatgactgggggtcagctggaaaagtacgtaaatgaaggtgacaatggtgataaaatactcagagcattcatcacatgcttcacttgtgatgaaaagttcaatcaagggaacatcacaaccgtcatcccgccacatgaagtatccgaagagggtgaactctccaaagttgatgctgcacaacttgtagaagaaatcaaagctgtactcaaaggcaccaatgttgcacgtgtacgcaaagacaccgaatccaccaaagatcccaaagtgaaagtctttcgaaacatgaggaggacatttatattttttcctttctacaagaatgaagaattgtttgtatttcatgtcgatacgaaaagactacccatcattgatgctctgttttgcaagatgtcatcattgtcgtttgaagatagatcctgactaggaaagtctatcatgggctgtctactcaaagccatgaaggattccggcttcatggtgaaaaaatatggtgattgtaggttcacagttactgtaactgaactcgaattcaaagatagtgcctcagcgctcataagttttattgagaacttcacttctaagttggacgacaatgccaagaaactgaaaaagggtgacaaggactggctggaaccttacaagaagtcgacagtggcataccttgtttgtcacactgaaaataaggtggtgttgcctgacgatattgtgaagtacaagcaaaacaagtgaggtggttgagtcgttaatgggtccagtggctgtgttttaagacttgtatcacactacttgtatggctttattctctgaagctgttccattgttgccgttagtaacaggtgttgcttttgtctctgctcagtgggtgattcatttcatccagagttgctgcaactttaatcagtctatagtgttgggttcctagctcagtgttgagttctaaatgatcgtgttgtgttcctaccaagtgttgagctgcacgacggcgtgcgcagccgcagccgcaccggcgaggagcgtttagaactctgttgatctacatagtgtttacaccggctcaacagagttctcatgttgatttttgaaggacccacgtgttgggttcctgctcagtgttgagttctgaacgatagtgttatgttccatgggcccttgttgatttcgagaggacccacgggccgaacggcgtgtcactttcatgcgtctatagtgttgggttcctgtctagtgttgagttctcaactatggtgttgtgttcctccaagaagttgagtttcaggggcctattatattgtctcagttaatgggtaactcagttaatcctatatattgtgtcagttaatgggaactcagttaatggtatatgttgtctcagttaatgggtaactcagttaatccagcatatcattgatgagatc

SEQ ID NO: 52005 - DNA, 7453 bp, Zea Mays
atggacacaccgacgcgagttcttccccctgctgggcaaatccgatccataaatgtaactccgggaaggctcaccgatggcttgttacccttaccaatgatgaacatgggcccagatttgagccgggtctggtcatggttcgtggtcccatgcagacttgatgcgtgtaggcacacaacagcaaaacagctatttgaggagatgccgtcattgtcatccttactctctggctccaatactgcgagtgctgagcttcctctaatcccttgcaagctctgcaatggggtggtgattgagcgggtctccaaacaaccagaaaccacgtcgaggaagttctaccggtgcagagccaagaaaacggatgggtttgtcagtggtgatcgacgccttgagttgttaatgatcgcacttaatgatcatggcaaagccgttgaatctctaaccaattccatcagagagatgaagaaaaagctgtccaacctggagttagtgatggaagagctggataacgtgaaaaatttgatgaaggcagccatggttgaaattgaggaaaacaagaaatcgacagctgctgcattgaaactgatggagaatgagctgcaaaagctgaaagggtcaactaaagtgaaacctaggaatatggcacagtgttttctgcttttggcattgattgggtgtgttatgttccatgtcccgtgtcactttctggagtctaccgtggtgctcctgctaagtgttgagtcggatgttgattttgggaggacccacgggcgaagggcgtgtcactttcatgaggacccacgggccgaaccccgtgtcactttcatgaggtatagtgttgggttccttatcagagttgcgttcggatatatagagttgtgttcctccaatctgtgctgggtttcagggttccatgttgatttttgggaggacccgcggtcggaagcccgtgtcactttccggagtctacagcgttgcgttctgaatgctagtgttatgttccatgtcccgtgtcactttctggagtctaccgtggcgctcctgctaagtgttgagtcggatgggcggatgttgattttgggaggacccacgggtgaagggtgtgtccctttcatgcggtatagtgttgggttccttatcagtgttgcgttccttcaaggcgttgagtttcagggtcccatgttgatttttgggaggacccacggtccgaagcccgtgtcactttccggtgtctacagtgttgcgctctgaatgcttgtgttaggttccatgtcccatgtcactttctggagtctaccgtggggctcctgctaagtgttgattcggatgggcggatgttgattttgggataggactgggcgttcgggttacccgattagttcgggtcgggtagttcgggttttgataaattcgggtaatagaaactaatacccgatcacagctttaaaaacccgcgacccgtaatttcgggtacccgtaatttcgggttcgggtttgggtatacccaatttacccgaaatatataaagcacatgcgagggcgcgtttggctggtggcgcggcggcttgacagcgaggctgcgtacgcgtgtggccgcctggccgctaggtagtgcagcggcttgccggcgagggcgctgtccgctgtctgcgcttggtcgcctggccggtggcgcgacggcttgccggtgaggcagcctgttcgctgtacgcctgtccgctgtctgcgcgtggccgcctgtccgcctggccggtggccgcctgtccgctgtacggctgtacgcgcttcggcgcttggctgcctggcgcctggtgtgtggttgctagttaccgttgtgccttgttgtgagttgctgttgccgccatgccttgctgttgccggagaacaaagatctgaagtgctccttgctctggagtactagccttgaagttgcaggtggcgatagccgatggggattgggggacgtcgtagccaacgctggacaaggcagcggctgtggggctagcgttgtgcctggacgatgttggttatttcgggtcgaatgggtacttcgggtaccgcgggttaatacccgattaggcccgaacttagttcgggtatttagtttcgttacccgctagagctgttcgggtaacgggcttcgggctaaacgggtacgggttcgggtatttcgggtatagggcttcgggctcgggttttatgcccagatctattttgggatgacccacgggcgaacccccgtgtcactttcatgagttcacagtgttgagttctgaaggtagtgttacgttccatgtcccgtgtcactttcaggagtctacagcgttgcgttcctgatcagtgttgagctctaaacgatggtgttgcattgctgatcagtattgagttgggcgcatgttgattttgggaggacccacgggcgaacgatgtgtcactttcatgagttagtgtcgggttccaggttgagtttcggggggccatgttgattttttgaaggactcacgggccgaacctcgtgtcactttcattaggtatagtgttgggttccttctcaatgtggcgttcggaactatggtgttgcgttcctccaatctgttgggtttcagggtcccatgttgatttttgggaggacccgcggtccgaagcccgtgtaactttccggagtctacagtgttgcattctgaaaagcagtgttaggttccatgtacagtgttggagtctaccatggggctcctgctaagtgttgagtcagatgggcagatgttggttttgggaggacccacgggcgaagggcgtgtcactttcatgcggtatagtgttgcgttcctccaatctgttgggtttcagggtcccatgttgatttttgggaggacccgcgggttccatgttgattttttggaggacccgtggtccgtagtccgtgtcactttccggagtctacagtgttgcgttctgaatgctagtgttatgttccataacccgtgtcactttctggagtctaccgtggggctccttctaagtgttgagtcggatgggcggatgttggttttgggaggacccacgggcgaacgacggtcccatgttgatttttggcaggacccgcagtctgaagcccgtgtcactttccggagtctacagtgttgcgttctgaatactagtgttatgttccatgtcccgtgtcactttctggagtctaccgtggcgctcctgctaagtgttgagtcagatttgcggatgttgattttgggaggacccacggcaaacgcaggcttcccaaagcggcatggtcagttcgagctcgccctggggatgccgccgctctgcccatcgcagacgccgtggagcatcgacggcgacgtcgcaggacatgaggtcgcctaccagctggtgacccgaaacacccaggcggcccgccgccacgtcgagataacggccctgacggtgccgacattttggggcagcgggcattgcccggagccgctcgtcatcctaagaaagggcagcacggtggcctgctacggctacccccggagccactcgtcgtccatgaaaagggcgacgaactggcctggcaagatctggcggcgcggggatcgaatggacggacgacaagagcgagcgaagaagtcctggcggcttggtgagaaaatggtggcgctgggggcgatgggaacggaggtgcggatggtggcagcagtggagaatgaagcgacggcgacgtcgagactgattgtcgtcgtccgcggccatggggcggagcaccttccggagaagtcgagacttatacgattaaaaaagggaaccgcctcaccgattctgatgtcgaaggtaacctggtgccgatccgcaggggtgaagaagaaagccaacatgccacaggggaagagtaagaagaacgtggtgaaggagaaagccaaaaagattaagaagaacgcggaatcgagagccaaagttcatgaaaatacagatcaaattgagatcaacattagagaaggtgtttcaatttggataacaaaggctgcagtgcaaaaatgttttgagtttccccctggtacagataagaagctgccaatagatccaactacaaaaacatttgattcactctacagagtattgagtgtttcagaaaaaaaaatcaatgtaaagaagaagaagatgaaggagaatatgaaggagaagcaggttgaggaggagaagattgagatgaacatggaggagaagaagcagaatctggttgaggatgaaggtagtcaacaggaggaaagtgaagaggaggacggtgaagatggggaaattggagaggaggaaggtgaagatggggcaattggagatgctaaagtggggggagatggagacaaggaaagtgctaaaaggggggggataaaggttgctgtcagaagaaatgttttgactcctttgaacatcaatttgatgttacagaacatcaacaacgatgagattctcaaacttcttgttaaaagaaatgaagacactgatggtacagaaccgaatcttgacattgacctgattgtcagatgtttctttgcggtgagcagtgttgctgagtttggcaaggataagaagaaactgatatcagggtgtacaactgtgctaatggttgttttcttggaccatctcgtggaaaaccctttggatcctttgaccatccctaggatcaacttgtatacttcagattttatcgcagacctgataatggtacccaaggatagccctggccctgaaaaaaagcgtcgtaagactcaagatgaaaaagaagactagtaatgttataaagaatctcgctactctcaattttaagaattcggaggatacatgctatcatgaagattcagaaatggtgccaagtccagggagagcatcgccggtcatatgcacacagatgtattttatttacaatgccaactgttgtcaaaggattggaaggataaagtaattcttagctggaaagctactcaagaactgattcatcaagatattggagttaaggagctggacaaggaacttactgcagaggttatgaacaaagtggatctggtttgtgctttgttttatattacagtagagttttttcagattgacagtagagtttgtgctttttttagatatttattcctatcattcatgccggtcactggtcccttgttattctttccactgccaaacaagagacatatatccttgactcctacccaaggcacagtggggtggccaaggatgttttaactcaactgcagaagtatttggataataaacacaactttgacatgtctaactacactgaccatgtgccacctgttcagcatcaaaaaaacaattacgattgtggctttcatgttttattgtatattgaagaattcatgaaggagaagatgtataaaatcaacaaaaaaatggtgttgaaattcagaaagcagctttgcatgaatctcttgtaccatcctttgaacagaataaatcttgtggaattcagaaagaagctgggtattacattgaaaagaaaacttcctggtatacttgatcttactattgaaggtgagaggagtgaatctgaggctgcagtgataattgaaatagagaacagagatgataagactctagaggatgaacatatttcagttgagaaagagtaaggtaaaaaagaagagcatgtactatcaactgacacaaagaatgacgaagcttcatccccatctgacgaagagcctgagcagagtgagtcatctgagcagactgtgtatgaaagatggatgattccaaaggatcattatcacctgagaaagagcaagctggagaaaaatatcctcaaacgaaaaaagaggttgggcaaagacaacatgtcctctcaggatatgatttctccagtgtttggcaagaggcttgtgcctgcaaacacacattttacctctcttaggaagttgcgaaaacacaagtttacgtctgataagatcaacgatgagatctgcaaacatatcttgaactacaatgaacgggagttgttaagtgtggggcagactaccatgactgggggtcagctggaaaagtacgtaaatgaaggtgacaatggtgataaaatactcagagcattcatcacatgcttcacttgtgatgaaaagttcaatcaagggaacatcacaaccgtcatcccgccacatgaagtatccgaagagggtgaactctccaaagttgatgctgcacaacttgtagaagaaatcaaagctgtactcaaaggcaccaatgttgcacgtgtacgcaaagacaccgaatccaccaaagatcccaaagtgaaagtctttcgaaacatgaggaggacatttatattttttcctttctacaagaatgaagaattgtttgtatttcatgtcgatacgaaaagactacccatcattgatgctctgttttgcaagatgtcatcattgtcgtttgaagatagatcctgactaggaaagtctatcatgggctgtctactcaaagccatgaaggattccggcttcatggtgaaaaaatatggtgattgtaggttcacagttactgtaactgaactcgaattcaaagatagtgcctcagcgctcataagttttattgagaacttcacttctaagttggacgacaatgccaagaaactgaaaaagggtgacaaggactggctggaaccttacaagaagtcgacagtggcataccttgtttgtcacactgaaaataaggtggtgttgcctgacgatattgtgaagtacaagcaaaacaagtgaggtggttgagtcgttaatgggtccagtggctgtgttttaagacttgtatcacactacttgtatggctttattctctgaagctgttccattgttgccgttagtaacaggtgttgcttttgtctctgctcagtgggtgattcatttcatccagagttgctgcaactttaatcagtctatagtgttgggttcctagctcagtgttgagttctaaatgatcgtgttgtgttcctaccaagtgttgagctgcacgacggcgtgcgcagccgcagccgcaccggcgaggagcgtttagaactctgttgatctacatagtgtttacaccggctcaacagagttctcatgttgatttttgaaggacccacgtgttgggttcctgctcagtgttgagttctgaacgatagtgttatgttccatgggcccttgttgatttcgagaggacccacgggccgaacggcgtgtcactttcatgcgtctatagtgttgggttcctgtctagtgttgagttctcaactatggtgttgtgttcctccaagaagttgagtttcaggggcctattatattgtctcagttaatgggtaactcagttaatcctatatattgtgtcagttaatgggaactcagttaatggtatatgttgtctcagttaatgggtaactcagttaatccagcatatcattgatgagatc

SEQ ID NO: 52006 - DNA, 8495 bp, Zea Mays
atggacacaccgacgcgagttcttccccctgctgggcaaatccgatccataaatgtaactccgggaaggctcaccgatggcttgttacccttaccaatgatgaacatgggcccagatttgagccgggtctggtcatggttcgtggtcccatgcagacttgatgcgtgtaggcacacaacagcaaaacagctatttgaggagatgccgtcattgtcatccttactctctggctccaatactgcgagtgctgagcttcctctaatcccttgcaagctctgcaatggggtggtgattgagcgggtctccaaacaaccagaaaccacgtcgaggaagttctaccggtgcagagccaagaaaacggatgggtcttaatgtgattttttccactggcaagcgagctatgttgttttgttaatcgaggatgggtttgtcagtggtgatcgacgccttgagttgttaatgatcgcacttaatgatcatggcaaagccgttgaatctctaaccaattccatcagagagatgaagaaaaagctgtccaacctggagttagtgatggaagagctggataacgtgaaaaatttgatgaaggcagccatggttgaaattgaggaaaacaagaaatcgacagctgctgcattgaaactgatggagaatgagctgcaaaagctgaaagggtcaactaaagtgaaacctaggaatatggcacagtgttttctgcttttggcattgattgggtgtgttatgttccatgtcccgtgtcactttctggagtctaccgtggtgctcctgctaagtgttgagtcggatgttgattttgggaggacccacgggcgaagggcgtgtcactttcatgaggacccacgggccgaaccccgtgtcactttcatgaggtatagtgttgggttccttatcagagttgcgttcggatatatagagttgtgttcctccaatctgtgctgggtttcagggttccatgttgatttttgggaggacccgcggtcggaagcccgtgtcactttccggagtctacagcgttgcgttctgaatgctagtgttatgttccatgtcccgtgtcactttctggagtctaccgtggcgctcctgctaagtgttgagtcggatgggcggatgttgattttgggaggacccacgggtgaagggtgtgtccctttcatgcggtatagtgttgggttccttatcagtgttgcgttccttcaaggcgttgagtttcagggtcccatgttgatttttgggaggacccacgtgttggagtctaccatggggctcctgctaagtgttgagtcagatgggcagatgttggttttgggaggacccacgggcgaagggcgtgtcactttcatgcggtatagtgttgcgttcctccaatctgttgggtttcagggtcccatgttgatttttgggaggacccgcggtccgtagtccgtgtcactttccggagtctacagtgttgcgttctgaatgctagtgttatgttccataacccgtgtcactttctggagtctaccgtggggcccttctaagtgttgagtcggatggggggatgttggttttcggaggacccacgggcgaagggcgtgtcactttcatgcggtatagtgttgtgttccttcatctgttgcgtttcagggttccatgttgattttttggaggacccgtggtccgtagtccgtgtcactttccggagtctacagtgttgcgttctgaatgctagtgttatgttccataacccgtgtcactttctggagtctaccgtggggctccttctaagtgttgagtcggatgggcggatgttggttttgggaggacccacgggcgaacgacgtgtcactttcatgagttcgtagtgttgagttccatatcccgtgtcactttcaggagtatatagtgttgcgttcctgatccatgttgagttctaaacgatggtgtggcgttcctaatcagtattgagttgggcgcatgttgattttgggaggacccacgggcgaacgacgtgtcactttcatgagttatagtgttgatttttgaaggacccacgagccgaaccccgtgtcactttcatgaggtatagtgttgggttcgtgctcagtgtggcgttcgacactatggtgttgcgttcctccaatctgttgggtttcagggtcccatgttgatttttggcaggacccgcagtctgaagcccgtgtcactttccggagtctacagtgttgcgttctgaatactagtgttatgttccatgtcccgtgtcactttctggagtctaccgtggcgctcctgctaagtgttgagtcagatttgcggatgttgattttgggaggacccacgggtgaagggcgtgtcactttcatgaggtatagtgttgggctccttctcagtgttgtgttcggaactatgctgttgcgttccttcaaggtgttgagtttcagggtcccatgttgatttttgggagttatagtgttgagtttcagggtcccttttagactggaaaagtcttctgccataatcgtcagatttacctaaatgatgtaaaaaatggtttggaaaactctaaaacattaaataaagatcacataacattaattaataaaaaatgatataatacacaaacattaagtaagaattatagaaagttgaggcaccagtttgtatgcaggattcttcctcctaagatgtggaaagctaattagttttaaaccataatccacctcaatatatatgaattaaagtgcatagatgtggcaacaacgttgaagataaacatctatttgtacagcaaacgcaggcttcccaaagcggcatggtcagttcgagctcgccctggggatgccgccgctctgcccatcgcagacgccgtggagcatcgacggcgacgtcgcaggacatgaggtcgcctaccagctggtgacccgaaacacccaggcggcccgccgccacgtcgagataacggccctgacggtgccgacattttggggcagcgggcattgcccggagccgctcgtcatcctaagaaagggcagcacggtggcctgctagtacgtgacgggatctggcagcgcagggaacggagggacagacggcaagagcatgcaccacatcgacgtgaacatggagtgagcgagccaacggagaaatggcgatgggaatggaggtgcagctggtgggagcagttggcacgccgatgaccggacgaagcaagtgaggcaagggatggacgtcgcacttcaatacgtgcctggcggcaccgacattccgatgcagcggctacccccggagccactcgtcgtccatgaaaagggcgacgaactggcctggcaagatctggcggcgcggggatcgaatggacggacgacaagagcgagcgaagaagtcctggcggcttggtgagaaaatggtggcgctgggggcgatgggaacggaggtgcggatggtggcagcagtggagtgagcgagcgtggcctggtttcttcttgaggaaatggcattgcagaggcgatgggaatggagatgcgaatggggggaggagttgccgtgccgacggccgaccgcgatttttttgggaagaatcgtgagaagggataacacacagagagaaaaatgagtgttaccttcgcgttacaggaatgaagcgacggcgacgtcgagactgattgtcgtcgtccgcggccatggggcggagcaccttccggagaagtcgagacttatacgattaaaaaaggtaggcgaagagtcggcgcagcatttcacacgcagtagtgactgacacctggatggttggattagtggcacggacaaacgatcttacggctacggaaatttggacgatgtgtccaccttcgtttgcgagcagcggaccctggtttgatatattaaaaaaaggcagccgaagagtcggcgcagcatttcacacgcagtagtgagtgacacctggatggttggattagtggcacggacaaacgatcttacggctacggaaatttggacgacgtgtccaccctcgtttgcgagtagcggaccctggtttaatatatagaaatagtgttgagttctcaacactgtatactcctgaaagtgacacgggcccatggaatgtgacactatcgttcagaactcatgaaagtgacacgttgttcggtgtgaaagtgttgatttagggtttagtgtaaccgcccgttcggtgtggaagtgttcaaatttctctacgcgcgttcggtagcctcaccgacggcgacggcgacctcacctcaccgacggcgacggcctcggcgacggcgacaacgatccccaattctcttcgcgacctgaccgtctccacttcggtaaacccaccttcccttctctcctcgttccttgtcagggaaccgcctcaccgattctgatgtcgaaggtaacctggtgccgatccgcaggggtgaagaagaaagccaacatgccacaggggaagagtaagaagaacgtggtgaaggagaaagccaaaaagattaagaagaacgcggaatcgaggtattcactaggatcagtaacaaagttaatccaactccttccacctgctgcccgttagaaaattgtagaccttgatttccaaaacttactcaatctgaagttaggaaacaccaatagagtttttacccactttctcatggatagagccaaagttcatgaaaatacagatcaaattgagatcaacattagagaaggtgtttcaatttggataacaaaggctgcagtgcaaaaatgttttgagtttccccctggtacagataagaagctgccaatagatccaactacaaaaacatttgattcactctacagagtattgagtgtttcagaaaaaaaaatcaatgtaaagaagaagaagatgaaggagaatatgaaggagaagcaggttgaggaggagaagattgagatgaacatggaggagaagaagcagaatctggttgaggatgaaggtagtcaacaggaggaaagtgaagaggaggacggtgaagatggggaaattggagaggaggaaggtgaagatggggcaattggagatgctaaagtggggggagatggagacaaggaaagtgctaaaaggggggggataaaggttgctgtcagaagaaatgttttgactcctttgaacatcaatttgatgttacagaacatcaacaacgatgagattctcaaacttcttgttaaaagaaatgaagacactgatggtacagaaccgaatcttgacattgacctgattgtcagatgtttctttgcggtggtgttggacagactgttgttgccacaagccaccttttatctgagctcagctacattgaaagcagtgactgatctagacagactgaaaacagttgactggtcaattttattttcgaaaatttgaagagcagtgttgctgagtttggcaaggataagaagaaactgatatcagggtgtacaactgtgctaatggttgttttcttggaccatctcgtggaaaaccctttggatcctttgaccatccctaggatcaacttgtatacttcagattttatcgcagacctgataatggtacccaaggatagccctggccctgaaaaaaagcgtcgtaagactcaagatgaaaaagaagactagtaatgttataaagaatctcgctactctcaattttaagaattcggaggatacatgctatcatgaagattcagaaatggtgccaagtccagggagagcatcgccggttgttgcttctgtacaatctcataagaactttgttgatcatgcagatttagaaattgtgccatctcatgagaactctgttgatctacatagtgtttacatggcacatgtattggaaagaagcagacaaagcatagtagtggacatattggactacaatatacctgaatctacttttgcagattgtttgctacctacaggtcatatgcacacagatgtattttatttacaatgccaactgttgtcaaaggattggaaggataaagtaattcttagctggaaagctactcaagaactgattcatcaagatattggagttaaggagctggacaaggaacttactgcagaggttatgaacaaagtggatctggtttgtgctttgttttatattacagtagagttttttcagattgacagtagagtttgtgctttttttagatatttattcctatcattcatgccggtcactggtcccttgttattctttccactgccaaacaagagacatatatccttgactcctacccaaggcacagtggggtggccaaggatgttttaactcaactgcagaagtatttggataataaacacaactttgacatgtctaactacactgaccatgtgccacctgttcagcatcaaaaaaacaattacgattgtggctttcatgttttattgtatattgaagaattcatgaaggagaagatgtataaaatcaacaaaaaaatggtgttgaaattcagaaagcagctttgcatgaatctcttgtaccatcctttgaacagaataaatcttgtggaattcagaaagaagctgggtattacattgaaaagaaaacttcctggtatacttgatcttactattgaaggtgagaggagtgaatctgaggctgcagtgataattgaaatagagaacagagatgataagactctagaggatgaacatatttcagttgagaaagagtaaggtaaaaaagaagagcatgtactatcaactgacacaaagaatgacgaagcttcatccccatctgacgaagagcctgagcagagtgagtcatctgagcagactgtgtatgaaagatggatgattccaaaggatcattatcacctgagaaagagcaagctggagaaaaatatcctcaaacgaaaaaagaggttgggcaaagacaacatgtcctctcaggatatgatttctccagtgtttggcaagaggcttgtgcctgcaaacacacattttacctctcttaggaagttgcgaaaacacaagtttacgtctgataagatcaacgatgagatctgcaaacatatcttgaactacaatgaacgggagttgttaagtgtggggcagactaccatgactgggggtcagctggaaaagtacgtaaatgaaggtgacaatggtgataaaatactcagagcattcatcacatgcttcacttgtgatgaaaagttcaatcaagggaacatcacaaccgtcatcccgccacatgaagtatccgaagagggtgaactctccaaagttgatgctgcacaacttgtagaagaaatcaaagctgtactcaaaggcaccaatgttgcacgtgtacgcaaagacaccgaatccaccaaagatcccaaagtgaaagtctttcgaaacatgaggaggacatttatattttttcctttctacaagaatgaagaattgtttgtatttcatgtcgatacgaaaagactacccatcattgatgctctgttttgcaagatgtcatcattgtcgtttgaagatagatcctgactaggaaagtctatcatgggctgtctactcaaagccatgaaggattccggcttcatggtgaaaaaatatggtgattgtaggttcacagttactgtaactgaactcgaattcaaagatagtgcctcagcgctcataagttttattgagaacttcacttctaagttggacgacaatgccaagaaactgaaaaagggtgacaaggactggctggaaccttacaagaagtcgacagtggcataccttgtttgtcacactgaaaataaggtggtgttgcctgacgatattgtgaagtacaagcaaaacaagtgaggtggttgagtcgttaatgggtccagtggctgtgttttaagacttgtatcacactacttgtatggctttattctctgaagctgttccattgttgccgttagtaacaggtgttgcttttgtctctgctcagtgggtgattcatttcatccagagttgctgcaactttaatcagtctatagtgttgggttcctagctcagtgttgagttctaaatgatcgtgttgtgttcctaccaagtgttgagctgcacgacggcgtgcgcagccgcagccgcaccggcgaggagcgtttagaactctgttgatctacatagtgtttacaccggctcaacagagttctcatgttgatttttgaaggacccacgtgttgggttcctgctcagtgttgagttctgaacgatagtgttatgttccatgggcccttgttgatttcgagaggacccacgggccgaacggcgtgtcactttcatgcgtctatagtgttgggttcctgtctagtgttgagttctcaactatggtgttgtgttcctccaagaagttgagtttcaggggcctattatattgtctcagttaatgggtaactcagttaatcctatatattgtgtcagttaatgggaactcagttaatggtatatgttgtctcagttaatgggtaactcagttaatccagcatatcattgatgagatc

SEQ ID NO: 52007 - DNA, 2978 bp, Zea Mays
aagaagaagaaatgttttgactcctttgaacatcaatttgatgttacagaacatcaacaacgatgagattctcaaacttcttgttaaaagaaatgaagacactgatggtacagaaccgaatcttgacattgacctgattgtcagatgtttctttgcggtggtgttggacagactgttgttgccacaagccaccttttatctgagctcagctacattgaaagcagtgactgatctagacagactgaaaacagttgactggtcaattttattttcgaaaatttgaagagcagtgttgctgagtttggcaaggataagaagaaactgatatcagggtgtacaactgtgctaatggttgttttcttggaccatctcgtggaaaaccctttggatcctttgaccatccctaggatcaacttgtatacttcagattttatcgcagacctgataatggtacccaaggatagccctggccctgaaaaaaagcgtcgtaagtttaagaattcggaggatacatgctatcatgaagattcagaaatggtgccaagtccagggagagcatcgccggttgttgcttctgtacaatctcataagaactttgttgatcatgcagatttagaaattgtgccatctcatgagaactctgttgatctacatagtgtttacatggcacatgtattggaaagaagcagacaaagcatagtagtggacatattggactacaatatacctgaatctacttttgcagattgtttgctacctacaggtcatatgcacacagatgtattttatttacaatgccaactgttgtcaaaggattggaaggataaagtaattcttagctggaaagctactcaagaactgattcatcaagatattggagttaaggagctggacaaggaacttactgcagaggttatgaacaaagtggatctgatatttattcctatcattcatgccggtcactggtcccttgttattctttccactgccaaacaagagacatatatccttgactcctacccaaggcacagtggggtggccaaggatgttttaactcaactgcagaagtatttggataataaacacaactttgacatgtctaactacactgaccatgtgccacctgttcagcatcaaaaaaacaattacgattgtggctttcatgttttattgtatattgaagaattcatgaaggagaagatgtataaaatcaacaaaaaaatggtgttgaaattcagaaagcagctttgcatgaatctcttgtaccatcctttgaacagaataaatcttgtggaattcagaaagaagctgggtattacattgaaaagaaaacttcctggtatacttgatcttactattgaaggtgagaggagtgaatctgaggctgcagtgataattgaaatagagaacagagatgataagactctagaggatgaacatatttcagttgagaaagagaagttgcgaaaacacaagtttacgtctgataagatcaacgatgagatctgcaaacatatcttgaactacaatgaacgggagttgttaagtgtggggcagactaccatgactgggggtcagctggaaaagtacgtaaatgaaggtgacaatggtgataaaatactcagagcattcatcacatgcttcacttgtgatgaaaagttcaatcaagggaacatcacaaccgtcatcccgccacatgaagtatccgaagagggtgaactctccaaagttgatgctgcacaacttgtagaagaaatcaaagctgtactcaaaggcaccaatgttgcacgtgtacgcaaagacaccgaatccaccaaagatcccaaagtgaaagtctttcgaaacatgaggaggacatttatattttttcctttctacaagaatgaagaattgtttgtatttcatgtcgatacgaaaagactacccatcattgatgctctgttttgcaagatgtcatcattgtcgtttgaagatagatcctgactaggaaagtctatcatgggctgtctactcaaagccatgaaggattccggcttcatggtgaaaaaatatggtgattgtaggttcacagttactgtaactgaactcgaattcaaagatagtgcctcagcgctcataagttttattgagaacttcacttctaagttggacgacaatgccaagaaactgaaaaagggtgacaaggactggctggaaccttacaagaagtcgacagtggcataccttgtttgtcacactgaaaataaggtggtgttgcctgacgatattgtgaagtacaagcaaaacaagtgaggtggttgagtcgttaatgggtccagtggctgtgttttaagacttgtatcacactacttgtatggctttattctctgaagctgttccattgttgccgttagtaacaggtgttgcttttgtctctgctcagtgggtgattcatttcatccagagttgctgcaactttaatcagtctatagtgttgggttcctagctcagtgttgagttctaaatgatcgtgttgtgttcctaccaagtgttgagctgcacgacggcgtgcgcagccgcagccgcaccggcgaggagcgtttagaactctgttgatctacatagtgtttacaccggctcaacagagttctcatgttgatttttgaaggacccacgtgttgggttcctgctcagtgttgagttctgaacgatagtgttatgttccatgggcccttgttgatttcgagaggacccacgggccgaacggcgtgtcactttcatgcgtctatagtgttgggttcctgtctagtgttgagttctcaactatggtgttgtgttcctccaagaagttgagtttcaggggcctattatattgtctcagttaatgggtaactcagttaatcctatatattgtgtcagttaatgggaactcagttaatggtatatgttgtctcagttaatgggtaactcagttaatccagcatatcattgatgagatc

SEQ ID NO: 52008 - DNA, 3143 bp, Zea Mays
cccaatcatgccagaatgtgctgtttcagcttatgagagagtcggacgacctggacgacttgatactctagtcgagtcgtccggctgatcggccactaccaggcgacctgcctgactaatcgcgactaaccacgattagtcggacgacttgaaaacagtgattttaagaagacatgtagcatctggttggtagccccggagatttggagaaggatttgcttccacatttcagtcaagacatccaggaatatttatgtaccgagaaatttatgctaccagaaacttccttccagatgctaaaacaagttgacccattgcttacatctatggccctacaatcccaaatggagcacaatgacactgaacaatgtgacaatgatcagtcactgcgcagcagccacagatgtgtaaatatagagaagcctgtgtttgtgttccctacagatgtagtcaatgaaagtgaaacaggaaatctccaaaaggatccgcctgcaccaacttctgtttttcaccaaccatgtatgccccaaagcaggtcttacgtccctccgcaagaagatactattgatgctgttggtctaggcactaggtcctcagaaaggattcctattgtggaggggaacatgtctgttggatctgtgcttgcttcagatggctgtgatgcacctttgcagggaagcattactgagcccttttcccagcaggataaacatgaccatactgctacagttgaaccaaaatcttgtaagcaaaaatctccaagtctatctcactgtgctgatggagatggggcaaatgatggtggctccagcaatcagtcatctaaggtttccattcatgaaggactgagctctcatgccacggtaacttcaggttttgacagaatcagcgatgtcttaccaacagatgcatctggacctgagcatttgcctgagtgcataacagcacaggatacaaacatgatttcacagcttgacagcaggaaagctcatttgagtgctctgcaacaggataggggtgagaaagtaacccaagatctggaagatatctctgcaaatattgggctagtggaaaaggaccatgttcatggggatctgactttgcaatctgccagtgttttgctttctataagctgcaatggtgctaatcaaggaagtaaatctgaaaccaaccttcaaccagggattgttgctacagaggataggatggctttggaagagcagaatgcagacaagtctcacttagaattcagcgataccaacatggctaatcaagctctgcatgatgattgcagcgtcatgaaaaataatgcggtacatggcgggctgactgcacagactgctgcagtgtctcaaaactgcaatgtaaccttacatgataaaacttcagaagccaattgtttttctgagccggaaaatgaaaagaacattcaaaaaaataattgtcatacttatgttccaggttcttctcaggataggggtggagaaagtgcaaaggagacatcaaatgagctaaagtctaaggacgcttctccagaaatatttgtccatttcgaggatcaatacatcattgatactttggagggcttgtctcaacaagatttgtgcttgaaatgtggcaaaggtggtcagttgttggaatgcagccgctgttttttagctgttcatagtagctgtttgggttcatcagcgacatttgaagggacaaatttattctactgcccaatatgctcttataagaaagctattgaagcatgtaaaaaggcaaacaaaacatattgcgaagctaggaagaaccttgctgctttacttagcaaaacacaagtcaccaagcaagttcagccaggagatgcccatgaaaatgaagtaaataatcttgctcatcaggttaaagagcctaatcagcagaggaggaagcagaaaataaatgctatagtgctccagaataacaatgaaatacaagttaaggattcagagaaaaggcggcaagcagtagacgaagaaggtcgcaaagaagctagtaatgacaactcatctcatgaaacaggatcttcatctcagataagatgtgattctcctttgaatcaggacgttgaggctgaccaggatggtaatcttacagcttctaaccaacctggtggttctgatgaatcagaagcaacatcttctgatgactctggcaggccatcatcttcttggcagtcatcacgttattggcgttgtacgagacacaacaaaaaaggattgcaagataaggagccagctgtatcaagtaaatctaaggaggatcaacaaatgcctacttcaccagcgaaaagaaagtctgcaaacccgcaaaagcactattccaatcctgttgcgagagctcgaagacgcagaaaactctggtggacagcagaagaagaagcaatgttgaaggatgggatggcaaaattctctccacataatgatggtcaaatttcatggacccagatactgcaatatggccgtggtgtgtttaacatcgcgcgcctgccatgtgatttgagggtcaagtggaggaacatgcagatgaaggagaggcgggcagtctcttacacacacatataactgttgtgtgtcatactaaattactaaccatgccttcatttgtttgtgtccatctgcagatataattgatgtggcagatataaccttgcctttatttgtttgtggcaatcttacacacacatataacactgatgtggtactagaacatagcgaatatgcaagtaggaatggaagtgggtttctccgaaataggatgacagaggtatagtttttcccttcttttggtaagtacggcgttgattggttgtgtgatttggtgaacctagacctactatacccgtagatgatgtaaagagattggtagacactcactatgtactctgaaaagaggtatcagagtcgacttccttttgtttcttttgggattgaatctaacagtttagatgataacatccggcagctgtgtttcatccggcaactgtgcatagcaggctcagggacacgcaatgttcttgcatgagtttagggttcaattcgtaatactccctccatttcaaaatagtatttgttttagagtattaatagatttatacaatatttggtgtatgtgtttta

SEQ ID NO: 52009 - DNA, 1311 bp, Zea Mays
atgccgcccggttccgcctccgccgccgccatcgccacccgcttcgcgacccactggatagctgacgccctcgccggcgacgagtacatagacttctccgtgctcaagggtgaggctccaaatcctaaactccttcgccgttcgcctggacgctttcggtctcagggtctctcacctgggatggttaattggcttgttggcggtctgcagttctggtgggggcctcgtcgaagcccctcgcgggcgccccggagtttacgcgtgagcgggtcgcgctccggtgcattcaggaggtgtcgtccgtgatagccgccgggggtgacgccgcggacaccgcgggggtgcttagggttgatggcgcccaatcatgccagaatgtgctgtttcagcttatgagagaggttggtagccccggagatttggagaaggatttgcttccacatttcagtcaagacatccaggaatatttatgtaccgagaaatttatgctaccagaaacttccttccagatgttccaatcctgttgcgagagctcgaagacgcagaaaactctggtggacagcagaagaagaagcaatgttgaaggatgggatggcaaaattctctccacataatgatggtcaaatttcatggacccagatactgcaatatggccgtggtgtgtttaacatcgcgcgcctgccatgtgatttgagggtcaagtggaggaacatgcagatgaaggagaggcgggcagtctcttacacacacatataactgttgtgtgtcatactaaattactaaccatgccttcatttgtttgtgtccatctgcagatataattgatgtggcagatataaccttgcctttatttgtttgtggcaatcttacacacacatataacactgatgtggtactagaacatagcgaatatgcaagtaggaatggaagtgggtttctccgaaataggatgacagaggtatagtttttcccttcttttggtaagtacggcgttgattggttgtgtgatttggtgaacctagacctactatacccgtagatgatgtaaagagattggtagacactcactatgtactctgaaaagaggtatcagagtcgacttccttttgtttcttttgggattgaatctaacagtttagatgataacatccggcagctgtgtttcatccggcaactgtgcatagcaggctcagggacacgcaatgttcttgcatgagtttagggttcaattcgtaatactccctccatttcaaaatagtatttgttttagagtattaatagatttatacaatatttggtgtatgtgtttta

SEQ ID NO: 52010 - DNA, 3260 bp, Zea Mays
atgccgcccggttccgcctccgccgccgccatcgccacccgcttcgcgacccactggatagctgacgccctcgccggcgacgagtacatagacttctccgtgctcaagggtttctggtgggggcctcgtcgaagcccctcgcgggcgccccggagtttacgcgtgagcgggtcgcgctccggtgcattcaggaggtgtcgtccgtgatagccgccgggggtgacgccgcggacaccgcgggggtgcttagggttgatggcgcccaatcatgccagaatgtgctgtttcagcttatgagagaggttggtagccccggagatttggagaaggatttgcttccacatttcagtcaagacatccaggaatatttatgtaccgagaaatttatgctaccagaaacttccttccagatgctaaaacaagttgacccattgcttacatctatggccctacaatcccaaatggagcacaatgacactgaacaatgtgacaatgatcagtcactgcgcagcagccacagatgtgtaaatatagagaagcctgtgtttgtgttccctacagatgtagtcaatgaaagtgaaacaggaaatctccaaaaggatccgcctgcaccaacttctgtttttcaccaaccatgtatgccccaaagcaggtcttacgtccctccgcaagaagatactattgatgctgttggtctaggcactaggtcctcagaaaggattcctattgtggaggggaacatgtctgttggatctgtgcttgcttcagatggctgtgatgcacctttgcagggaagcattactgagcccttttcccagcaggataaacatgaccatactgctacagttgaaccaaaatcttgtaagcaaaaatctccaagtctatctcactgtgctgatggagatggggcaaatgatggtggctccagcaatcagtcatctaaggtttccattcatgaaggactgagctctcatgccacggtaacttcaggttttgacagaatcagcgatgtcttaccaacagatgcatctggacctgagcatttgcctgagtgcataacagcacaggatacaaacatgatttcacagcttgacagcaggaaagctcatttgagtgctctgcaacaggataggggtgagaaagtaacccaagatctggaagatatctctgcaaatattgggctagtggaaaaggaccatgttcatggggatctgactttgcaatctgccagtgttttgctttctataagctgcaatggtgctaatcaaggaagtaaatctgaaaccaaccttcaaccagggattgttgctacagaggataggatggctttggaagagcagaatgcagacaagtctcacttagaattcagcgataccaacatggctaatcaagctctgcatgatgattgcagcgtcatgaaaaataatgcggtacatggcgggctgactgcacagactgctgcagtgtctcaaaactgcaatgtaaccttacatgataaaacttcagaagccaattgtttttctgagccggaaaatgaaaagaacattcaaaaaaataattgtcatacttatgttccaggttcttctcaggataggggtggagaaagtgcaaaggagacatcaaatgagctaaagtctaaggacgcttctccagaaatatttgtccatttcgaggatcaatacatcattgatactttggagggcttgtctcaacaagatttgtgcttgaaatgtggcaaaggtggtcagttgttggaatgcagccgctgttttttagctgttcatagtagctgtttgggttcatcagcgacatttgaagggacaaatttattctactgcccaatatgctcttataagaaagctattgaagcatgtaaaaaggcaaacaaaacatattgcgaagctaggaagaaccttgctgctttacttagcaaaacacaagtcaccaagcaagttcagccaggagatgcccatgaaaatgaagtaaataatcttgctcatcaggttaaagagcctaatcagcagaggaggaagcagaaaataaatgctatagtgctccagaataacaatgaaatacaagttaaggattcagagaaaaggcggcaagcagtagacgaagaaggtcgcaaagaagctagtaatgacaactcatctcatgaaacaggatcttcatctcagataagatgtgattctcctttgaatcaggacgttgaggctgaccaggatggtaatcttacagcttctaaccaacctggtggttctgatgaatcagaagcaacatcttctgatgactctggcaggccatcatcttcttggcagtcatcacgttattggcgttgtacgagacacaacaaaaaaggattgcaagataaggagccagctgtatcaagtaaatctaaggaggatcaacaaatgcctacttcaccagcgaaaagaaagtctgcaaacccgcaaaagcactattccaatcctgttgcgagagctcgaagacgcagaaaactctggtggacagcagaagaagaagcaatgttgaaggatgggatggcaaaattctctccacataatgatggtcaaatttcatggacccagatactgcaatatggccgtggtgtgtttaacatcgcgcgcctgccatgtgatttgagggtcaagtggaggaacatgcagatgaaggagaggcgggcagtctcttacacacacatataactgttgtgtgtcatactaaattactaaccatgccttcatttgtttgtgtccatctgcagatataattgatgtggcagatataaccttgcctttatttgtttgtggcaatcttacacacacatataacactgatgtggtactagaacatagcgaatatgcaagtaggaatggaagtgggtttctccgaaataggatgacagaggtatagtttttcccttcttttggtaagtacggcgttgattggttgtgtgatttggtgaacctagacctactatacccgtagatgatgtaaagagattggtagacactcactatgtactctgaaaagaggtatcagagtcgacttccttttgtttcttttgggattgaatctaacagtttagatgataacatccggcagctgtgtttcatccggcaactgtgcatagcaggctcagggacacgcaatgttcttgcatgagtttagggttcaattcgtaatactccctccatttcaaaatagtatttgttttagagtattaatagatttatacaatatttggtgtatgtgtttta

SEQ ID NO: 52011 - DNA, 3231 bp, Zea Mays
ccctctcgtactcctccgcctcccgcaatgccgcccggttccgcctccgccgccgccatcgccacccgcttcgcgacccactggatagctgacgccctcgccggcgacgagtacatagacttctccgtgctcaaggttctggtgggggcctcgtcgaagcccctcgcgggcgccccggagtttacgcgtgagcgggtcgcgctccggtgcattcaggaggtgtcgtccgtgatagccgccgggggtgacgccgcggacaccgcgggggtgcttagggttgatggcgcccaatcatgccagaatgtgctgtttcagcttatgagagaggttggtagccccggagatttggagaaggatttgcttccacatttcagtcaagacatccaggaatatttatgtaccgagaaatttatgctaccagaaacttccttccagatgcacaatgacactgaacaatgtgacaatgatcagtcactgcgcagcagccacagatgtgtaaatatagagaagcctgtgtttgtgttccctacagatgtagtcaatgaaagtgaaacaggaaatctccaaaaggatccgcctgcaccaacttctgtttttcaccaaccatgtatgccccaaagcaggtcttacgtccctccgcaagaagatactattgatgctgttggtctaggcactaggtcctcagaaaggattcctattgtggaggggaacatgtctgttggatctgtgcttgcttcagatggctgtgatgcacctttgcagggaagcattactgagcccttttcccagcaggataaacatgaccatactgctacagttgaaccaaaatcttgtaagcaaaaatctccaagtctatctcactgtgctgatggagatggggcaaatgatggtggctccagcaatcagtcatctaaggtttccattcatgaaggactgagctctcatgccacggtaacttcaggttttgacagaatcagcgatgtcttaccaacagatgcatctggacctgagcatttgcctgagtgcataacagcacaggatacaaacatgatttcacagcttgacagcaggaaagctcatttgagtgctctgcaacaggataggggtgagaaagtaacccaagatctggaagatatctctgcaaatattgggctagtggaaaaggaccatgttcatggggatctgactttgcaatctgccagtgttttgctttctataagctgcaatggtgctaatcaaggaagtaaatctgaaaccaaccttcaaccagggattgttgctacagaggataggatggctttggaagagcagaatgcagacaagtctcacttagaattcagcgataccaacatggctaatcaagctctgcatgatgattgcagcgtcatgaaaaataatgcggtacatggcgggctgactgcacagactgctgcagtgtctcaaaactgcaatgtaaccttacatgataaaacttcagaagccaattgtttttctgagccggaaaatgaaaagaacattcaaaaaaataattgtcatacttatgttccaggttcttctcaggataggggtggagaaagtgcaaaggagacatcaaatgagctaaagtctaaggacgcttctccagaaatatttgtccatttcgaggatcaatacatcattgatactttggagggcttgtctcaacaagatttgtgcttgaaatgtggcaaaggtggtcagttgttggaatgcagccgctgttttttagctgttcatagtagctgtttgggttcatcagcgacatttgaagggacaaatttattctactgcccaatatgctcttataagaaagctattgaagcatgtaaaaaggcaaacaaaacatattgcgaagctaggaagaaccttgctgctttacttagcaaaacacaagtcaccaagcaagttcagccaggagatgcccatgaaaatgaagtaaataatcttgctcatcaggttaaagagcctaatcagcagaggaggaagcagaaaataaatgctatagtgctccagaataacaatgaaatacaagttaaggattcagagaaaaggcggcaagcagtagacgaagaaggtcgcaaagaagctagtaatgacaactcatctcatgaaacaggatcttcatctcagataagatgtgattctcctttgaatcaggacgttgaggctgaccaggatggtaatcttacagcttctaaccaacctggtggttctgatgaatcagaagcaacatcttctgatgactctggcaggccatcatcttcttggcagtcatcacgttattggcgttgtacgagacacaacaaaaaaggattgcaagataaggagccagctgtatcaagtaaatctaaggaggatcaacaaatgcctacttcaccagcgaaaagaaagtctgcaaacccgcaaaagcactattccaatcctgttgcgagagctcgaagacgcagaaaactctggtggacagcagaagaagaagcaatgttgaaggatgggatggcaaaattctctccacataatgatggtcaaatttcatggacccagatactgcaatatggccgtggtgtgtttaacatcgcgcgcctgccatgtgatttgagggtcaagtggaggaacatgcagatgaaggagaggcgggcagtctcttacacacacatataactgttgtgtgtcatactaaattactaaccatgccttcatttgtttgtgtccatctgcagatataattgatgtggcagatataaccttgcctttatttgtttgtggcaatcttacacacacatataacactgatgtggtactagaacatagcgaatatgcaagtaggaatggaagtgggtttctccgaaataggatgacagaggtatagtttttcccttcttttggtaagtacggcgttgattggttgtgtgatttggtgaacctagacctactatacccgtagatgatgtaaagagattggtagacactcactatgtactctgaaaagaggtatcagagtcgacttccttttgtttcttttgggattgaatctaacagtttagatgataacatccggcagctgtgtttcatccggcaactgtgcatagcaggctcagggacacgcaatgttcttgcatgagtttagggttcaattcgtaatactccctccatttcaaaatagtatttgttttagagtattaatagatttatacaatatttggtgtatgtgtttta

SEQ ID NO: 52012 - DNA, 3308 bp, Zea Mays
gtaaagcattttgcagtccagcagcagcagcccctctcgtactcctccgcctcccgcaatgccgcccggttccgcctccgccgccgccatcgccacccgcttcgcgacccactggatagctgacgccctcgccggcgacgagtacatagacttctccgtgctcaaggttctggtgggggcctcgtcgaagcccctcgcgggcgccccggagtttacgcgtgagcgggtcgcgctccggtgcattcaggaggtgtcgtccgtgatagccgccgggggtgacgccgcggacaccgcgggggtgcttagggttgatggcgcccaatcatgccagaatgtgctgtttcagcttatgagagaggttggtagccccggagatttggagaaggatttgcttccacatttcagtcaagacatccaggaatatttatgtaccgagaaatttatgctaccagaaacttccttccagatgctaaaacaagttgacccattgcttacatctatggccctacaatcccaaatggagcacaatgacactgaacaatgtgacaatgatcagtcactgcgcagcagccacagatgtgtaaatatagagaagcctgtgtttgtgttccctacagatgtagtcaatgaaagtgaaacaggaaatctccaaaaggatccgcctgcaccaacttctgtttttcaccaaccatgtatgccccaaagcaggtcttacgtccctccgcaagaagatactattgatgctgttggtctaggcactaggtcctcagaaaggattcctattgtggaggggaacatgtctgttggatctgtgcttgcttcagatggctgtgatgcacctttgcagggaagcattactgagcccttttcccagcaggataaacatgaccatactgctacagttgaaccaaaatcttgtaagcaaaaatctccaagtctatctcactgtgctgatggagatggggcaaatgatggtggctccagcaatcagtcatctaaggtttccattcatgaaggactgagctctcatgccacggtaacttcaggttttgacagaatcagcgatgtcttaccaacagatgcatctggacctgagcatttgcctgagtgcataacagcacaggatacaaacatgatttcacagcttgacagcaggaaagctcatttgagtgctctgcaacaggataggggtgagaaagtaacccaagatctggaagatatctctgcaaatattgggctagtggaaaaggaccatgttcatggggatctgactttgcaatctgccagtgttttgctttctataagctgcaatggtgctaatcaaggaagtaaatctgaaaccaaccttcaaccagggattgttgctacagaggataggatggctttggaagagcagaatgcagacaagtctcacttagaattcagcgataccaacatggctaatcaagctctgcatgatgattgcagcgtcatgaaaaataatgcggtacatggcgggctgactgcacagactgctgcagtgtctcaaaactgcaatgtaaccttacatgataaaacttcagaagccaattgtttttctgagccggaaaatgaaaagaacattcaaaaaaataattgtcatacttatgttccaggttcttctcaggataggggtggagaaagtgcaaaggagacatcaaatgagctaaagtctaaggacgcttctccagaaatatttgtccatttcgaggatcaatacatcattgatactttggagggcttgtctcaacaagatttgtgcttgaaatgtggcaaaggtggtcagttgttggaatgcagccgctgttttttagctgttcatagtagctgtttgggttcatcagcgacatttgaagggacaaatttattctactgcccaatatgctcttataagaaagctattgaagcatgtaaaaaggcaaacaaaacatattgcgaagctaggaagaaccttgctgctttacttagcaaaacacaagtcaccaagcaagttcagccaggagatgcccatgaaaatgaagtaaataatcttgctcatcaggttaaagagcctaatcagcagaggaggaagcagaaaataaatgctatagaataacaatgaaatacaagttaaggattcagagaaaaggcggcaagcagtagacgaagaaggtcgcaaagaagctagtaatgacaactcatctcatgaaacaggatcttcatctcagataagatgtgattctcctttgaatcaggacgttgaggctgaccaggatggtaatcttacagcttctaaccaacctggtggttctgatgaatcagaagcaacatcttctgatgactctggcaggccatcatcttcttggcagtcatcacgttattggcgttgtacgagacacaacaaaaaaggattgcaagataaggagccagctgtatcaagtaaatctaaggaggatcaacaaatgcctacttcaccagcgaaaagaaagtctgcaaacccgcaaaagcactattccaatcctgttgcgagagctcgaagacgcagaaaactctggtggacagcagaagaagaagcaatgttgaaggatgggatggcaaaattctctccacataatgatggtcaaatttcatggacccagatactgcaatatggccgtggtgtgtttaacatcgcgcgcctgccatgtgatttgagggtcaagtggaggaacatgcagatgaaggagaggcgggcagtctcttacacacacatataactgttgtgtgtcatactaaattactaaccatgccttcatttgtttgtgtccatctgcagatataattgatgtggcagatataaccttgcctttatttgtttgtggcaatcttacacacacatataacactgatgtggtactagaacatagcgaatatgcaagtaggaatggaagtgggtttctccgaaataggatgacagaggtatagtttttcccttcttttggtaagtacggcgttgattggttgtgtgatttggtgaacctagacctactatacccgtagatgatgtaaagagattggtagacactcactatgtactctgaaaagaggtatcagagtcgacttccttttgtttcttttgggattgaatctaacagtttagatgataacatccggcagctgtgtttcatccggcaactgtgcatagcaggctcagggacacgcaatgttcttgcatgagtttagggttcaattcgtaatactccctccatttcaaaatagtatttgttttagagtattaatagatttatacaatatttggtgtatgtgtttta

SEQ ID NO: 52013 - DNA, 319 bp, Zea Mays
gttatttgtagcctcccgttacctaattcggttggaagctccggagaattggagaaggatttgcttccacctttaagtcaagacatccaggaatatatatgtaccaagaaatttacactaccagaaacttctttccagttgcttggaagttttggagaattggaggatttgctttccacctttcagtcaagacatccaggaaaatatatgtacaaagaaatttacactaccagaaacttctttccagttggcacccccgaatcccctgcgtccagcacctcatccaaccatcccggtaatggttatttcttttctctct

SEQ ID NO: 52014 - DNA, 339 bp, Zea Mays
gttttggaactggaaacatttcatccatggaatactgccagcagcagtgggttggaagctccggagaattggagaaggatttgcttccacctttaagtcaagacatccaggaatatatatgtaccaagaaatttacactaccagaaacttctttccagttgcttggaagttttggagaattggaggatttgctttccacctttcagtcaagacatccaggaaaatatatgtacaaagaaatttacactaccagaaacttctttccagttggcacccccgaatcccctgcgtccagcacctcatccaaccatcccggtaatggttatttcttttctctct

SEQ ID NO: 52015 - DNA, 639 bp, Zea Mays
gtaaaaaaaaaaaaattggggtcctccgcctcccgcaatgcctcccccttccgcctccgcctcccgcttggcgacccactggatagctgacgccctcgccgacgacgagtccctcgacttctccgtgctgaaggctctgttgggggactcgtcgaagtccctcgcgggagccccggaggccacgcgtgagcgggtcgcgctccggtgcattcaggaggtgtcgtccgtgatagcctctgggggtgatgccgcggccccggcgggggtgcctagggttgatggcgcttggtcatgcgaggatgtgttgtttcggcttatcagagacgttggaagctccggagaattggagaaggatttgcttccacctttaagtcaagacatccaggaatatatatgtaccaagaaatttacactaccagaaacttctttccagttgagttccagcgccgcttaagccccgcgccttgttccccggtttccccgcgacggttgagcccggcttctcggtcctcggccccatccaggtgtatcgtcgccggtgcacggtcccagcttccaactgggctccaggcacccccgaatcccctgcgtccagcacctcatccaaccatcccggtaatggttatttcttttctctct

SEQ ID NO: 52016 - DNA, 392 bp, Zea Mays
gtaaaaaaaaaaaaattggggtcctccgcctcccgcaatgcctcccccttccgcctccgcctcccgcttggcgacccactggatagctgacgccctcgccgacgacgagtccctcgacttctccgtgctgaagggttggaagctccggagaattggagaaggatttgcttccacctttaagtcaagacatccaggaatatatatgtaccaagaaatttacactaccagaaacttctttccagttgggcctcagtgtatcagggttgcatgagattcagtgtagcagggtagcaggggattcggtgtagcagagtttcagttgagcacccccgaatcccctgcgtccagcacctcatccaaccatcccggtaatggttatttcttttctctct

SEQ ID NO: 52017 - DNA, 888 bp, Zea Mays
gtaaaaaaaaaaaaattggggtcctccgcctcccgcaatgcctcccccttccgcctccgcctcccgcttggcgacccactggatagctgacgccctcgccgacgacgagtccctcgacttctccgtgctgaagggttggaagctccggagaattggagaaggatttgcttccacctttaagtcaagacatccaggaatatatatgtaccaagaaatttacactaccagaaacttctttccagttgcttggaagttttggagaattggaggatttgctttccacctttcagtcaagacatccaggaaaatatatgtacaaagaaatttacactaccagaaacttctttccagttggtaagttaaagagaatctcaatattataagtaaaacagtggcaaattgaatttgtaattttctcttcagctaaaaggagttgagattgtgtgtgtgtgcatattgctcaagttcagcatcctttatataagttttcttggcagatatcatttatctaagtcttcaaaatttaaatgctccttattggcaattccaaccatgtagttaccttgtgtacttgttaaattggttgtttatagtagtgctctgcatacagtgtaaataaatggtatagttctttagtacttattggcaatcccgcgttgcttgcgccgggcgccccgttcctcagagttccagcgccgcttaagccccgcgccttgttccccggtttccccgcgacggttgagcccggcttctcggtcctcggccccatccaggtgtatcgtcgccggtgcacggtcccagcttccaactgggctccaggcacccccgaatcccctgcgtccagcacctcatccaaccatcccggtaatggttatttcttttctctct

SEQ ID NO: 52018 - DNA, 687 bp, Zea Mays
gtaaaaaaaaaaaaattggggtcctccgcctcccgcaatgcctcccccttccgcctccgcctcccgcttggcgacccactggatagctgacgccctcgccgacgacgagtccctcgacttctccgtgctgaaggctctgttgggggactcgtcgaagtccctcgcgggagccccggaggccacgcgtgagcgggtcgcgctccggtgcattcaggaggtgtcgtccgtgatagcctctgggggtgatgccgcggccccggcgggggtgcctagggttgatggcgcttggtcatgcgaggatgtgttgtttcggcttatcagagacgttggaagctccggagaattggagaaggatttgcttccacctttaagtcaagacatccaggaatatatatgtaccaagaaatttacactaccagaaacttctttccagttgcttggaagttttggagaattggaggatttgctttccacctttcagtcaagacatccaggaaaatatatgtacaaagaaatttacactaccagaaacttctttccagttgggcctcagtgtatcagggttgcatgagattcagtgtagcagggtagcaggggattcggtgtagcagagtttcagcacccccgaatcccctgcgtccagcacctcatccaaccatcccggtaatggttatttcttttctctct

SEQ ID NO: 52019 - DNA, 578 bp, Zea Mays
cttcgatacggagctcccgtaaacgttacttttattttgcagttcagcggttcagccccctcaagtcggggtactctgtaaaaaaaaaaaaattggggtcctccgcctcccgcaatgcctcccccttccgcctccgcctcccgcttggcgacccactggatagctgacgccctcgccgacgacgagtccctcgacttctccgtgctgaagggttggaagctccggagaattggagaaggatttgcttccacctttaagtcaagacatccaggaatatatatgtaccaagaaatttacactaccagaaacttctttccagttgcttggaagttttggagaattggaggatttgctttccacctttcagtcaagacatccaggaaaatatatgtacaaagaaatttacactaccagaaacttctttccagttgggcctcagtgtatcagggttgcatgagattcagtgtagcagggtagcaggggattcggtgtagcagagtttcagttgagcacccccgaatcccctgcgtccagcacctcatccaaccatcccggtaatggttatttcttttctctct

SEQ ID NO: 52020 - DNA, 930 bp, Zea Mays
aagaacaagagaacaacaaaaataatgttttagatgatcatatgcaccaaagacacggttttaaaatgactgtgtcctgaaatagaaaacaaatggaatgatcttcttcgatacggagctcccgtaaacgttacttttattttgcagttcagcggttcagccccctcaagtcggggtactctgtaaaaaaaaaaaaattggggtcctccgcctcccgcaatgcctcccccttccgcctccgcctcccgcttggcgacccactggatagctgacgccctcgccgacgacgagtccctcgacttctccgtgctgaaggctctgttgggggactcgtcgaagtccctcgcgggagccccggaggccacgcgtgagcgggtcgcgctccggtgcattcaggaggtgtcgtccgtgatagcctctgggggtgatgccgcggccccggcgggggtgcctagggttgatggcgcttggtcatgcgaggatgtgttgtttcggcttatcagagacgttggaagctccggagaattggagaaggatttgcttccacctttaagtcaagacatccaggaatatatatgtaccaagaaatttacactaccagaaacttctttccagttgcttggaagttttggagaattggaggatttgctttccacctttcagtcaagacatccaggaaaatatatgtacaaagaaatttacactaccagaaacttctttccagttgagttccagcgccgcttaagccccgcgccttgttccccggtttccccgcgacggttgagcccggcttctcggtcctcggccccatccaggtgtatcgtcgccggtgcacggtcccagcttccaactgggctccaggcacccccgaatcccctgcgtccagcacctcatccaaccatcccggtaatggttatttcttttctctct

SEQ ID NO: 52021 - DNA, 605 bp, Zea Mays
aagaacaagagaacaacaaaaataatgttttagatgatcatatgcaccaaagacacggttttaaaatgactgtgtcctgaaatagaaaacaaatggaatgatcttcttcgatacggagctcccgtaaacgttacttttattttgcagttcagcggttcagccccctcaagtcggggtactctgtaaaaaaaaaaaaattggggtcctccgcctcccgcaatgcctcccccttccgcctccgcctcccgcttggcgacccactggatagctgacgccctcgccgacgacgagtccctcgacttctccgtgctgaagggttggaagctccggagaattggagaaggatttgcttccacctttaagtcaagacatccaggaatatatatgtaccaagaaatttacactaccagaaacttctttccagttgcttggaagttttggagaattggaggatttgctttccacctttcagtcaagacatccaggaaaatatatgtacaaagaaatttacactaccagaaacttctttccagttggcacccccgaatcccctgcgtccagcacctcatccaaccatcccggtaatggttatttcttttctctct

SEQ ID NO: 52022 - DNA, 820 bp, Zea Mays
cattatttaagaacaagagaacaacaaaaataatgttttagatgatcatatgcaccaaagacacggttttaaaatgactgtgtcctgaaatagaaaacaaatggaatgatcttcttcgatacggagctcccgtaaacgttacttttattttgcagttcagcggttcagccccctcaagtcggggtactctgtaaaaaaaaaaaaattggggtcctccgcctcccgcaatgcctcccccttccgcctccgcctcccgcttggcgacccactggatagctgacgccctcgccgacgacgagtccctcgacttctccgtgctgaagggttggaagctccggagaattggagaaggatttgcttccacctttaagtcaagacatccaggaatatatatgtaccaagaaatttacactaccagaaacttctttccagttgcttggaagttttggagaattggaggatttgctttccacctttcagtcaagacatccaggaaaatatatgtacaaagaaatttacactaccagaaacttctttccagttgagttccagcgccgcttaagccccgcgccttgttccccggtttccccgcgacggttgagcccggcttctcggtcctcggccccatccaggtgtatcgtcgccggtgcacggtcccagcttccaactgggctccagggcctcagtgtatcagggttgcatgagattcagtgtagcagggtagcaggggattcggtgtagcagagtttcagcacccccgaatcccctgcgtccagcacctcatccaaccatcccggtaatggttatttcttttctctct

SEQ ID NO: 52023 - DNA, 747 bp, Zea Mays
cattatttaagaacaagagaacaacaaaaataatgttttagatgatcatatgcaccaaagacacggttttaaaatgactgtgtcctgaaatagaaaacaaatggaatgatcttcttcgatacggagctcccgtaaacgttacttttattttgcagttcagcggttcagccccctcaagtcggggtactctgtaaaaaaaaaaaaattggggtcctccgcctcccgcaatgcctcccccttccgcctccgcctcccgcttggcgacccactggatagctgacgccctcgccgacgacgagtccctcgacttctccgtgctgaagggttggaagctccggagaattggagaaggatttgcttccacctttaagtcaagacatccaggaatatatatgtaccaagaaatttacactaccagaaacttctttccagttgcttggaagttttggagaattggaggatttgctttccacctttcagtcaagacatccaggaaaatatatgtacaaagaaatttacactaccagaaacttctttccagttgagttccagcgccgcttaagccccgcgccttgttccccggtttccccgcgacggttgagcccggcttctcggtcctcggccccatccaggtgtatcgtcgccggtgcacggtcccagcttccaactgggctccaggcacccccgaatcccctgcgtccagcacctcatccaaccatcccggtaatggttatttcttttctctct

SEQ ID NO: 52024 - DNA, 321 bp, Zea Mays
cacaagttttgttgagtgcttgcacatttgttcctgttccatgttttggaactggaaacatttcatccatggaatactgccagcagcagtgggttggaagctccggagaattggagaaggatttgcttccacctttaagtcaagacatccaggaatatatatgtaccaagaaatttacactaccagaaacttctttccagttgcttggaagttttggagaattggaggatttgctttccacctttcagtcaagacatccaggaaaatatatgtacaaagaaatttacactaccagaaacttctttccagttgagttccagc

SEQ ID NO: 52025 - DNA, 294 bp, Zea Mays
cattgattaagttgaagcaatagcataaagctaaccatagttacccaaaaggtaaacaaggataaaggtaaatagaaagctagtcaacccttaggttttcaataatgtaatgcgggacagtgaattataagtaagtagaacataataggtcagaggactgccttcaccaaacagatgctcagggtcttcaaccttgtggaactcgaagagaatgatcacttggtcgtcgaagcttgactgtcaattcaccgaagctcggaaacggatcgcgttctattcgcaacgcgagcgaag

SEQ ID NO: 52026 - DNA, 3482 bp, Zea Mays
tgtgaattgtggtatggcgcctcgagtatttgatcacctctttgcaaggatccaaaaggaaaaggaattaagaatagatgaaacgctcaggtttacatgtaaatgctcttttctggagatttataatgagcagattctggatctcctcaaccccaattctgtaaacttgcagataagggaggattccagaaagggtgtccatgttgagagtttgacggaacatgaaatctccaatgctcgagaagctctgcaacaacttattgagggagcagcaaaccggaaggtagcagccaccaatatgaaccatgcaagtagccgctctcatagtgttttcacgtgccttataaaaagtaagtgggagtcaaaaggtatcaactaccaccgcttttctcgactcaaccttgttgaccttgcaggctcagagaggcaaaagagctcaggtgctaaaggggagcgattgaaggaagctaccaacatcaacaaatcactctcaactttgggacttgtcattacgaacctaattgctgtgtcaaacaaaaagtcacagcatgttccgtacagagattcaaaattaacattcctccttcaggattcccttggaggaaattcaaaaacgaccataattgcaaacataagcccatccagctgttgtgctgctgagacattaagcacattgaaattcgcacaacgagctaaatacataaggaacaatgctataattaacgaggatgcttctggtgatgttcttagcatgcgcttactacagatccagaagcttaaactactcaggctagctacttacactattttgccggtacctcgtgttcagaggaaagattgtgatgctgcccttgtcgctgcttttaagagggaacaggagaaggaagcagcacagttgaaggcaatgatagatgcaaatcagattgctgaacagctggaagctcaaaaaacagaagaggtaagaagtttcaagatgaggcttaagttttgcgaagaacggatcaaaatattggagcaggttgcttcagggaaattatctgttgaagcacatcttctgcaagagaaggaaaaccttgtaaaggagttagaagttttgcagtgtcaattagatcgtaatccagaaattacaaaatttgcaatggagaatctacaactaaaggaagacttacgaaggttgcagtcatttgttgatgaagatgaacgagaaatgatgcatgagcaaatcattgttttacaagataggctgcttgaggctcttgactggaagcttatgcatgagaagggacctgttaccaaggccctctcattattcgaggagccacccagtgatgaggaaaaagagtttcttcgtttgcagtttataattttgtcactgcaggctattcaaaacgagagagaaattgagttgttgcgtaaaaaattgacattctgccttgaagcaaaagagaatcttgagaggcatgtaaatgagttgaccacagagttggagcttacaaagaaacatgataacacagataaagaatccaagcctgcccagctccaggatcaaggagaggcagatttacataacttgtctgatgctcagatggaatttaagactttggttgacgcgatagcttctgcaagtcaacgggaagcagaagctcatgaaactgtgattggtttggccaaagataatgaagaattgagaatgcagcttaaggttttgattgaggataacaagagattgattgagctctatcaacacgcttttgtcaatgtcgaggcaaaccaagatggaaaccctgtgaacgaagatctgctcaatgcccaaccagcagcaacatcagatttgcatgcacataactcatccaatgtggaagaagagcctaagatagtagatgaaaaatgcacaaatgaggacaatttctcaagagttacatccgttgaattgtgtcttcagctggaggagatggatgaggaaaatgaaggacttatgggtttgcatgagaaaactatgcaggaaagagatgtattcaaacggaagattttagagcaaagcgactctgaagctgtaaaagatattttattgggcgagaaagatgctgaaatgagtgaagcagctgagaatcctgaagtgaaacatgttcatgactccataattgtagctttgaaagatgtgctgcagattgttcggagtaagctggagcttgtccaagataaggttgtgtctactcaggatgcagtaaaatattttaagctactagaaatggctagtggtaaggccacagaactttattcaagaattgagcttcagtatctaggcgcacagcgtcttcaggaagacatcactgtccttaagtctgtgctgtcagaatcacaggagaagataattgcttttgaaggcaagtatttcttgcctgcagcatcatgttggaacatggttttgaagaccaaaagtcctgcagagtccaggttggatgccagctttgaatcaatgaatcagaagaaagaacggttcaatcatctccaaactcgcaaaaatgaactatctgccgcaagaagaagagcacgtgaatctgaaactgagttgagaagcaaaattgatggccttaaagtgaaacttggcgcgtatggagctcaaagaaaggaggaagaaaaggtcctgtttgctattgataacttggatacttccactgcaccaatgcataaacccaagaactatggcaaggcaaccgcgccgctgaaatccgatgaggattggatgaagcttcggtgtgaactacagaaggcccgcgaacagttctttatggtgcaaaaggaaataaagaacatcaataaatgtgattatattgattgtgagattgcagtccttgaagcagaaatagaggactcctggttctccatgctggaaagtgacatcgagaggtttgtccttgacagtacgttcacagagatttgggagggtagggcaaaggacatggaggcctcgctggttgagtaccaggactgtgtttttcaagtcagtttgaaggaggaagagatcaagatgtgtaatgagtccttgcagtatcaagccagggacagggagtcggatgaacttcagtcgaagctaaaccaagcgatgcgggagctgggtgagcttctgcaagatagaagatgcttaacagattgcagtctggatgaacccatgctgcccgttgttgaaaaggtggcaacagaccttgaagccgtccggatttatgtcgatgaagctaaacagcttttgcttgtcgacaaccaagctaatcagtgaacatacgcagctagtttgaggctctggcatatctagggctggctgtacaaaccaacaactgttattttctgagatgggtcatttaggataacggctctgaataagatgtaatagtagtacagactacagacttcagtttgaaaacgtgtggatacaatggcataaagtcaagtacatattttgcttggttccttgggctagtgagagc

SEQ ID NO: 52027 - DNA, 3777 bp, Zea Mays
ctgagctcgcatacctcctcttcgctctcagctcctcacgcaactctctccgtcgtactaacatgatgcatctggacggcgtcgacgacgagctcggcgatggcgactgcgccccctctaccgcgcgctttgagctccaggaggatccttccttctggaaggacaacaatgtgcaggttgtgatccgtatccgacccctgagcggcagtgagatatcgcttcaggggcagaagcggtgcgtcaggcaggatagtagcaagggccagtgccttgcatggactggaaatcccgagtcccgcttcactttcgatctcgtcgcggacgaacatgtctcgcaggaggatatgttcaaagttgctggggtgcccatggtggagaactgtatagctggctataacagctgcatgtttgcttacgggcaggaaaaggaattaagaatagatgaaacgctcaggtttacatgtaaatgctcttttctggagatttataatgagcagattctggatctcctcaaccccaattctgtaaacttgcagataagggaggattccagaaagggtgtccatgttgagagtttgacggaacatgaaatctccaatgctcgagaagctctgcaacaacttattgagggagcagcaaaccggaaggtagcagccaccaatatgaaccatgcaagtagccgctctcatagtgttttcacgtgccttataaaaagtaagtgggagtcaaaaggtatcaactaccaccgcttttctcgactcaaccttgttgaccttgcaggctcagagaggcaaaagagctcaggtgctaaaggggagcgattgaaggaagctaccaacatcaacaaatcactctcaactttgggacttgtcattacgaacctaattgctgtgtcaaacaaaaagtcacagcatgttccgtacagagattcaaaattaacattcctccttcaggattcccttggaggaaattcaaaaacgaccataattgcaaacataagcccatccagctgttgtgctgctgagacattaagcacattgaaattcgcacaacgagctaaatacataaggaacaatgctataattaacgaggatgcttctggtgatgttcttagcatgcgcttactacagatccagaagcttaaaaggaaagattgtgatgctgcccttgtcgctgcttttaagagggaacaggagaaggaagcagcacagttgaaggcaatgatagatgcaaatcagattgctgaacagctggaagctcaaaaaacagaagaggtaagaagtttcaagatgaggcttaagttttgcgaagaacggatcaaaatattggagcaggttgcttcagggaaattatctgttgaagcacatcttctgcaagagaaggaaaaccttgtaaaggagttagaagttttgcagtgtcaattagatcgtaatccagaaattacaaaatttgcaatggagaatctacaactaaaggaagacttacgaaggttgcagtcatttgttgatgaagatgaacgagaaatgatgcatgagcaaatcattgttttacaagataggctgcttgaggctcttgactggaagcttatgcatgagaagggacctgttaccaaggccctctcattattcgaggagccacccagtgatgaggaaaaagagtttcttcgtttgcaggctattcaaaacgagagagaaattgagttgttgcgtaaaaaattgacattctgccttgaagcaaaagagaatcttgagaggcatgtaaatgagttgaccacagagttggagcttacaaagaaacatgataacacagataaagaatccaagcctgcccagctccaggatcaaggagaggcagatttacataacttgtctgatgctcagatggaatttaagactttggttgacgcgatagcttctgcaagtcaacgggaagcagaagctcatgaaactgtgattggtttggccaaagataatgaagaattgagaatgcagcttaaggttttgattgaggataacaagagattgattgagctctatcaacacgcttttgtcaatgtcgaggcaaaccaagatggaaaccctgtgaacgaagatctgctcaatgcccaaccagcagcaacatcagatttgcatgcacataactcatccaatgtggaagaagagcctaagatagtagatgaaaaatgcacaaatgaggacaatttctcaagagttacatccgttgaattgtgtcttcagctggaggagatggatgaggaaaatgaaggacttatgggtttgcatgagaaaactatgcaggaaagagatgtattcaaacggaagattttagagcaaagcgactctgaagctgtaaaagatattttattgggcgagaaagatgctgaaatgagtgaagcagctgagaatcctgaagtgaaacatgttcatgactccataattgtagctttgaaagatgtgctgcagattgttcggagtaagctggagcttgtccaagataaggttgtgtctactcaggatgcagtaaaatattttaagctactagaaatggctagtggtaaggccacagaactttattcaagaattgagcttcagtatctaggcgcacagcgtcttcaggaagacatcactgtccttaagtctgtgctgtcagaatcacaggagaagataattgcttttgaaggcaagtatttcttgcctgcagcatcatgttggaacatggttttgaagaccaaaagtcctgcagagtccaggttggatgccagctttgaatcaatgaatcagaagaaagaacggttcaatcatctccaaactcgcaaaaatgaactatctgccgcaagaagaagagcacgtgaatctgaaactgagttgagaagcaaaattgatggccttaaagtgaaacttggcgcgtatggagctcaaagaaaggaggaagaaaaggtcctgtttgctattgataacttggatacttccactgcaccaatgcataaacccaagaactatggcaaggcaaccgcgccgctgaaatccgatgaggattggatgaagcttcggtgtgaactacagaaggcccgcgaacagttctttatggtgcaaaaggaaataaagaacatcaataaatgtgattatattgattgtgagattgcagtccttgaagcagaaatagaggactcctggttctccatgctggaaagtgacatcgagaggtttgtccttgacagtacgttcacagagatttgggagggtagggcaaaggacatggaggcctcgctggttgagtaccaggactgtgtttttcaagtcagtttgaaggaggaagagatcaagatgtgtaatgagtccttgcagtatcaagccagggacagggagtcggatgaacttcagtcgaagctaaaccaagcgatgcgggagctgggtgagcttctgcaagatagaagatgcttaacagattgcagtctggatgaacccatgctgcccgttgttgaaaaggtggcaacagaccttgaagccgtccggatttatgtcgatgaagctaaacagcttttgcttgtcgacaaccaagctaatcagtgaacatacgcagctagtttgaggctctggcatatctagggctggctgtacaaaccaacaactgttattttctgagatgggtcatttaggataacggctctgaataagatgtaatagtagtacagactacagacttcagtttgaaaacgtgtggatacaatggcataaagtcaagtacatattttgcttggttccttgggctagtgagagc

SEQ ID NO: 52028 - DNA, 1970 bp, Zea Mays
atgtatgtaccattcatcctccactgcatgcatgctacccggcggcggcccaagcttcatcgatcgccgatcatcttctagctagcagctagcttgttattagctcatcggcgatggactacgtggtcgcccggatgcaattgcaacaagcagcagtgccgccgcctgttcactccatcgccgaccaccgtcctccgcctgtgtcgcagaggacgcggggcagcgcgacgatgcaacgacagcggcgtgaggcactcgaacaggaggtggcagagctgaagcagcagctatccaacgagcagacggtgcaccagatcctggagcgcgccctgcagcccagcagctccatggccctcgccaacatccccgccttcatccccaccaaggccaaggagctgctcgcggagctgctgctggtggaggaagagatcgccaggctggaggaccagataaaaaggatgaagaagtccgccgccacgcagcagcagcagcagcagcagacggagcactgcaagtccatgttcttcatcagccaggccatggacggcgaggcgtacctcagcacggtggtgaacaacaagaggcattccctggcgtcgtcgtcagatgggcatgcggtgttggagaagaagatcgcccagcacgagctgcccatcaccaagaagagccccacggtgatagcaaagaggagggcgagagaccagcagcagccgcccaacaagctgtcggagaggatcctcaagtgcctggtgtgcatcttcatgcggctgctccggtcgtcccgggcgtccgagtccgccgcgggcaacctcggcggcttcaggatggacatggggctcgtcaacgtggctgcagctgcggcggccaaggagaaggagaggggccagcaggatcactacggcatcttcggcatccaggactccatggtgagggacatcgggccctacaagaacctcgtcaggttcaccacctcggctggctccggctccggctccggctccggctccctggacctccacctcctcagcagagggttctcggcgtcgcccctggtaagcaaactgagggagatgctggaggcgctgcagcaggtggatgtgcgctccttgaatcaccaccagaggctggcgttctggctcaacatctacaacacatgcatcatgcacggcattctgcagcatggtttgccctcaaactcggacaagttactcgcactcaagaacaaggcaacaatcaacgtgtcagggcaaactttcaatgcgttggtgattgagaattttatcttgaggcagccgtcaagtgtgaaacaggagttgtggcaatgcgacgtggatgtggaagaagaacaggcggtgagggaggtttatgggctcaagacttcagaacccaacattctctttgcactctgctgcggcatcagatcatcgccagcaatcgtgttcttgtggatctggacaaggcaaagcttgagtacctgcaggcatcgctggtggtgacatccaccaggaggctcatgatcccaagcctcctccactccaacatgcatgactttgcaaaggacacggagtcgctgcttcgatggatctgcgagcagctgcccacgtcctggtccatcaggaaatccatggtggattgcctcgccgccattaccaacaacaacaacaagctggaggaggtggtcgtggatgtcattcccttggactacgacttccaatacctgctgcccatgtgatcaactcatcatgcatcataaatattattaattgcccattccattaattccatgcatggattattattctgtaagttaactgatacagatggagttattgtgtagtcttgtctatctcattagctactaggatggactccaacaaggaaactattcaaatgttgcttgctggtgatcattatattgtagatttctagtgattacaaagtttcataactcttcaatacctacaactttc

SEQ ID NO: 52029 - DNA, 1074 bp, Zea Mays
aaacaagtcaaccatgcatccaactaatgccagagagagagagagagagagagagagagagagagagagagagagagagagagagagagagagagagagagagagacctaaatcatctctgggtcgactatctatcaatcatatcgaacgaatatgcatatctcattatcgcaaggacagatccgatgcatgtagtaggatgcacggatggcaagaagatgcataataaatatatcttttttcttggtaggagactaggagtatatgaatgatttcttggtattagctagccagggtggttgctgtccatgtaatatccttttttttttcccttagtgcgcccccggcaccacccatggaagatcatcatgcatcctgaatcctcatgatggccaccaccacccaccagcagctagcttacgctgcctagtacacaaactaggtaatcgctgacctgaatgagaacgagggaccatcacaaagagacttttttgcctttgcgtgggcagtacccaatcccagttcccagttgtgctggctcgtctgagtagcatgcacctgcacctcttccacccttctcacttcaattcagaagttgctttctgaagcccagcccttcttttccaaagccaatctcagctcctaagacgcacacgaaaccaatcacgagtgtcatccactagtatacagagctaaaccggtaccaagatacaagcacgcatacctttactctcttcttgttggcattgaaatcgataaatcctgatcgagacgccgaccgatactgaaccatggtcttgttgccaggagggaaccagaactccacatcatctacaaacttcagcatcgacaaatgatatcaaatggccaccacatttacgcacatctagtaacgcccacaaaaaggaaaacaagttgtccggctttgtcttcgtgacctggttccaaccaaatacaagatgatgctgcagaaaaatatatgactccaaggcggtaacaccgggcagagagcaagggacggaggactcttctgaacgccaaggtagcttggtttgctgccactggagccaagag

SEQ ID NO: 52030 - DNA, 2564 bp, Zea Mays
tcccctctcttgcctgcctccctccctccctccctccttctccatctccgctttccctcctcgcctaggcctagccgcccccgcacgccacgccacgccacgccacattcgcatctctggatccccctcccctcgccctctcccattacccgccgccgccgccgcctcgcgcccgcgacccacccggcctcccacttcgatcccgccccgattccctgcccccgccccgattccgattcgtcactgtatcgcgcgcgcgggtgggaagacagcgatggctcgtggcgggggcctctcgccccgccgcgggtgatctctcctctagcggggagccttcccgcgttcccaagcggaggatcccgtcgcagctggtgcctcacctatccctctccttcgcatctccgccgtgctctctcgcgcaccccctcgaccctaggtttgctccttccctcccttcctcgccacccgattcgatctcgctccctccggcctccggctaggctgctccgtctctcctccgccatgttctcgcacggcgctgattccgcccacgacgccggggccgtcggcgtcagcagcggcggggctaccgtccccacccgcttcgtctggccctatggtgggaagagggtcttcgtctcaggctccttcaccaggtggtcggaacatttgccgatgtctcctatcgaaggctgccccactgtatttcaggctatttgcagtctgtctcctgggattcacgagtacaaattctttgtggacggggaatggcggcatgatgagcgtcaacctaccatatctggggagtttggcatagttaacacactttacttgacaagggaatataaccaaataaataccttatcaagtccaagcacacctggaagcaggatgaacatggatgtggataatgaaaattttcaacgttacgttgtcagatggtaccgtttcagaaggtactctgagagtttcagaggctgcaatacaaatatctaggtgtcgtgtttctgaatatctgagtttgcatacatgctatgatttactcccagattctggcaaggttattgccctagacattaatttacctgtgaagcaatcattccatattctccatgaacaggggattcctgtagctcctctctgggactcattcagaggtcaatttgttggtctccttagcccattggatttcatactcatattgcgggagctagaaactcatggctcgaacttgacagaagagcagcttgaaacacacactatatctgcatggaaagaggctaagcggcaaactaatggaagaaatgatggtcagtggcgaccgcaacagcatctagtgcatgccaccccttatgagtccttgagggacattgcagtaaagcttttgcaaaatggcatttctacagtgccagttatttattcatcatcatcagatggatcattcccgcagttattgcatcttgcatcactttctggaattttgaaatgtatttgtagatacttcaaaaactcaactggtaatttgcctattctgaaccaaccagtgtgctccattccgctgggttcctgggttccgaaaattggtgatctgaacagtcgtccattggctatgttgcgacctaatgcatcacttagctctgcccttaacatgttggttcaagctggagtaagctcaataccaattgtggatgacaacgactccctgcttgacacttactctagaagtgacatcacagccctagcaaaagacaaggtctacacacatgttcggctggatgagatgaccattcaccaggctttgcagcttggacaagatgccaatacaccttttggattctttaacggccagagatgccagatgtgcctccggtctgatcctttgctgaaggtgatggagcgactggctaatcctggggtgcggcgggtgttcattgtggaagctgggagcaaacgtgtggagggcatcatatcactaagtgacattttcaagttcttgctgagcttgtgaggagaggagggcatggcggagtttttttaacagtagcaaccctctgggcctttgggtccttgcggataattggctatcgtcagggttcatggtctgtaaagttccttttttttttgtttcgttttttaccatttggcccctcccgcttgtataacctcaattaatataatggcaaccttcatttaatatgaggttacttgagggttacttgaaaaattacaagagatgttctttgcgaatagtctctttatacagagccttatacttgtaatatgcggttttttagctgtcccttgtatttagaaaattaatccgatgtctttggattgtatatgctcttagaacaattttaataatagcccacaacggattttataatgttgccatgtcacatatagttaaataaaagtctactcacataattttatgactaaacaacattttttttttgtcttcggtccgccatttacgttttggtctccatagtacggtaaggcatttttggtcatccgtgagtttttctgatcgattaggcattttaagtcttcggtctgcc

SEQ ID NO: 52031 - DNA, 2565 bp, Zea Mays
tcccctctcttgcctgcctccctccctccctccctccttctccatctccgctttccctcctcgcctaggcctagccgcccccgcacgccacgccacgccacgccacattcgcatctctggatccccctcccctcgccctctcccattacccgccgccgccgccgcctcgcgcccgcgacccacccggcctcccacttcgatcccgccccgattccctgcccccgccccgattccgattcgtcactgtatcgcgcgcgcgggtgggaagacagcgatggctcgtggcgggggcctctcgccccgccgcgggtgatctctcctctagcggggagccttcccgcgttcccaagcggaggatcccgtcgcagctggtgcctcacctatccctctccttcgcatctccgccgtgctctctcgcgcaccccctcgaccctaggtttgctccttccctcccttcctcgccacccgattcgatctcgctccctccggcctccggctaggctgctccgtctctcctccgccatgttctcgcacggcgctgattccgcccacgacgccggggccgtcggcgtcagcagcggcggggctaccgtccccacccgcttcgtctggccctatggtgggaagagggtcttcgtctcaggctccttcaccaggtggtcggaacatttgccgatgtctcctatcgaaggctgccccactgtatttcaggctatttgcagtctgtctcctgggattcacgagtacaaattctttgtggacggggaatggcggcatgatgagcgtcaacctaccatatctggggagtttggcatagttaacacactttacttgacaagggaatataaccaaataaataccttatcaagtccaagcacacctggaagcaggatgaacatggatgtggataatgaaaattttcaacgtacggttacgttgtcagatggtaccgtttcagaaggtactctgagagtttcagaggctgcaatacaaatatctaggtgtcgtgtttctgaatatctgagtttgcatacatgctatgatttactcccagattctggcaaggttattgccctagacattaatttacctgtgaagcaatcattccatattctccatgaacaggggattcctgtagctcctctctgggactcattcagaggtcaatttgttggtctccttagcccattggatttcatactcatattgcgggagaaactcatggctcgaacttgacagaagagcagcttgaaacacacactatatctgcatggaaagaggctaagcggcaaactaatggaagaaatgatggtcagtggcgaccgcaacagcatctagtgcatgccaccccttatgagtccttgagggacattgcagtaaagcttttgcaaaatggcatttctacagtgccagttatttattcatcatcatcagatggatcattcccgcagttattgcatcttgcatcactttctggaattttgaaatgtatttgtagatacttcaaaaactcaactggtaatttgcctattctgaaccaaccagtgtgctccattccgctgggttcctgggttccgaaaattggtgatctgaacagtcgtccattggctatgttgcgacctaatgcatcacttagctctgcccttaacatgttggttcaagctggagtaagctcaataccaattgtggatgacaacgactccctgcttgacacttactctagaagtgacatcacagccctagcaaaagacaaggtctacacacatgttcggctggatgagatgaccattcaccaggctttgcagcttggacaagatgccaatacaccttttggattctttaacggccagagatgccagatgtgcctccggtctgatcctttgctgaaggtgatggagcgactggctaatcctggggtgcggcgggtgttcattgtggaagctgggagcaaacgtgtggagggcatcatatcactaagtgacattttcaagttcttgctgagcttgtgaggagaggagggcatggcggagtttttttaacagtagcaaccctctgggcctttgggtccttgcggataattggctatcgtcagggttcatggtctgtaaagttccttttttttttgtttcgttttttaccatttggcccctcccgcttgtataacctcaattaatataatggcaaccttcatttaatatgaggttacttgagggttacttgaaaaattacaagagatgttctttgcgaatagtctctttatacagagccttatacttgtaatatgcggttttttagctgtcccttgtatttagaaaattaatccgatgtctttggattgtatatgctcttagaacaattttaataatagcccacaacggattttataatgttgccatgtcacatatagttaaataaaagtctactcacataattttatgactaaacaacattttttttttgtcttcggtccgccatttacgttttggtctccatagtacggtaaggcatttttggtcatccgtgagtttttctgatcgattaggcattttaagtcttcggtctgcc

SEQ ID NO: 52032 - DNA, 2424 bp, Zea Mays
tcccctctcttgcctgcctccctccctccctccctccttctccatctccgctttccctcctcgcctaggcctagccgcccccgcacgccacgccacgccacgccacattcgcatctctggatccccctcccctcgccctctcccattacccgccgccgccgccgcctcgcgcccgcgacccacccggcctcccacttcgatcccgccccgattccctgcccccgccccgattccgattcgtcactgtatcgcgcgcgcgggtgggaagacagcgatggctcgtggcgggggcctctcgccccgccgcgggtgatctctcctctagcggggagccttcccgcgttcccaagcggaggatcccgtcgcagctggtgcctcacctatccctctccttcgcatctccgccgtgctctctcgcgcaccccctcgaccctaggtttgctccttccctcccttcctcgccacccgattcgatctcgctccctccggcctccggctaggctgctccgtctctcctccgccatgttctcgcacggcgctgattccgcccacgacgccggggccgtcggcgtcagcagcggcggggctaccgtccccacccgcttcgtctggccctatggtgggaagagggtcttcgtctcaggctccttcaccaggtggtcggaacatttgccgatgtctcctatcgaaggctgccccactgtatttcaggctatttgcagtctgtctcctgggattcacgagtacaaattctttgtggacggggaatggcggcatgatgagcgtcaacctaccatatctggggagtttggcatagttaacacactttacttgacaagggaatataaccaaataaataccttatcaagtccaagcacacctggaagcaggatgaacatggatgtggataatgaaaattttcaacgtacggttacgttgtcagatggtaccgtttcagaaggtactctgagagtttcagaggctgcaatacaaatatctaggtgtcgtgtttctgaatatctgagtttgcatacatgctatgatttactcccagattctggcaaggttattgccctagacattaatttacctgtgaagcaatcattccatattctccatgaacaggggattcctgtagctcctctctgggactcattcagaggtcaatttgttggtctccttagcccattggatttcatactcatattgcgggagctagaaactcatggctcgaacttgacagaagagcagcttgaaacacacactatatctgcatggaaagaggctaagcggcaaactaatggaagaaatgatggtcagtggcgaccgcaacagcatctagtgcatgtatttgtagatacttcaaaaactcaactggtaatttgcctattctgaaccaaccagtgtgctccattccgctgggttcctgggttccgaaaattggtgatctgaacagtcgtccattggctatgttgcgacctaatgcatcacttagctctgcccttaacatgttggttcaagctggagtaagctcaataccaattgtggatgacaacgactccctgcttgacacttactctagaagtgacatcacagccctagcaaaagacaaggtctacacacatgttcggctggatgagatgaccattcaccaggctttgcagcttggacaagatgccaatacaccttttggattctttaacggccagagatgccagatgtgcctccggtctgatcctttgctgaaggtgatggagcgactggctaatcctggggtgcggcgggtgttcattgtggaagctgggagcaaacgtgtggagggcatcatatcactaagtgacattttcaagttcttgctgagcttgtgaggagaggagggcatggcggagtttttttaacagtagcaaccctctgggcctttgggtccttgcggataattggctatcgtcagggttcatggtctgtaaagttccttttttttttgtttcgttttttaccatttggcccctcccgcttgtataacctcaattaatataatggcaaccttcatttaatatgaggttacttgagggttacttgaaaaattacaagagatgttctttgcgaatagtctctttatacagagccttatacttgtaatatgcggttttttagctgtcccttgtatttagaaaattaatccgatgtctttggattgtatatgctcttagaacaattttaataatagcccacaacggattttataatgttgccatgtcacatatagttaaataaaagtctactcacataattttatgactaaacaacattttttttttgtcttcggtccgccatttacgttttggtctccatagtacggtaaggcatttttggtcatccgtgagtttttctgatcgattaggcattttaagtcttcggtctgcc

SEQ ID NO: 52033 - DNA, 1108 bp, Zea Mays
gagctggaagaaggtgaaccaacacaaccatcgcgatgaccatgagatcaaaggcaacctttcatgagtgggccgggccacttagaccaacatggggtagggagggaggagcccaggcccaggaaggactccgtccgggtacggcggcggcgttgggcgcgatgcaaaaggcgaaagaagcgaagaagataaggagggaccaagaccaacccagtgcaccacacaaggcattgtcagcggcggcggcggcggcgggccggcggagactcccaggccaggagcagtctgccgattggaaggggagatgaaggccacgctcaagggccgctacgagggcgacaaggccacggccgccaccaccctcgccgcccccgccggcgacctccgcctcaaggcctccgccaccgaggccgccttcaccaacggtccttccctgcgaggcctcaccctcaccctcgagaagcccggcgccttcctcgttgacctcaagccccacaaccaggctccggcggctgccgcctcaagtacacctacgcgcacggggtcgaccgcctcaccaccatcgagcccctcttcgacaccaacaagaacgcatgggagttcgccatcaccaggaagttcgccggaggggacgccgtcaagggcacctaccaggcctccaccaagctgctcggcctcgagtggagcagggactctctcgccggcggctccttcaaggttgcgacgacattcgatttgtcggaccaaagcaaagcaccaaagctaatagcagagagcacgtggaactacgaaatatgaaaaatggaagtgtccttctcatatcatacatactgcttgattgctgtatcctcctgaactatggagctattgttttttcggaacccttggtggtggtttacatctgattcttttgatcattttttcggctgtcgtgtcatgggagttttcactgagctgcggtcgtgccattggagttttctgttgagaatgaatgaacgacgagtatggtctatgttcctggggtttgtttgcgtggaagcccgtctgggttctggcttctgctcatgtggtggcgtcaactcatgaaaaatggaagtgtccctaaatt

SEQ ID NO: 52034 - DNA, 1538 bp, Zea Mays
gtcagatttgtctggttgagatggtggcatcatttttttttggggtctggggtttagaaaggttgatccagacagatgggaatttgcaaatgagggttttctgagaggacaaaaacatctgctgaagactatcaacagaaggaaaccatccttgcagggtaacagccaaccacagcaacctcagttgcagaacgctcctgtgccttcgtgtgtagaggtgggtaagtttgggttggaggaagagattgaacggctgaaaagggacaagaatgttcttatgcaagagcttgtaaggctgagacagcaacagcaaacaactgaccatcagctccagactttgggcaagcgtcttcaagggatggagtcacggcagcaacagatgatgtctttcctggccaaagcaatgcaaagtcctggtttcctagcacagtttgtacagcgaaatgagaacagcaggaggagaatagtagctgcgaacaagaaaaggcggctgcccaagcaagatggtggactcgagtccgaaagttctgctgcttcgttagacggtcaaattatcaagtatcagccttcgatcaacgaagcagccaaagcaatgctaaggaagatcctaaacgtagattcttcgcataggtttgaatctatgggcaattcagataatagtaataataataatattctgctggaggattatatgccggccgcccaagcttttgagagctcttcgtcgacaagaaattctggggtcacccttgcagaggttccagcaaactcaggcttggcgtatgtcggcacgagctcggctatctgttctcctccagcggcccctgaaatgcagtgcccagtggtgctggataacaaggcgtacaagcaagtggccagcatgagtgctgtgcctcctgtttcaagtgacatgggtattattccggaattctcagatctggcagacttggtctctgtggatattcttggaggggcctttgagatgatgcctggtcctgagttccccctgccagaagaaggtgatgatgggaccaccatgtacaacaacaacgacgaggaggctcagagccttccaggcatcatcaactccatctgggagcagttcctggtaggcagccctctatctaccgataatgaggaagttgattcagcaggcggactatatgcgcaggaggatggatggagcaaagtggggaacatcgctaatcttacagaacagatgggacttgtatcatcaacaaatcaccgggactcagggaatgggctgtactagtatcttaattaatacagtagactgaggattctggtaataagtgttgcatgctcttttcttatttaattattttcccccttttcgccaactcaatatgggaggtgggggtgaggagattcaaaggcatgtttggctcgttacctaagttgacacactttgccaaacttacttttatgactaaggttagttatttaatttggacgactaactttagacaaagtgtgacacatttagccacaaaccaaacagaccctctgtctttcag

SEQ ID NO: 52035 - DNA, 1537 bp, Zea Mays
gttcgttatatctggctgcgcacaaatgggatgtcacaaatccggaaggggtttagaaaggttgatccagacagatgggaatttgcaaatgagggttttctgagaggacaaaaacatctgctgaagactatcaacagaaggaaaccatccttgcagggtaacagccaaccacagcaacctcagttgcagaacgctcctgtgccttcgtgtgtagaggtgggtaagtttgggttggaggaagagattgaacggctgaaaagggacaagaatgttcttatgcaagagcttgtaaggctgagacagcaacagcaaacaactgaccatcagctccagactttgggcaagcgtcttcaagggatggagtcacggcagcaacagatgatgtctttcctggccaaagcaatgcaaagtcctggtttcctagcacagtttgtacagcgaaatgagaacagcaggaggagaatagtagctgcgaacaagaaaaggcggctgcccaagcaagatggtggactcgagtccgaaagttctgctgcttcgttagacggtcaaattatcaagtatcagccttcgatcaacgaagcagccaaagcaatgctaaggaagatcctaaacgtagattcttcgcataggtttgaatctatgggcaattcagataatagtaataataataatattctgctggaggattatatgccggccgcccaagcttttgagagctcttcgtcgacaagaaattctggggtcacccttgcagaggttccagcaaactcaggcttggcgtatgtcggcacgagctcggctatctgttctcctccagcggcccctgaaatgcagtgcccagtggtgctggataacaaggcgtacaagcaagtggccagcatgagtgctgtgcctcctgtttcaagtgacatgggtattattccggaattctcagatctggcagacttggtctctgtggatattcttggaggggcctttgagatgatgcctggtcctgagttccccctgccagaagaaggtgatgatgggaccaccatgtacaacaacaacgacgaggaggctcagagccttccaggcatcatcaactccatctgggagcagttcctggtaggcagccctctatctaccgataatgaggaagttgattcagcaggcggactatatgcgcaggaggatggatggagcaaagtggggaacatcgctaatcttacagaacagatgggacttgtatcatcaacaaatcaccgggactcagggaatgggctgtactagtatcttaattaatacagtagactgaggattctggtaataagtgttgcatgctcttttcttatttaattattttcccccttttcgccaactcaatatgggaggtgggggtgaggagattcaaaggcatgtttggctcgttacctaagttgacacactttgccaaacttacttttatgactaaggttagttatttaatttggacgactaactttagacaaagtgtgacacatttagccacaaaccaaacagaccctctgtctttcag

SEQ ID NO: 52036 - DNA, 2838 bp, Zea Mays
cttaatgcgatgcagcgttcccacattccagaggggaaaaaagtgagaatcaaatccaaacaaaaggaagagcaaatcatcacatagtagatcaaaagcaaaatcaggagttcaggacagggcagcatcctcagctgatgagcagcagaacaatattgctatcgtgatgtttgcagactattccagtccataaaacaaaatgctttttccaatgttcgtcatcaaggttaaacatgggatcaccatgaccagaggcaacctccatcgatccacaaagcaacatcaagaaccacaccaaggcttaacggcgactgaccgtcactgcgaggccgatgtggatgacggtgatgcgccggcgctgctgctgctttcagtggacggggagtagaggaacttcttcgcgttgcccacgtgcacgcaggtcagcttcacgacatttctccccgtcatccatttcagcaggatcttcatgtgcgtcttgctgttcagaccagcgatgccagcatcctgtggtacaaatacgccagggtcagtgtacagctctggacaaggcagcaagcagggtaaatttcattttcgggttcagatactatacattcttctgtagctaaagctaacctgaatcaggccttagtgggtaacaatgacagtttcagaaccatctgcaggcgcttatatataactggaggtaaaacgatcatgtatacatgctacagactgcaacccaagcctgtcaaatctcatggaagagttatttgccactctgcctgtctgattgactgattaggtacctaaattcatacactgtgaagaaagtaatcccgatttcggttccttagcaacgtgatcgtatagcagaatgtgcgtatgattacagagacgagatgatccaatttaatctcaagttcacagagtttaaaaaaaaatagacacccttgtgggggtccaagcatattgagcaaaggtaccgtggattgaaaatttggaacagaagggaaacgttgcaattgcaaaggtaccagataccacaacaaatagctgttgggatggggctacgattgaatccatctttcgtggtattccataagacagtgcctagtttatcttactaccactactggtacgcaaaaaggcattaggctgcttttctgatgttgtagcagagtgatttggatattttatacaggtttgtaggggcagtagcgtgtttatcgttgtaccttggcgtggttccaggtgttgccgacggtgaggggcccatggtcggagaggatctggaggagtcggccggaaatggcgacggcctcctccttgggcaccttggggttgatccgcctcacgtccacggaccgcttcttagagaagtgccgccgcaacacctcccacgccacccccgggaacccaccgcccccgcccccgccgccgctgcctcggaggaactgcatcacgccgctgacgcctgggtcgctggggttcagtgtaaagccctcttcctcctcaccccctgggagtgggctagaggataaaatgctgtccatttgggcccaacaggcccaggcccagcccaacaattgctgactcgggctcggccagctggtccattcgccgcccagccctcacagactcgtctcgtcgtcggccactcccgtccgcgagccgctccatccaaccacctcatccctctccgacacgggccgcggccgaccgccggctccgtggccttgacaccagttgacgaggagcatctctactctacagcgcaaatcggcagatgcttggtcaatatccggcggcggcatatgtcaactctccccttatgcgatggaactgccaactcgccgtgctggtcggagtgctctggatcgaggcttgctgctgcgcgccgtgttgggagggaagctgccgtctcctgccgctgggagaagccggggaccctctgtttgctgagggcaaaatctccttccttgcgcaggcactcgaggtttgtttgcgtaactgaaactgttagcagcatcatgtggatgtaatgtactgatccatcagtgtgtttgatgcatgtttcatgggaggggagtcctagcaatcggtctcattcattcatcatccgctggtgaaaagctatgtggttcatatacaccataccgcccaactgagtttcaaagtccagcggtatttcttatagtctagagaatgcatataagcatggtgttttctgatcaggaaccaaatcgagaaggtgcaatgggctatcagaaccatgtccgacgacagcggtgaccaatcaggcaacagcactcgcctcttcagcgcgatccgttcattctggaaccagttgtctgccaagctgaagaaagcaaggagagggttgccagtgaagatcctattctttctgatcgggttctactgcgctaccgcgttcgctaccgtcatcgggcaaacgggtgactgggacatattgtcggccggacttgctgttgccatcgtggaggttatcggtgcgctgatgtatagggcctcctttgcattcctcggtaggatcgggaacatgattaccgtgtttaattactggaaagctgggcttacacttgggctgttcttggactctttcaagtatgaagtggatgaatttcttgaatcgtgtaacccattcaactttcagattaatatatttactgggttttgttggtgaattctcgtccaggtcctgttactatttctaccaatgggaaatgttggtgtacccaacatgtagcattcctatcatgtctgcttttttgtttccttccatgtgatctttgagttctctaccactgatttttaaaaagaagaaaaaaaagg

SEQ ID NO: 52037 - DNA, 1006 bp, Zea Mays
attgatcccacggcctaggatggtgactgaaacaatgcatccttttccgaaagtatacaatatgcatataaaaaacatgttgctattttcacacctcagacacataccaacatcactaatgtaagggttatgtcaaaacgtactcttcaataatttatatttattttaaatactagacaacatggattaaggatagcaggaaagatattaaggatcttccttaatgcgccaactttgactagccatataatatacattttttttgtaattgtccatactcttaatatgtgtggaagttagcatcatagcgctatgcactaacactaacagctaaaggtagaagaaatttccattacaaagctaaaggtaggcccccggcccatcaaaactgacctaataaaatatattttagccagcagaaggaaccaacaaattcagtgggcaatcctaaatgttaatctcagtgcctttcaaataattgtaatgtggattgtggaaccaacacatatacagactaaagctaagtgcactgccaacagtgctataactactgtcctttgaaatgatttaccaacataccatgtgtgctgatgggaaatgatgttgccagaaaggaaatagattgattactgtcatagaacagagtcttttggctgatactcacatttgcttttcaagaatagttcatgccataccagtaccagattgaaaaatgatataggaaatgtatgtgagatagtagaaagttaactgatttgaataaggtgtcccccatgtccaagttgaggtcacttttgtttttcctatgggcgagatcttttctagttttctcttcttggcatgtgtggatgcttgtatttaggtctttgcccctccttttcgccgtgaaccaacgatgacacttctgaattgactgcctcatttttgataaaagaccactgcataaaactaaaaagtcagtgacctttatacttctatagcaaagcagctaaaatcgtagcttggc

SEQ ID NO: 52038 - DNA, 992 bp, Zea Mays
atctgcatcacctcacctcacctgccttctttctggtctggtttaagagcccaggctttccaaggcacacacataaatatatgcatgcttggggaatggggagggagggaaggtcactagtggaccgactgaccgtggtactggccgtggtactgcccagtgctgtggcatctctgctgctggtagtgcttgcttgacgcgggctcatctcactgcctgtcttttccatgagaaagaagccatcagactattatatggatggaatgcactttctaagagtggcaacaaagcttttcaggtatgtccccaaggatatgtttcttaggtaccagagaagaaaaaaaagatatatatgttttccaattctatttctcctacagtgatttactgaataataacgagttcagaatgaatctgtggaccaaaaaaatgtgagccgtctcaatcattgatcagtttttaacacaggtaggcataacagcacaaaacacactgcataaggggggcagaacagaatcatctagtgtgcatcatcatttacccttttgaaaagtatattatgcttttcgaaagataaaggctatcagcttgagactatccttgacgcaatccgcacaagtgtacggatggctcatatgcaagcaaagctatcaagaaaatgtgtctgtctgctgatcttagaaaccaaacgtgcctgctagctattacctgctgcttactaagcctacaagctatgcctgttggagaaattaggttcatagaatcacttacacatcagccggctagtaagctgcttcaaatggggcctaccaccactaacaatagtgatccacactggcccacctacaaggctacaacagagctatttgagagggactccacaggatgttaggtaagtgtccttccaggtaactacagaatccatatgattcgtatcactcaatacaaaacaatcaatgaaaagttttattctatggttatgactgccatgt

SEQ ID NO: 52039 - DNA, 3114 bp, Zea Mays
atggaagtcgctggacgggggatagggttgtggaagccgccggctagggggagaggcggaggaggccgccgtcgttggggtctggaggaggccgccgtcggtggaggtatggaggaggccgccgtcggtctggagaacgaagaccgtggttctatcctctgcttttgcaagtgtctatgtgtaaaccctatctgctcatcgttggctgcggcaacaggggtacaccgcaaggcagggaggagaaacacacacgcaaagactcgcgggagatcggatacccaggaccaggagaagacgcgcggcccgctccgcttcgctgccccacacccccacctgcccctgctcctcgaaccgtccgccgttgcgttcgacatgggcgacccgccggcgctcaagaggcccaaactcgagaagggcgacaatgactccacctactgcccccgctccgcttccaatggcgcgggcgccaacggcccaccgccgcgtgacgacgtggaggaggatgacatctcggaggaggcggtcatcgccctcatcgcgcaccgcgagcgcgacgtcgagcgctgcaagctcaagctgctccactaccagtccctgctggacgccgcggagatgaagctggaagaggcacactcgcggctcgccaggttccgagatcgcaagccgccgccaacccggtcggagcccaagctaccgacgccgccgatccagagggaacccaagccatccccgccgccaatccggagggatctcaagccatcgccgcagccaccagagaagaaggctccatcgcccgcgccgcagccgtcggcgagcccgcagcttgtcatcccagggaccaacaaccgaccggccccgcgccctcagcccatgcctggcttgaagaaagccgctgccccgtcatcgtcttcatcacgggcgccgctggaacggtcaaggaaagaggagaagccgcccaagagaaagattggtactttctacagattcccccctccctcggagtagttctggccgtgaaggaacatcggaacttgattccgagtgtcaggaaatcatctgcgactgtgcttaaatttcaaggtggcaatttggtctcgagccaacacaggaggaagcttaggtgtctcgagctatgccctgctaatgatcagctcgttgttaccagtgcgctggatggattagttactttatggcaagtggagactagaggaccttctctctcatttcgtggcaaaacagatttcttttccccaaagcatagatggcctgaagatatagcttggcatccagctggtgagacaatttttgctgtatacactgctgataatggcgattctcaggtttcaatgacaaaccttatatcaggacaacggaaagttactttcctgccagagaagcctcacacaaagggaatcataaataacataagtttcatgccttggtctgatgcatgctttgtaactggaggaagtgaccatgctgttatactttgggaagacaaagatgattcatggaaaccgaagagagtgcataaggatttccattctgctgctgtcatgggtgttgctggattgcaacagaaaagaacaattttgtcagttggctgtgacaagaggataataggatttgatctctctgctggaaggacagagttcaagaacctacttgatagcaaatgcatgagcgtattagcaaatccatgcgatttcaacctatacatggtgcagacaggggatccaggcagacagctgcgcttgtttgatgtgaggctcaggcaaaccgaggttcacgcgtttggttggaagcaagagagcagcgagtctcagtcagctctgatcaaccaatcatggtctccagatggctggtacgtgtcatctggttcagcagatcctgtgatccacatcttcgatatcaggcaccatggccagaatccttgccagtctgttgaggcacaccagaagcgagtgttcaaagctgtctggcaccaaacgctgccatatctgacctccatatcatcggacctcaacattgggatccacaaatattcatgaaagcgacatcacgtttttggtgctcagcaatcccatgaaaacctgtggacatttgtttgctcaaagcagaacttggcatcaattgaagaaaacagcaaaatcggtgtgctttgagcttgtttcactggccctgcttcgacattgaccttcggtgcagaagaaccatgctgcgagagagctccacagttggatgtcttgctccagttgatggaaacattcccacctgcttttttgagctgctgctgcagttcattcaccagaacactctttggctcaatgagctgcttcggttacttttgggaaaaaaagagtcagctatacacattatgtccaatattttcggcaacgtattccctcgtctgttactgctttttttttttttttttttgcccttgttgggaaagtgcacggatgtactagataaaccgttccagatggctgcagggacaagaacattgcggatctacactaaacatgatctagtctaactgcacgattgctaatggtaatattgttctaagacaggagatcactctacgccttcttgggggacttagcggccttcttgggctccttggccgccttctcggccaccttcttggggaggagcacagtgtggatgttggggaggacgccgccgtgggcgatggtgacgccggccagcagcttgccgagctcctcgtcgttgcggatggcgaggagcacgtggcgcgggatgatgcgcgtcttcttgttgtcccttgccgcgttgccggcgagctcgagcacctcggccgcgaggtactccaggacggcggcgaggtagacgggggcacccgtgcctacacgctgcgcgtaccggccctttttgaggtaccgcccgacgcggctgacggggaactgcagcccggccctggaggaccgcgacaccgacttcttcgtcggcccgccggccttgcgccccgccgcgcccttcttcgccttaccgcctgctccgctcacgtccatggctgctactgcggcgcttccagatcgagaaaaaaaaagggaccttgggagttgagagtcgaaatgtatgagtgcc

SEQ ID NO: 52040 - DNA, 3073 bp, Zea Mays
atggaagtcgctggacgggggatagggttgtggaagccgccggctagggggagaggcggaggaggccgccgtcgttggggtctggaggaggccgccgtcggtggaggtatggaggaggccgccgtcggtctggagaacgaagaccgtggttctatcctctgcttttgcaagtgtctatgtgtaaaccctatctgctcatcgttggctgcggcaacaggggtacaccgcaaggcagggaggagaaacacacacgcaaagactcgcgggagatcggatacccaggaccaggagaagacgcgcggcccgctccgcttcgctgccccacacccccacctgcccctgctcctcgaaccgtccgccgttgcgttcgacatgggcgacccgccggcgctcaagaggcccaaactcgagaagggcgacaatgactccacctactgcccccgctccgcttccaatggcgcgggcgccaacggcccaccgccgcgtgacgacgtggaggaggatgacatctcggaggaggcggtcatcgccctcatcgcgcaccgcgagcgcgacgtcgagcgctgcaagctcaagctgctccactaccagtccctgctggacgccgcggagatgaagctggaagaggcacactcgcggctcgccaggttccgagatcgcaagccgccgccaacccggtcggagcccaagctaccgacgccgccgatccagagggaacccaagccatccccgccgccaatccggagggatctcaagccatcgccgcagccaccagagaagaaggctccatcgcccgcgccgcagccgtcggcgagcccgcagcttgtcatcccagggaccaacaaccgaccggccccgcgccctcagcccatgcctggcttgaagaaagccgctgccccgtcatcgtcttcatcacgggcgccgctggaacggtcaaggaaagaggagaagccgcccaagagaaagattgaacagaaggaacatcggaacttgattccgagtgtcaggaaatcatctgcgactgtgcttaaatttcaaggtggcaatttggtctcgagccaacacaggaggaagcttaggtgtctcgagctatgccctgctaatgatcagctcgttgttaccagtgcgctggatggattagttactttatggcaagtggagactagaggaccttctctctcatttcgtggcaaaacagatttcttttccccaaagcatagatggcctgaagatatagcttggcatccagctggtgagacaatttttgctgtatacactgctgataatggcgattctcaggtttcaatgacaaaccttatatcaggacaacggaaagttactttcctgccagagaagcctcacacaaagggaatcataaataacataagtttcatgccttggtctgatgcatgctttgtaactggaggaagtgaccatgctgttatactttgggaagacaaagatgattcatggaaaccgaagagagtgcataaggatttccattctgctgctgtcatgggtgttgctggattgcaacagaaaagaacaattttgtcagttggctgtgacaagaggataataggatttgatctctctgctggaaggacagagttcaagaacctacttgatagcaaatgcatgagcgtattagcaaatccatgcgatttcaacctatacatggtgcagacaggggatccaggcagacagctgcgcttgtttgatgtgaggctcaggcaaaccgaggttcacgcgtttggttggaagcaagagagcagcgagtctcagtcagctctgatcaaccaatcatggtctccagatggctggtacgtgtcatctggttcagcagatcctgtgatccacatcttcgatatcaggcaccatggccagaatccttgccagtctgttgaggcacaccagaagcgagtgttcaaagctgtctggcaccaaacgctgccatatctgacctccatatcatcggacctcaacattgggatccacaaatattcatgaaagcgacatcacgtttttggtgctcagcaatcccatgaaaacctgtggacatttgtttgctcaaagcagaacttggcatcaattgaagaaaacagcaaaatcggtgtgctttgagcttgtttcactggccctgcttcgacattgaccttcggtgcagaagaaccatgctgcgagagagctccacagttggatgtcttgctccagttgatggaaacattcccacctgcttttttgagctgctgctgcagttcattcaccagaacactctttggctcaatgagctgcttcggttacttttgggaaaaaaagagtcagctatacacattatgtccaatattttcggcaacgtattccctcgtctgttactgctttttttttttttttttttgcccttgttgggaaagtgcacggatgtactagataaaccgttccagatggctgcagggacaagaacattgcggatctacactaaacatgatctagtctaactgcacgattgctaatggtaatattgttctaagacaggagatcactctacgccttcttgggggacttagcggccttcttgggctccttggccgccttctcggccaccttcttggggaggagcacagtgtggatgttggggaggacgccgccgtgggcgatggtgacgccggccagcagcttgccgagctcctcgtcgttgcggatggcgaggagcacgtggcgcgggatgatgcgcgtcttcttgttgtcccttgccgcgttgccggcgagctcgagcacctcggccgcgaggtactccaggacggcggcgaggtagacgggggcacccgtgcctacacgctgcgcgtaccggccctttttgaggtaccgcccgacgcggctgacggggaactgcagcccggccctggaggaccgcgacaccgacttcttcgtcggcccgccggccttgcgccccgccgcgcccttcttcgccttaccgcctgctccgctcacgtccatggctgctactgcggcgcttccagatcgagaaaaaaaaagggaccttgggagttgagagtcgaaatgtatgagtgcc

SEQ ID NO: 52041 - DNA, 1710 bp, Zea Mays
atggaagtcgctggacgggggatagggttgtggaagccgccggctagggggagaggcggaggaggccgccgtcgttggggtctggaggaggccgccgtcggtggaggtatggaggaggccgccgtcggtctggagaacgaagaccgtggttctatcctctgcttttgcaagtgtctatgtgtaaaccctatctgctcatcgttggctgcggcaacaggggtacaccgcaaggcagggaggagaaacacacacgcaaagactcgcgggagatcggatacccaggaccaggagaagacgcgcggcccgctccgcttcgctgccccacacccccacctgcccctgctcctcgaaccgtccgccgttgcgttcgacatgggcgacccgccggcgctcaagaggcccaaactcgagaagggcgacaatgactccacctactgcccccgctccgcttccaatggcgcgggcgccaacggcccaccgccgcgtgacgacgtggaggaggatgacatctcggaggaggcggtcatcgccctcatcgcgcaccgcgagcgcgacgtcgagcgctgcaagctcaagctgctccactaccagtccctgctggacgccgcggagatgaagctggaagaggcacactcgcggctcgccaggttccgagatcgcaagccgccgccaacccggtcggagcccaagctaccgacgccgccgatccagagggaacccaagccatccccgccgccaatccggagggatctcaagccatcgccgcagccaccagagaagaaggctccatcgcccgcgccgcagccgtcggcgagcccgcagcttgtcatcccagggaccaacaaccgaccggccccgcgccctcagcccatgcctggcttgaagaaagccgctgccccgtcatcgtcttcatcacgggcgccgctggaacggtcaaggaaagaggagaagccgcccaagagaaagattgaacagaaggaacatcggaacttgattccgagtgtcaggaaatcatctgcgactgtgcttaaatttcaaggtggcaatttggtctcgagccaacacaggaggaagcttaggtgtctcgagctatgccctgctaatgatcagctcgttgttaccagtgcgctggatggattagttactttatggcaagtggagactagaggttttgcgattcccttgttttcgacctgcaacgagtcagcaagccaaggaaggggggagggcggtccgctcgaggcctcccgctgctgctcctgttgctgtacccgttcctgcccgaggagagccggtggcgcacaagctatagtggaggacctgccatcgataggcgacttgaagcggatgtgggtgcgggtcaagaagctgtgtggcggcatcacgagcaaggcaccggtgggcattgcgttggtgttgggcccggtgccactggctgtgaagctggtgcatgatgaccagttgcacctgccgcagctgcagattgagttctgcactgctgctgctgaatctgatgcattcacacagttggtggacaaagcaccagccgagtatgtgtggctcatggcgaagctggtgcagtcactacaggtggtgcagagcagcacgtcctggagcgagagcaaggaggacttcacactttctttaagcgtgtgggcgtggtgagtgaggcagcggcgagcgagcgctttcaggcggtccgccaccccc

SEQ ID NO: 52042 - DNA, 1751 bp, Zea Mays
atggaagtcgctggacgggggatagggttgtggaagccgccggctagggggagaggcggaggaggccgccgtcgttggggtctggaggaggccgccgtcggtggaggtatggaggaggccgccgtcggtctggagaacgaagaccgtggttctatcctctgcttttgcaagtgtctatgtgtaaaccctatctgctcatcgttggctgcggcaacaggggtacaccgcaaggcagggaggagaaacacacacgcaaagactcgcgggagatcggatacccaggaccaggagaagacgcgcggcccgctccgcttcgctgccccacacccccacctgcccctgctcctcgaaccgtccgccgttgcgttcgacatgggcgacccgccggcgctcaagaggcccaaactcgagaagggcgacaatgactccacctactgcccccgctccgcttccaatggcgcgggcgccaacggcccaccgccgcgtgacgacgtggaggaggatgacatctcggaggaggcggtcatcgccctcatcgcgcaccgcgagcgcgacgtcgagcgctgcaagctcaagctgctccactaccagtccctgctggacgccgcggagatgaagctggaagaggcacactcgcggctcgccaggttccgagatcgcaagccgccgccaacccggtcggagcccaagctaccgacgccgccgatccagagggaacccaagccatccccgccgccaatccggagggatctcaagccatcgccgcagccaccagagaagaaggctccatcgcccgcgccgcagccgtcggcgagcccgcagcttgtcatcccagggaccaacaaccgaccggccccgcgccctcagcccatgcctggcttgaagaaagccgctgccccgtcatcgtcttcatcacgggcgccgctggaacggtcaaggaaagaggagaagccgcccaagagaaagattggtactttctacagattcccccctccctcggagtagttctggccgtgaaggaacatcggaacttgattccgagtgtcaggaaatcatctgcgactgtgcttaaatttcaaggtggcaatttggtctcgagccaacacaggaggaagcttaggtgtctcgagctatgccctgctaatgatcagctcgttgttaccagtgcgctggatggattagttactttatggcaagtggagactagaggttttgcgattcccttgttttcgacctgcaacgagtcagcaagccaaggaaggggggagggcggtccgctcgaggcctcccgctgctgctcctgttgctgtacccgttcctgcccgaggagagccggtggcgcacaagctatagtggaggacctgccatcgataggcgacttgaagcggatgtgggtgcgggtcaagaagctgtgtggcggcatcacgagcaaggcaccggtgggcattgcgttggtgttgggcccggtgccactggctgtgaagctggtgcatgatgaccagttgcacctgccgcagctgcagattgagttctgcactgctgctgctgaatctgatgcattcacacagttggtggacaaagcaccagccgagtatgtgtggctcatggcgaagctggtgcagtcactacaggtggtgcagagcagcacgtcctggagcgagagcaaggaggacttcacactttctttaagcgtgtgggcgtggtgagtgaggcagcggcgagcgagcgctttcaggcggtccgccaccccc

SEQ ID NO: 52043 - DNA, 1284 bp, Zea Mays
atggaagtcgctggacgggggatagggttgtggaagccgccggctagggggagaggcggaggaggccgccgtcgttggggtctggaggaggccgccgtcggtggaggtatggaggaggccgccgtcggtctggagaacgaagaccgtggttctatcctctgcttttgcaagtgtctatgtgtaaaccctatctgctcatcgttggctgcggcaacaggggtacaccgcaaggcagggaggagaaacacacacgcaaagactcgcgggagatcggatacccaggaccaggagaagacgcgcggcccgctccgcttcgctgccccacacccccacctgcccctgctcctcgaaccgtccgccgttgcgttcgacatgggcgacccgccggcgctcaagaggcccaaactcgagaagggcgacaatgactccacctactgcccccgctccgcttccaatggcgcgggcgccaacggcccaccgccgcgtgacgacgtggaggaggatgacatctcggaggaggcggtcatcgccctcatcgcgcaccgcgagcgcgacgtcgagcgctgcaagctcaagctgctccactaccagtccctggtacgctctcgtccgctcctcgcatcccctttccgacttggcgttgatgatagagttgcgatcttggttgggcttccgatggtcgccgcagctggacgccgcggagatgaagctggaagaggcacactcgcggctcgccaggttccgagatcgcaagccgccgccaacccggtcggagcccaagctaccgacgccgccgatccagagggaacccaagccatccccgccgccaatccggagggatctcaagccatcgccgcagccaccagagaagaaggctccatcgcccgcgccgcagccgtcggcgagcccgcagcttgtcatcccagggaccaacaaccgaccggccccgcgccctcagcccatgcctggcttgaagaaagccgctgccccgtcatcgtcttcatcacgggcgccgctggaacggtcaaggaaagaggagaagccgcccaagagaaagattgaacagaaggaacatcggaacttgattccgagtgtcaggaaatcatctgcgactgtgcttaaatttcaaggtggcaatttggtctcgagccaacacaggaggaagcttaggtgtctcgagctatgccctgctaatgatcagctcgttgttaccagtgcgctggatggattagttactttatggcaagtggagactagaggatttatgccaacaggagccttagg

SEQ ID NO: 52044 - DNA, 542 bp, Zea Mays
ccgtcgtgctctccccagtcccctccgcctccggtctccataacctagccgtccctctcctcggtgcagcggtgcccggacgctggagcgacctcaagtgctcgacaggcgtcacgggacacgacgctcaccgctcgctgtcgctgaggcatacaagagtggagaactgcaggaaactctagagaaagcaatgtgttcgtagaaaaaaaatgaacaataagcagatggcatacaattaatcaaaatgttatagtatttgctgtacaattcaggcttgtcatcaactggagatgcaagttgtggataattcatgtccaaatgttcagtgcactttcgactggaaatacatctttctgcagtttgtgactagtcatccagtttgaaccccgatcatatattgtacgatttgtgactaccagattgctccgttttcagctgcaactaccgcgtccgcccgcgtgcaattccatgaccgtgtcggtagagccgtgggcctgtttggttcaggttttttctgaccagcttttctgagaatttggctg

SEQ ID NO: 52045 - DNA, 804 bp, Zea Mays
ctttcctccgtcgtgctctccccagtcccctccgcctccggtctccataacctagccgtccctctcctcggtgcagcggtgcccggacgctggagcgacctcaagtgctcgacaggcgtcacgggacacgacgctcaccgctcgctgtcgctggtggactacggacgactggaactggattgctgtggagaactggattgctgactgctgtggagaatttggactttgaagcctgaagtctaaaccatctgtgaagttcgaactatattttcttgtgaatttgtgatgcaatgcaatggcacttggcggctgtcactgacaggcagcaccgaagcaggcttaatgccttgcagccttgcacttttgtatcatgttgtcatcgagtactcagtacattagtattagtagaggcatacaagagtggagaactgcaggaaactctagagaaagcaatgtgttcgtagaaaaaaaatgaacaataagcagatggcatacaattaatcaaaatgttatagtatttgctgtacaattcaggcttgtcatcaactggagatgcaagttgtggataattcatgtccaaatgttcagtgcactttcgactggaaatacatctttctgcagtttgtgactagtcatccagtttgaaccccgatcatatattgtacgatttgtgactaccagattgctccgttttcagctgcaactaccgcgtccgcccgcgtgcaattccatgaccgtgtcggtagagccgtgggcctgtttggttcaggttttttctgaccagcttttctgagaatttggctg

SEQ ID NO: 52046 - DNA, 646 bp, Zea Mays
ctttcctccgtcgtgctctccccagtcccctccgcctccggtctccataacctagccgtccctctcctcggtgcagcggtgcccggacgctggagcgacctcaagtgctcgacaggcgtcacgggacacgacgctcaccgctcgctgtcgctggtggactacggacgactggaactggattgctgtggagaactggattgctgactgctgtggagaatttggactttgaagcctgaagtctaaaccatctaggcatacaagagtggagaactgcaggaaactctagagaaagcaatgtgttcgtagaaaaaaaatgaacaataagcagatggcatacaattaatcaaaatgttatagtatttgctgtacaattcaggcttgtcatcaactggagatgcaagttgtggataattcatgtccaaatgttcagtgcactttcgactggaaatacatctttctgcagtttgtgactagtcatccagtttgaaccccgatcatatattgtacgatttgtgactaccagattgctccgttttcagctgcaactaccgcgtccgcccgcgtgcaattccatgaccgtgtcggtagagccgtgggcctgtttggttcaggttttttctgaccagcttttctgagaatttggctg

SEQ ID NO: 52047 - DNA, 429 bp, Zea Mays
gaacatctaacaaatgaactgatgtcagagatgaggcatacaagagtggagaactgcaggaaactctagagaaagcaatgtgttcgtagaaaaaaaatgaacaataagcagatggcatacaattaatcaaaatgttatagtatttgctgtacaattcaggcttgtcatcaactggagatgcaagttgtggataattcatgtccaaatgttcagtgcactttcgactggaaatacatctttctgcagtttgtgactagtcatccagtttgaaccccgatcatatattgtacgatttgtgactaccagattgctccgttttcagctgcaactaccgcgtccgcccgcgtgcaattccatgaccgtgtcggtagagccgtgggcctgtttggttcaggttttttctgaccagcttttctgagaatttggctg

SEQ ID NO: 52048 - DNA, 744 bp, Zea Mays
gagcgagcagtgaccactgcgccacattcagaccacaccacccaccgcaatcaggagcggagccaaggaaggagggggcagcgggcggcgacgaagcagcggcaatccgacggcgtaatggcggcggggagggggtgaggcggcgccctgagccgtaaaggagccggctttcgtagctcttcctgggagtgaccttctccgacgaaacgaaatggcccctgagagaggatctgccgtgcccaagtttggagaatgggacgagaaagatccctccacaggtgaaggcttcaccgacatatttaacaaggtgagggaggagaagcagtccggcgatgctcctgtcatcaccagcggcaacgcaggtggtggttatagccgctccaaccaaggccgcaaatacgaatcttcagcttgctcatgcttcagttggttcaggaactgatgcttccttgcatggttgctgatgcttctgctggttcagcagctgataggtgccgttgaagatttggatgaaccagtgccgatcgtatcattttcacatgagctgtagtcccatcgtgttctccctgttgtgatgctgtgtggtagcaggacgtgccagaacttgactttgagaagctgaggttcagtagtttgagctgtttttgcaacatgcggtttgtttctccatagaatagaatccttaaatcaacatcctccctcacaagaatcctgaaatcgctgggatttttattttattttatt

SEQ ID NO: 52049 - DNA, 945 bp, Zea Mays
catgctgcaagcaggcaacaatggacaagccctgaacttctgctgaatccggtactgatatgccgcaacgaagcagaaaaatgcttgatagagacttcaatcaactccatacgaataagcatgaaggttaagcaggcagatgaattggagaacattcttgccaagaagttccttaggtttttgtcaatgagggcagaggcattccaagtgttgaggagaaaaccggttcaggtttccaacttaacgttgattaccttgagcagtgttttatgtactaaacatgaactacctgtaaggcacagggatacatcattgtggacagctggatgatggaccatatttttgctaacatttgttgtactagttttctctctctcccctcttatcttgccgtattcccacatagagctcagctttaccaagttatcaacataactgcttatcccttcagaaatctaaattgttcacgactgaactggtggcaaattatgccttatgtttcagggctatgatatcagtttcctgataacaaactaccattgtgaggacatgcataagcacaagctcatagatttcatcgtgcaatttatggaggatattgacaaggagatcagcgagctgaagctgtcagtaaacactcgtggccggctagtggccactgaattcttgaagcagttcttatgactcggccatggccgtagtcagtgttgattatcatggcctgcaactaagctgccgttctgcaacagctttaagtttttttttatacgacagctcttgtaaatgccttgccaaagatgcattcgtggccctgggccacctgattaacagctgacaattgcagtatcaggacgcacatagcgctctgagattgttcatgtgatcaattcctgtgttttttaattattctttcatttgcaaggccttcattgtttttcaccgact

SEQ ID NO: 52050 - DNA, 2641 bp, Zea Mays
cccaggcccaagcaagccttttcttctcccgttcacctcctctctctctccccccactctcggcgaccgactgggctaccgccgccgccgacgccgccatccgccagtcgtcaggtgcccaggtcttcacccccgggcaccagcgcgcaatatcagtctcgccagccggttgtccaagttgaaagaggatggggcaggagacggaggtggtgcagtcggtaagcgacctcccggtgcaggaccctccaggagaggagttctccgccgccgacctcgcctgggtcaagtacgccacctccgagcaccaccgggacgacgtcgccctcataccctacgaccggatggaggccttcatcgccggcgagagcaacaaccccgagtgccccacgcgcttccacatcgagcgcggccgcaagcgtgagaggggcagcctcagggagtaccggagtgacgagtacctcctctacaggatgtattggtgctcctttggccctgagaattatggggagggagggacaatcttgcctagcagaaagtacaggctcaacacgaggaaccgtgctgcacgcccgcagtcgatgcgtggctgcacctgccatttcaccatcaagaggctctatgctcgcccttccctgctgctcatcatctaccacgagaggcgccatgtcaacaagtccggcttcatatgccatgggcccctcgacagggatgccatcgggcctggcgctaggaaaatgccctacattgggagtgaaatccagcagcagaccatgtcattgatctacctcggtgttccagaagagaacatactgcagacacatatcgaaggcatacagcgctactgtagcaaggatgccaaggttgataaccttgcctctcagtatgtccagaaacttgggatgatcatcaagagatcgacacatgagttggatctggatgaccaagctagcatcaggatgtgggttgacagaaataggaagtctgtattcttctaccaggattcaactgaggcagatgcctttattttggggattcagacacaatggcaattgcagcaaatgatgcgctttggccatcagagtcttttggcttctcattcctcatttggtgtaagcaagctaaagtatcccttgcacacgctccttgcattcgactcaaggcagcacgctcttccagttgcatgggtcataacccgctcagttactaagaaggacacattgaaatggatgagcacacttactgatcgaatacattctatagattccacatggggaattggtggttttatcattgatgacccggcttcagagctgggtccaatcagggaggtgttcgcctgcccagttctgttctccatgtggcacatcagaagaacctggcttaaaaatgtaatcaagaaatgcagcaatgttgaggtgcagcgggaaatttttatcctacttggcaaaaccatatgcaatatatggagtgagaaaaaccctatggatgccctagggcaattgtttcaagactttgttgatcaaacagcattcataaaatatttcaagtcattttgggttcccaaattggagatgtggatcgactccatccgaaatctgccattagcaagtcaggagtcatgcggtgccattgaaggttaccatctgaagctgaaggtaaaagcatatgatgacgtgcagctggatgctcttcaacgtgtggactggctagtgcataagctcacaacagagctgcattcgagctactggatcaacctatttgcagacgaaagcgggtcatttcccgaggtgaaagcagactatatcgcatccacgtcatggcaaagggcactccagatacctgacgatgctgttaccttcgacgacaaggatcctcttgtagctagagtggtcagccagaaggaaaccagccagacacggactgtgtggagccctggttctgaattctctctttgcaattgctcgtggtcgatgcagggtaacctatgcaagcacgtgctaaaggtcaacatggtctgcggagcacgcaaagactttcagccctcgctgtcgttccagtcgttccagcatgtcctgcttgatctgtggcagaaaccattggacgattcgttctcgcttgacctctcggtagcgcgggtcatgcagatgcaggagaagatcaaacatgtggctgagctcgccacctccagtggtatcgcccaagttgcagggaagttgccgatgcaatggacaaaaaagagagggagaagagtaggcgtcaagcccacaagcgcgctgctgcttcctcgttctaagggcagtttgcagaaggacttgaccccgaagaacagcaggaagaggaagaggctatctagatttaaagggtaaaatgcgccgccttttcttgtggcgtctctgtaattagagtattagacgactactttttttgtttttgtttattttttgcctgctgtattccatttcctcaattacctcggggctgactgagaacttgctcagcgacttccacttcccttatgtctcctagttttaggaacaaatacaatagctgtgcaggctgtaatgcgaagcgactggatgggtggatgttttgatagttgcattgaatacctacatcatacatcatacttgatgagaagtcc

SEQ ID NO: 52051 - DNA, 2663 bp, Zea Mays
cccaggcccaagcaagccttttcttctcccgttcacctcctctctctctccccccactctcggcgaccgactgggctaccgccgccgccgacgccgccatccgccagtcgtcaggtgcccaggtcttcacccccgggcaccagcgcgcaatatcagtctcgccagccggttgtccaagttgaaagaggatggggcaggagacggaggtggtgcagtcggtaagcgacctcccggtgcaggaccctccaggagaggagttctccgccgccgacctcgcctgggtcaagtacgccacctccgagcaccaccgggacgacgtcgccctcataccctacgaccggatggaggccttcatcgccggcgagagcaacaaccccgagtgccccacgcgcttccacatcgagcgcggccgcaagcgtgagaggggcagcctcagggagtaccggagtgacgagtacctcctctacaggatgtattggtgctcctttggccctgagaattatggggagggagggacaatcttgcctagcagaaagtacaggctcaacacgaggaaccgtgctgcacgcccgcagtcgatgcgtggctgcacctgccatttcaccatcaagaggctctatgctcgcccttccctgctgctcatcatctaccacgagaggcgccatgtcaacaagtccggcttcatatgccatgggcccctcgacagggatgccatcgggcctggcgctaggaaaatgccctacattgggagtgaaatccagcagcagaccatgtcattgatctacctcggtgttccagaagagaacatactgcagacacatatcgaaggcatacagcgctactgtagcaaggatgccaaggttgataaccttgcctctcagtatgtccagaaacttgggatgatcatcaagagatcgacacatgagttggatctggatgaccaagctagcatcaggatgtgggttgacagaaataggaagtctgtattcttctaccaggattcaactgaggcagatgcctttattttggggattcagacacaatggcaattgcagcaaatgatgcgctttggccatcagagtcttttggcttctcattcctcatttggtgtaagcaagctaaagtatcccttgcacacgctccttgcattcgactcaaggcagcacgctcttccagttgcatgggtcataacccgctcagttactaagaaggacacattgaaatggatgagcacacttactgatcgaatacattctatagattccacatggggaattggtggttttatcattgatgacccggcttcagagctgggtccaatcagtagcttgttgcccttgttccagggaggtgttcgcctgcccagttctgttctccatgtggcacatcagaagaacctggcttaaaaatgtaatcaagaaatgcagcaatgttgaggtgcagcgggaaatttttatcctacttggcaaaaccatatgcaatatatggagtgagaaaaaccctatggatgccctagggcaattgtttcaagactttgttgatcaaacagcattcataaaatatttcaagtcattttgggttcccaaattggagatgtggatcgactccatccgaaatctgccattagcaagtcaggagtcatgcggtgccattgaaggttaccatctgaagctgaaggtaaaagcatatgatgacgtgcagctggatgctcttcaacgtgtggactggctagtgcataagctcacaacagagctgcattcgagctactggatcaacctatttgcagacgaaagcgggtcatttcccgaggtgaaagcagactatatcgcatccacgtcatggcaaagggcactccagatacctgacgatgctgttaccttcgacgacaaggatcctcttgtagctagagtggtcagccagaaggaaaccagccagacacggactgtgtggagccctggttctgaattctctctttgcaattgctcgtggtcgatgcagggtaacctatgcaagcacgtgctaaaggtcaacatggtctgcggagcacgcaaagactttcagccctcgctgtcgttccagtcgttccagcatgtcctgcttgatctgtggcagaaaccattggacgattcgttctcgcttgacctctcggtagcgcgggtcatgcagatgcaggagaagatcaaacatgtggctgagctcgccacctccagtggtatcgcccaagttgcagggaagttgccgatgcaatggacaaaaaagagagggagaagagtaggcgtcaagcccacaagcgcgctgctgcttcctcgttctaagggcagtttgcagaaggacttgaccccgaagaacagcaggaagaggaagaggctatctagatttaaagggtaaaatgcgccgccttttcttgtggcgtctctgtaattagagtattagacgactactttttttgtttttgtttattttttgcctgctgtattccatttcctcaattacctcggggctgactgagaacttgctcagcgacttccacttcccttatgtctcctagttttaggaacaaatacaatagctgtgcaggctgtaatgcgaagcgactggatgggtggatgttttgatagttgcattgaatacctacatcatacatcatacttgatgagaagtcc

SEQ ID NO: 52052 - DNA, 2505 bp, Zea Mays
cccaggcccaagcaagccttttcttctcccgttcacctcctctctctctccccccactctcggcgaccgactgggctaccgccgccgccgacgccgccatccgccagtcgtcaggtgcccaggtcttcacccccgggcaccagcgcgcaatatcagtctcgccagccggttgtccaagttgaaagaggatggggcaggagacggaggtggtgcagtcggtaagcgacctcccggtgcaggaccctccaggagaggagttctccgccgccgacctcgcctgggtcaagtacgccacctccgagcaccaccgggacgacgtcgccctcataccctacgaccggatggaggccttcatcgccggcgagagcaacaaccccgagtgccccacgcgcttccacatcgagcgcggccgcaagcgtgagaggggcagcctcagggagtaccggagtgacgagtacctcctctacaggatgtattggtgctcctttggccctgagaattatggggagggagggacaatcttgcctagcagaaagtacaggctcaacacgaggaaccgtgctgcacgcccgcagtcgatgcgtggctgcacctgccatttcaccatcaagaggctctatgctcgcccttccctgctgctcatcatctaccacgagaggcgccatgtcaacaagtccggcttcatatgccatgggcccctcgacagggatgccatcgggcctggcgctaggaaaatgccctacattgggagtgaaatccagcagcagaccatgtcattgatctacctcggtgttccagaagagaacatactgcagacacatatcgaaggcatacagcgctactgtagcaaggatgccaaggttgataaccttgcctctcagtatgtccagaaacttgggatgatcatcaagagatcgacacatgagttggatctggatgaccaagctagcatcaggatgtgggttgacagaaataggaagtctgtattcttctaccaggattcaactgaggcagatgcctttattttggggattcagacacaatggcaattgcagcaaatgatgcgctttggccatcagagtcttttggcttctcattcctcatttggtgtaagcaagctaaagattccacatggggaattggtggttttatcattgatgacccggcttcagagctgggtccaatcagggaggtgttcgcctgcccagttctgttctccatgtggcacatcagaagaacctggcttaaaaatgtaatcaagaaatgcagcaatgttgaggtgcagcgggaaatttttatcctacttggcaaaaccatatgcaatatatggagtgagaaaaaccctatggatgccctagggcaattgtttcaagactttgttgatcaaacagcattcataaaatatttcaagtcattttgggttcccaaattggagatgtggatcgactccatccgaaatctgccattagcaagtcaggagtcatgcggtgccattgaaggttaccatctgaagctgaaggtaaaagcatatgatgacgtgcagctggatgctcttcaacgtgtggactggctagtgcataagctcacaacagagctgcattcgagctactggatcaacctatttgcagacgaaagcgggtcatttcccgaggtgaaagcagactatatcgcatccacgtcatggcaaagggcactccagatacctgacgatgctgttaccttcgacgacaaggatcctcttgtagctagagtggtcagccagaaggaaaccagccagacacggactgtgtggagccctggttctgaattctctctttgcaattgctcgtggtcgatgcagggtaacctatgcaagcacgtgctaaaggtcaacatggtctgcggagcacgcaaagactttcagccctcgctgtcgttccagtcgttccagcatgtcctgcttgatctgtggcagaaaccattggacgattcgttctcgcttgacctctcggtagcgcgggtcatgcagatgcaggagaagatcaaacatgtggctgagctcgccacctccagtggtatcgcccaagttgcagggaagttgccgatgcaatggacaaaaaagagagggagaagagtaggcgtcaagcccacaagcgcgctgctgcttcctcgttctaagggcagtttgcagaaggacttgaccccgaagaacagcaggaagaggaagaggctatctagatttaaagggtaaaatgcgccgccttttcttgtggcgtctctgtaattagagtattagacgactactttttttgtttttgtttattttttgcctgctgtattccatttcctcaattacctcggggctgactgagaacttgctcagcgacttccacttcccttatgtctcctagttttaggaacaaatacaatagctgtgcaggctgtaatgcgaagcgactggatgggtggatgttttgatagttgcattgaatacctacatcatacatcatacttgatgagaagtcc

SEQ ID NO: 52053 - DNA, 2422 bp, Zea Mays
ctccggcctccatcctacccgccgtgctatataatccccacccggttgtcctctgtccggtttcctctcccgttcccctcttgccgcggcggtgtgccccaatcggccaatcctcctattctccccctcacctcctcaaccctactccgacaacagcgggcgctgggagcaaacgaaaactaaaacgagtgagatcgcggcgcccgattctgtcgcggtcgcgcgggtggccggattggattggatcctcggacccccgcgcgcgcgcggagggcaattcgggcacagatccccgcgattccgtcgccggaggcgggcatgagaggccggagggcatgcctgtggtggttcctggcgcaggacgagtgagccggtggcggcgggtggaggaggacctgttgctttgagcctgagaggtgcagtcgtcaaggaggaggaagaggcggcggcggcggcggcggcggcggcggcgggggtgggtaggtgatccgaggcccgaggcggccgtgccatgtctcgctgcttcccgtttccgccaccaggatatgccaagaccgcgcgccccgacggccagctagcctcgcacctgcagcagcagcagcagcttgacaaggagaaacaaaaggagaagaagcataagaaggacaagaaggacaaagttagaaaagaaggtaaagaaaagaaggacaaggacaggagtaaggataagcacaaagataagaaagaccgaaaagaaaaacacagagacaagaaaaaagacaagagcaaagataaaagcagggattcaggtgaaggaattgaaagaaatgacgaggctcaccatggtcagaaggttggagagagcagcaggagatccgaagaaattaaggatcttaaattcagggaggacttggtcagagacgtacaggatgagaaaggggcggcgagtcgacctagtgaaaattatggtgtttcaaatgatcgaaatcgcaaaggcttcagtgcttcacccgcgatggagactgaaaggtttgcgcttaataaagtgcatattcagtctagtaatgctccaaggaaaaatgagggactggtacaacagagcatcagtgccaatcgacaaaagaatgggacatcaatacggcattctgaaagcctcaccacttttgctcaaagaactgtgggtggctttccaccagcaccttcaacggaggaaaaattcaaagctgcaaggcctttatccaatactgaagctgcacccagaaaagaggggattggacagcgaatcagtaacattagcatattggttccaaagagaactgaaaacacaaacagagatgttgcgaagaaagaagttgggacctcctctccattgcctccaaatcctgctaatgctatgcataagggaaatgacaaggttggtaggccaatggagaacacacaagtacccatgcagagatttggcagcccatcgatgtcaactgcagcagtggggatggacagaggaacacctaggtcatccatcccaagcccgagcattacaatccggagaccgaatggaattgtacggccgcctaaaaacatttctgtctcttctaagaaacctgatgcaggagacgtttcacctgctattggtaaggaaaaggaacaaggtggaaggttgctgcaagcaaatatttcaactgatcagaaactggttatgtcaaaaccaccagctgtggagaaagctgcacacggaagtgctgaaaggacggagaaggtcagcagagatggggtgcctgatgttgccaagaaagaggacaaaaagagtgaccggcatgagaaaaagaaaaggaaagagaaagataaacacaaagagaggaaaaaggagaaagaggcaaagaaggagaaagagaagcataattacaaggagcatgataagacaagagagaacaatataagttatccggtagatagtcttaacttgaagccctcggcccctcctgtagccccaccagttgatggtggaaaatctgttgtgcccgatgagaacctgaagaagcgaaagaatcatgaaacgaatggttacctacaaattgccgagaccagccctccccatcaatcttgtggagaatggtacagcatctcatgtagccgcgccactctcttctgtgaagccagaagccattatcaataatattgaaaaggctgaaaggctgcacaaggaagagaagatgaatggcaaccaacaggctgagcgagcttcagtcgatccggtggctgcctatgagaatggcataacttctaggaagtcgcctcaccccgactgcaagtatcttagccagatatacagcgttcctgaagcacctcaaatgatggaattgcctgggcaggaaggtgaggactggctgttcgaccgaggtggcactaaatcaaggaagcccagttcagcggctgaggctgatga

SEQ ID NO: 52054 - DNA, 2448 bp, Zea Mays
ctccggcctccatcctacccgccgtgctatataatccccacccggttgtcctctgtccggtttcctctcccgttcccctcttgccgcggcggtgtgccccaatcggccaatcctcctattctccccctcacctcctcaaccctactccgacaacagcgggcgctgggagcaaacgaaaactaaaacgagtgagatcgcggcgcccgattctgtcgcggtcgcgcgggtggccggattggattggatcctcggacccccgcgcgcgcgcggagggcaattcgggcacagatccccgcgattccgtcgccggaggcgggcatgagaggccggagggcatgcctgtggtggttcctggcgcaggacgagtgagccggtggcggcgggtggaggaggacctgttgctttgagcctgagaggtgcagtcgtcaaggaggaggaagaggcggcggcggcggcggcggcggcggcggcgggggtgggtaggtgatccgaggcccgaggcggccgtgccatgtctcgctgcttcccgtttccgccaccaggatatgccaagaccgcgcgccccgacggccagctagcctcgcacctgcagcagcagcagcagcttgacaaggagaaacaaaaggagaagaagcataagaaggacaagaaggacaaagttagaaaagaaggtaaagaaaagaaggacaaggacaggagtaaggataagcacaaagataagaaagaccgaaaagaaaaacacagagacaagaaaaaagacaagagcaaagataaaagcagggattcaggtgaaggaattgaaagaaatgacgaggctcaccatggtcagaaggttggagagagcagcaggagatccgaagaaattaaggatcttaaattcagggaggacttggtcagagacgtacaggatgagaaaggggcggcgagtcgacctagtgaaaattatggtgtttcaaatgatcgaaatcgcaaaggcttcagtgcttcacccgcgatggagactgaaaggtttgcgcttaataaagtgcatattcagtctagtaatgctccaaggaaaaatgagggactggtacaacagagcatcagtgccaatcgacaaaagaatgggacatcaatacggcattctgaaagcctcaccacttttgctcaaagaactgtgggtggctttccaccagcaccttcaacggaggaaaaattcaaagctgcaaggcctttatccaatactgaagctgcacccagaaaagaggggattggacagcgaatcagtaacattagcatattggttccaaagagaactgaaaacacaaacagagatgttgcgaagaaagaagttgggacctcctctccattgcctccaaatcctgctaatgctatgcataagggaaatgacaaggttggtaggccaatggagaacacacaagtacccatgcagagatttggcagcccatcgatgtcaactgcagcagtggggatggacagaggaacacctaggtcatccatcccaagcccgagcattacaatccggagaccgaatggaattgtacggccgcctaaaaacatttctgtctcttctaagaaacctgatgcaggagacgtttcacctgctattggtaaggaaaaggaacaaggtggaaggttgctgcaagcaaatatttcaactgatcagaaactggttatgtcaaaaccaccagctgtggagaaagctgcacacggaagtgctgaaaggacggagaaggtcagcagagatggggtgcctgatgttgccaagaaagaggacaaaaagagtgaccggcatgagaaaaagaaaaggaaagagaaagataaacacaaagagaggaaaaaggagaaagaggcaaagaaggagaaagagaagcataattacaaggagcatgataagacaagagagaacaatataagttatccggtagatagtcttaacttgaagccctcggcccctcctgtagccccaccagttgatggtggaaaatctgttgtgcccgatgagaacctgaagaagcgaaagaatcatgaaacgaatggttacctacaaaaccatcttgaaatgcggcctacaaagttgccgagaccagccctccccatcaatcttgtggagaatggtacagcatctcatgtagccgcgccactctcttctgtgaagccagaagccattatcaataatattgaaaaggctgaaaggctgcacaaggaagagaagatgaatggcaaccaacaggctgagcgagcttcagtcgatccggtggctgcctatgagaatggcataacttctaggaagtcgcctcaccccgactgcaagtatcttagccagatatacagcgttcctgaagcacctcaaatgatggaattgcctgggcaggaaggtgaggactggctgttcgaccgaggtggcactaaatcaaggaagcccagttcagcggctgaggctgatga

SEQ ID NO: 52055 - DNA, 1902 bp, Zea Mays
cttttttctaggccgtgcgatcgcattctgacggcagcgaatgcttggtggtggacgaacgactcggcttctactcgataattccagaatccagtctatgagtcaacttatcctctatgcagcaaaaaaataagcggtcgtcaggcgccgggcgagggaagcagggaaacaaggagcgagcgagcctgcgccgctaagacgggcgccgaccggcgagcgatgcagtccccttcaccttttcttcattcttccgcatcgtaagaggattaggaatttaggatcggggccgacagagcccgacgaccagcatggaccactcgcccgatgatctgtcgttgatggcgctcggcgaggacggggatcacggcgccgccctgcccctcattgcggactaggcaaagcatgacgacgatggcatcatccgaaaatgagcatgttgatggcgtcagcgcacatggtcacggaggtgaaggcgaccacgtcagccatggcagatgaggagcatccggagagaagagaggaggcctcagaaatgatcaagttgtacaggaactaggggaaggcattatgctttgaagtgtcccaacatacccttgggagggaactggccgagattataactatgaacaggtgcttaaatatttttttgccaattattttgtccacgtaaacatggatccatgtgcattggccgttagtaaacatgtgactatttggtggccttttggctgatatatgatatgtcacaattgcctcatagctttacaccttggtggttctaatgttctgtgacattacaaccatattttgttgttacgagtttactacttgcatgctacctagacctgtttctgtgggagcattcatatacttttggttaatatgtgatatgtcaatattctttatcaatacttcttctgttgtggatcttcaatatataactacattggacgaaccaaatcaccacaccgttatgttaccttttttgtgaaatttgaccttgagcttttctgttgcggctgttgggcagggtgttcaacattattcgcgacaacaaccaggtcttgctgggataggtgtaggaccattatgaggccaccacatgttcttaggaagggaacaaggaagataattttttgttacttttataaatttgtgtaaaatgtaagtttcaacataattgtgacaacatatttttaattggtagtccctcacctttttaagtgctctctgctacttcattgataaatttacaataaattaactttgaaatttgtatctccatgatgcatagacaacctgagcatgtgatgatgtttttacttgctgaaatgggaacaagtgggtcacttcatgggcatctaaggttggtgatcaaagcaagatttgcccccaaaaactttgaagcaatcctaaggagacacatcattaagttatccaatttgattgtgtccatgccgtcttttttatttgagccatacaatcacgtttcaatagagatgttgcagcttactacctcctcgcgcgtgcagcggatgctctgtgattcgatagctcacgattattctagaggacaccaaatgaactgaagataaaaatcacgtagagcagtggtgggtggcaggaagcaaccatgggttggtcaacgaacggaagcgggaagacataaagcagcacgacgacggtgagaaaggaagagcaagaacgtcgtcgccaacagtgcaatatggcgcaatcccctataattaccgttgcgtctccgcgactagaccatgtctcgcggtcagagggcgtacctcaacgaagctgcgagtgggcgccatggtgacgacgctggacaggtggtcctagagggtggcaacgtgtatgtcctcgtctcgcgaccttcgcatagttgcaaac

SEQ ID NO: 52056 - DNA, 1568 bp, Zea Mays
cgctgcgtccacgtcggtctcttttttctaggccgtgcgatcgcattctgacggcagcgaatgcttggtggtggacgaacgactcggcttctactcgataattccagaatccagtctatgagtcaacttatcctctatgcagcaaaaaaataagcggtcgtcaggcgccgggcgagggaagcagggaaacaaggagcgagcgagcctgcgccgctaagacgggcgccgaccggcgagcgatgcagtccccttcaccttttcttcattcttccgcatcgtaagaggattaggaatttaggatcggggccgacagagcccgacgaccagcatggaccactcgcccgatgatctgtcgttgatggcgctcggcgaggacggggatcacggcgccgccctgcccctcattgcggactaggcaaagcatgacgacgatggcatcatccgaaaatgagcatgttgatggcgtcagcgcacatggtcacggaggtgaaggcgaccacgtcagccatggcagatgaggagcatccggagagaagagaggaggcctcagaagtgagctgtgtattctccatcgttgcgctgatagtgtttctgataattatagtgttgttcgcctgttcggttgcttgccttgattcatagcggttccagctagggttgagcttgcgagttgtgggttacatttaaggttctattccactacatgttcatgtatctatattttttcttctcctacgacttgcccccttttgatccgacaagaagaagaaaattaaggaggtcgtcatccaaaaaccttctgatggaatggacaactttgcagagaagacagaaaaaacactggcagtcacagaatccggtgtacttaacttcactagaatgaggaagataaacaggcacaacagatacactcattgggagctagactagacaagtttaagaatcagaaaatgaatcgaggctttacatttagtcattgtgcaagtttaaaaatcaaccagtgaattaaggctttacatttgttcatcctacaaaaatttcaggtggattttaattcaacttgagtacttttgcaatatctggctctccctgcttttcagatgatcaagttgtacaggaactaggggaaggcattatgctttgaagtgtcccaacatacccttgggagggaactggccgagattataactatgaacagcggatgctctgtgattcgatagctcacgattattctagaggacaccaaatgaactgaagataaaaatcacgtagagcagtggtgggtggcaggaagcaaccatgggttggtcaacgaacggaagcgggaagacataaagcagcacgacgacggtgagaaaggaagagcaagaacgtcgtcgccaacagtgcaatatggcgcaatcccctataattaccgttgcgtctccgcgactagaccatgtctcgcggtcagagggcgtacctcaacgaagctgcgagtgggcgccatggtgacgacgctggacaggtggtcctagagggtggcaacgtgtatgtcctcgtctcgcgaccttcgcatagttgcaaac

SEQ ID NO: 52057 - DNA, 1595 bp, Zea Mays
ctgaaactcataaacaaccgaacagctgctgtgagatttccttataatagagcggggagggaatctcgtcgctcgctgcgtccacgtcggtctcttttttctaggccgtgcgatcgcattctgacggcagcgaatgcttggtggtggacgaacgactcggcttctactcgataattccagaatccagtctatgagtcaacttatcctctatgcagcaaaaaaataagcggtcgtcaggcgccgggcgagggaagcagggaaacaaggagcgagcgagcctgcgccgctaagacgggcgccgaccggcgagcgatgcagtccccttcaccttttcttcattcttccgcatcgtaagaggattaggaatttaggatcggggccgacagagcccgacgaccagcatggaccactcgcccgatgatctgtcgttgatggcgctcggcgaggacggggatcacggcgccgccctgcccctcattgcggactaggcaaagcatgacgacgatggcatcatccgaaaatgagcatgttgatggcgtcagcgcacatggtcacggaggtgaaggcgaccacgtcagccatggcagatgaggagcatccggagagaagagaggaggcctcagaaatgatcaagttgtacaggaactaggggaaggcattatgctttgaagtgtcccaacatacccttgggagggaactggccgagattataactatgaacagggtgttcaacattattcgcgacaacaaccaggtcttgctgggataggtgtaggaccattatgaggccaccacatgttcttaggaagggaacaaggaagataattttttgttacttttataaatttgtgtaaaatgtaagtttcaacataattgtgacaacatatttttaattggtagtccctcacctttttaagtgctctctgctacttcattgataaatttacaataaattaactttgaaatttgtatctccatgatgcatagacaacctgagcatgtgatgatgtttttacttgctgaaatgggaacaagtgggtcacttcatgggcatctaaggttggtgatcaaagcaagatttgcccccaaaaactttgaagcaatcctaaggagacacatcattaagttatccaatttgattgtgtccatgccgtcttttttatttgagccatacaatcacgtttcaatagagatgttgcagcttactacctcctcgcgcgtgcagcggatgctctgtgattcgatagctcacgattattctagaggacaccaaatgaactgaagataaaaatcacgtagagcagtggtgggtggcaggaagcaaccatgggttggtcaacgaacggaagcgggaagacataaagcagcacgacgacggtgagaaaggaagagcaagaacgtcgtcgccaacagtgcaatatggcgcaatcccctataattaccgttgcgtctccgcgactagaccatgtctcgcggtcagagggcgtacctcaacgaagctgcgagtgggcgccatggtgacgacgctggacaggtggtcctagagggtggcaacgtgtatgtcctcgtctcgcgaccttcgcatagttgcaaac

SEQ ID NO: 52058 - DNA, 2589 bp, Zea Mays
ggtccgttaatttgtggacatcaggtgagtgatcgtcagctgcttcctgaaactcataaacaaccgaacagctgctgtgagatttccttataatagagcggggagggaatctcgtcgctcgctgcgtccacgtcggtctcttttttctaggccgtgcgatcgcattctgacggcagcgaatgcttggtggtggacgaacgactcggcttctactcgataattccagaatccagtctatgagtcaacttatcctctatgcagcaaaaaaataagcggtcgtcaggcgccgggcgagggaagcagggaaacaaggagcgagcgagcctgcgccgctaagacgggcgccgaccggcgagcgatgcagtccccttcaccttttcttcattcttccgcatcgtaagaggattaggaatttaggatcggggccgacagagcccgacgaccagcatggaccactcgcccgatgatctgtcgttgatggcgctcggcgaggacggggatcacggcgccgccctgcccctcattgcggactaggcaaagcatgacgacgatggcatcatccgaaaatgagcatgttgatggcgtcagcgcacatggtcacggaggtgaaggcgaccacgtcagccatggcagatgaggagcatccggagagaagagaggaggcctcagaagtgagctgtgtattctccatcgttgcgctgatagtgtttctgataattatagtgttgttcgcctgttcggttgcttgccttgattcatagcggttccagctagggttgagcttgcgagttgtgggttacatttaaggttctattccactacatgttcatgtatctatattttttcttctcctacgacttgcccccttttgatccgacaagaagaagaaaattaaggaggtcgtcatccaaaaaccttctgatggaatggacaactttgcagagaagacagaaaaaacactggcagtcacagaatccggtgtacttaacttcactagaatgaggaagataaacaggcacaacagatacactcattgggagctagactagacaagtttaagaatcagaaaatgaatcgaggctttacatttagtcattgtgcaagtttaaaaatcaaccagtgaattaaggctttacatttgttcatcctacaaaaatttcaggtggattttaattcaacttgagtacttttgcaatatctggctctccctgcttttcagatgatcaagttgtacaggaactaggggaaggcattatgctttgaagtgtcccaacatacccttgggagggaactggccgagattataactatgaacaggtgcttaaatatttttttgccaattattttgtccacgtaaacatggatccatgtgcattggccgttagtaaacatgtgactatttggtggccttttggctgatatatgatatgtcacaattgcctcatagctttacaccttggtggttctaatgttctgtgacattacaaccatattttgttgttacgagtttactacttgcatgctacctagacctgtttctgtgggagcattcatatacttttggttaatatgtgatatgtcaatattctttatcaatacttcttctgttgtggatcttcaatatataactacattggacgaaccaaatcaccacaccgttatgttaccttttttgtgaaatttgaccttgagcttttctgttgcggctgttgggcagggtgttcaacattattcgcgacaacaaccaggtcttgctgggataggtgtaggaccattatgaggccaccacatgttcttaggaagggaacaaggaagataattttttgttacttttataaatttgtgtaaaatgtaagtttcaacataattgtgacaacatatttttaattggtagtccctcacctttttaagtgctctctgctacttcattgataaatttacaataaattaactttgaaatttgtatctccatgatgcatagacaacctgagcatgtgatgatgtttttacttgctgaaatgggaacaagtgggtcacttcatgggcatctaaggttggtgatcaaagcaagatttgcccccaaaaactttgaagcaatcctaaggagacacatcattaagttatccaatttgattgtgtccatgccgtcttttttatttgagccatacaatcacgtttcaatagagatgttgcagcttactacctcctcgcgcgtgcagcggatgctctgtgattcgatagctcacgattattctagaggacaccaaatgaactgaagataaaaatcacgtagagcagtggtgggtggcaggaagcaaccatgggttggtcaacgaacggaagcgggaagacataaagcagcacgacgacggtgagaaaggaagagcaagaacgtcgtcgccaacagtgcaatatggcgcaatcccctataattaccgttgcgtctccgcgactagaccatgtctcgcggtcagagggcgtacctcaacgaagctgcgagtgggcgccatggtgacgacgctggacaggtggtcctagagggtggcaacgtgtatgtcctcgtctcgcgaccttcgcatagttgcaaac

SEQ ID NO: 52059 - DNA, 3588 bp, Zea Mays
aaatgtaggtgtaactccaaaatcctacttactgctgggccccaagaattcgatgcagcccagcccaaccacctcccagcttatccttctcccggtctccctcggctccgctctgccgcagccgcgggaaatggtcgcgctccacctccacgccaagcaacccacgcctcgtctcctccccgttccaccgagccatgcccgtacccgtacgcccacggcggcggcggtcaacgtgagccacgctgcgcctccgcccgacgtcgtcctcgactgcaaacggctggacgggctgatgaagtccgggaggctgggggacgccctggacctgttcgatcggatgcctcgcaagaacgtcgtcgcgtggaccacggccatctccgggtgcacgcggaacgggcgccccgaggcggctgcgaccatgttcgcggacatgctggagtccggcgtcgcgcccaacgacttcgcgtgcaacgcggcgctggcggcgtgcgcggccgctggcgcgctcggcctcggcgagcaggtgcactcgctcgccgtgcgggcgggcttcgcggccgacgcctggatcggaagctgcctcatcgagctctactcgaggtgcggctccctgcgggcggccgaggaggtctttcgccggatggaggcgccggacgtcgtggggtacacctcgctcgtctcggcgctctgccggaacggagagctcgcacgggctgtggatgtgctctgccagatgacgaggcaggggttgcagccgaacgagcacacgatgacgagcatgctggcagagtgccctcgtggaattggtgagcagatacatggatatatgctcaaggtaatgggttcgcagagcgtctatgcatccactgcactgatcgacttctactcgaggtacggtgactttggcacggcgaaaacggtctttgaaaatcttgagtccaagaacgtggtgtcgtggtgctccatgatgcagctgtgcattagggatggaaggttggacgatgcgctgcgagtgttcagtgagatgatttcagagggcgtccagccaaatgaatttgcgttctcaatcgctcttagtgcctgtgggtctgtttgtctggggcgtcaaattcactgctcagccatcaagcgtgacttaatgactgacatccgagtatctaatgctttactctctatgtatggtaggagtggttttgtttcagaactcgaggctgtgcttggcaagattgaaaatcctgatcttgttagctggacagctgccatttctgcgaacttccagaatggtttcagtgagaaggctgtagcattgcttcttcagatgcattcagagggttttacaccgaatgactatgccttctctagtggtctgagttcttgtgcagacctggcattgctgcatcaaggaaggcagcttcattgcctggcactgaaactggggtgtgacttcaaagtttgtactgggaacgcactaattaacatgtattccaagtgtggtagaattggatctgcaaggcttgcatttgacgtcatggatactcatgatgtcatgtcttggaactcattgattcacggtctcgcacagcatggtgacgcaaacttggcactggagacattcagtgagatgtgctcaagcgattggcggccagacgattcaacatttctgtcagtcttggtagggtgcaatcatgcaggtctggtaaaggaaggggagacctttttcagacaaatgactgaccggtatggtctcacaccgaccccttctcactacgcatgcatgatcgacatgctgggtcgaaatggcaggttcgccgaggcgctacgcatgatcgagaatatgccattcgagcctgatgttttgatttggaagacactattagcatcatgcaagctgcacaggaatcttgacatcgggaagctcgcagcagataagctgatggagctttcagaaagagactccgcgagctacgtgctcatgtcaaacctctatgcgatgcatgaagaatggcgggatgccgagagggtgcgtcggaggatggatgaaattggggtgaagaaggatgccggttggagctggattgaggtcaagaacgaggttgaagcggctcgatttgttcaccagaaattcagattttcgagtggaacggagggagtaactgatagcatctattcttgtccaggttgcggagcgggcgttatttttgtggaataatgaccatatcgagagtctgatcaaacagaatagtagggttatacatctaagtggcttttccttgccatctgggatggcctatggtggtgcaacaacagtcaaaatcttctatcaacggcgtcgaaaaaccactgctggaaataatattgctacaattaatgatgatgatattgcggaggctcatgcttgggattgggcttggatgttgatgtgacagcggttactccgtctgaccccccctcggacgtggaaggcgctgctgatactccgtctgagaccatctcaagatttcaggggccattattattagagtacaatggaacagcgaggagggctgacgcagactcaactgttccactcaggcatgaggtggtagcctttgatgacagttccaggcagaattttggggattcatgtgactcctcattggatccattatcttctatggaatctagaagaagatcattcatggctaagataacaatggcacattcacagctccttgctgctcctgtcctccccaagcggtcaaggggtgccacaaaacatggtactgcgctacgacggagccgacgggttgcaggggcaggggtggaatttaacatgcaggatctggagaacagagccacaaaacaagtaatgcggactctgagagtcatcacagagaatgcaagcatcaaccagcaagctgttaaggattatgagaatctttttcagcatcccttaactcaaagtcatgttgaagcgttagcggctctctttggatgggagactccggggaatctcttcccgtagtgtgtttttctttctgggttgtaatttataattgttgtaatggatcctagcaaaattatatgttggaatgtgagaggtttaaattcagctgatcgtcaaaattcagtccggaatctagttctgtcctctaaagctgatgtggtctgtctccaggaaactaaaatgactgtcatttctacaagaaccattcttgcagccttgggttcggatttctgccagttctcctttctaccatcttgtggtgctagtggtggtgtgctggttgcttggaagcgacatctgggagtgactgggttgtctaggattgacagatacagcatttcaatccaattctgcaatgcgcataatcgctgttggtggttaacttgtgtttatggtcctcaaagtaacagtgataagatgttgtttcttcaagaactgagagacatcagggctgcttgcactggaccctggttgattgctggtgacttcaatctcatctacagggcttcagataaaaataattcaaatattaacagagctatgatggggagatttaggaagttggttgaggacttgagtctcaatgaggttccactttttgg

SEQ ID NO: 52060 - DNA, 7435 bp, Zea Mays
cagacattcccctcgtcgtctcaggctctccgcagtccccacacatcagctgccgtagcaacgttcccgggaattccccaaaatgcccctcgaccccgactcctcgtcgccgccgccgccacaccgcgactggttcttcccgccggcgccgccgttcctcgcctcctccaggtcccggacccccagtgcgcccttcccctccacctaccgctcctccaagccctactcagcctaccccctcgccgaccgccgaccgcctcctaccccacgctcccgctcccgctctccgcacccaccgccggagcagcagcagaagacgccgacgccgcctactcctacgtccgcgccgcgccgccgtgaccctcggtacgccggcgtccgccgcgaagatgcccgtacggctgcctccgagcaagcggcggccccgatggccgcgccagtgcacgggaggaagcccgcagcgtcggcgatcgctccacggtggtcgggggtgctctccgtggcggttattttactgtgcctggcctcccttctccgcaggaacttctctttgcacgaccaggtttaccttctgcaggagcagctggctgtagctactgcaaaacttcagtcctgcactgtagattcttcattgaatacaagcatcattaatctgttctatcaggatgctgctaacagtaccacgcagagcagaagccttaagaacctttccttgcttatctcgctttcggtattatacgcaccactcctcattctcaagtacgtggaccttgtgtcaaagataaggaggtcacgtgactctgaacaagttccaataaacaagcggttcgcatacagggtcgatatatttttgtcacttcatccgtatgctaaaccattggtcctacttgttgctacgttgttactaattgctcttggtggactggctctgtatggtgtgacggatgatagcttatctgattgtctttggctgtcctggaccttcgtcgctgactcagggaaccatgccaatgctgtgggtcttggacccaagctggtttcagtttcaattagtattggtggaatgttggtttttgctatgatgcttggtcttgtcactgattcaatctctgagaagtttgattctttgaggaaaggaagaagtgaagtcatagaacagagccacactctaattcttgggtggagtgataaattgggatctttgctgaaccaaattgccattgctaatgaaagcttgagaggtgggaccattgtagtgatggctgagagagacaaagaagaaatggaagcagatattgctaaaatggagtttgacatgaaaggaacagctgtaatatgtagaagtggaagccctttgatacttgctgatttgaaaaaggtctcagtttcaaaggcgcgggcaattgttgttttagctgaagaaggaaatgctgaccagagtgatgcacgagcactgcgaacagtcctgagtttaactggagttaaagagggactaagtggtcacatagtagtggagcttagtgatcttgacaatgaagttctagtcaaacttgttggtggagatcttgtggaaacagttgtggcacatgatgtgattggacgattgatgatacagtgtgcacgtcaaccaggccttgcacagatatgggaagacattcttggttttgagaactgtgaattctacattaaaagatggcctaaattggatggaatgcgatttgaagatgtgctgattagctttcctgaagctgttccatgtggcataaaagtggcatcttatgggggcaagattattttaaaccctgatgattgttatgttttgcaagagggtgatgaggtgatagtaattgcagaggatgatgatacatatgctccagcaccattgcccaaggttaggagagggtatctgcctaaagattttgttgttccaaagtctccagaaagaatattgttttgtggttggcgccgtgatatagaagatatgataatggtacttgatgctttccttgcgccaggatcagagttgtggatgtttaatgacgtccctgaggttgacagagaaagaaagctaattgatggaggtttggacttcagtcgcctcgataatattactttggtgcatcgtgagggaaatgctgttattcgccgtcacttggagagccttcctttagaatcattcgattctatcctgattttggcagatgaatctgtagaagattcagcaatccaagctgactcaaggtcacttgcaactttgctgctgataagagatattcaggcaaaacgtcttccatgcaaggaatcattgatttcacatgttccccgagggaccttttctgaaggttcttggataggggagatgcaacaagcatctgataaatctgtcataatcagtgaaattttggaccccaggacaaaaaatttgttgtcagtgtcaaaaattagtgactacgttctttcaaatgaattagtgagcatggcattggcaatggtcgcagaagatcggcagataaataatgtcttggaggagctcttcgctgaacaaggaaatgaaatgcaaatacgaccttctgatatgtaccttagagaagaagaggaattaaatttctttgaggtcattctgcgagctaggcagaggaaagagattgtcattgggtaccgtcttgaggcagctgagcgtgccataatcaatccaatagacaaagtttcaaggcgaaggtggtcacccaaggatgtttttgttgttatatccgagaaagaatgaggtttatcagatcacagttgacacaaaagcaagctcctgaccagtgaccacacctaatgaagaacaggcagctgcgccgcagcacacacacacacaccgaccagcgcagagagctatttgattcagatgcgcatttggctgattcagatgcgcatttggcagaaggcaatcgctgagcgcgaaggagtaaaagcatgatcagatattcagatcttggatcagtctagactgacaccttaggtcgccctttacaaatatgacttaaaaaggatgtgaacagagtagtacagcacatgctttggaagtttggatattcttgtccgtgtaacttcccacatgaacaacgagcaaagcatcgcctgcatgcatcaattaatggcttaaagctattgagtgctgatactgagcagttttccagtgagcctgttacaccctcccatagagcgtagacgacagcgatagttcagcattctgtacattgcataggcgcattctgttgccagtccatgtaaacaacatgagatgtcggccagtccatgtaaatatgtaatctggaagatcatctgtaggtactgttgcggtgttggatcttgtgaagaatgcagagagcaatgccgaagcgtgtcaccttgcctcattgtacttgagcagatatatattatgtccaacaagtctatgcttcacaacgaatactcaaaatctttgattcataaactcaacaaaagatctgctgttgtgatttatgcacacttccatggatatcatcccaactgattctagctggggttttcatgataaaaatgtaggtgtaactccaaaatcctacttactgctgggccccaagaattcgatgcagcccagcccaaccacctcccagcttatccttctcccggtctccctcggctccgctctgccgcagccgcgggaaatggtcgcgctccacctccacgccaagcaacccacgcctcgtctcctccccgttccaccgagccatgcccgtacccgtacgcccacggcggcggcggtcaacgtgagccacgctgcgcctccgcccgacgtcgtcctcgactgcaaacggctggacgggctgatgaagtccgggaggctgggggacgccctggacctgttcgatcggatgcctcgcaagaacgtcgtcgcgtggaccacggccatctccgggtgcacgcggaacgggcgccccgaggcggctgcgaccatgttcgcggacatgctggagtccggcgtcgcgcccaacgacttcgcgtgcaacgcggcgctggcggcgtgcgcggccgctggcgcgctcggcctcggcgagcaggtgcactcgctcgccgtgcgggcgggcttcgcggccgacgcctggatcggaagctgcctcatcgagctctactcgaggtgcggctccctgcgggcggccgaggaggtctttcgccggatggaggcgccggacgtcgtggggtacacctcgctcgtctcggcgctctgccggaacggagagctcgcacgggctgtggatgtgctctgccagatgacgaggcaggggttgcagccgaacgagcacacgatgacgagcatgctggcagagtgccctcgtggaattggtgagcagatacatggatatatgctcaaggtaatgggttcgcagagcgtctatgcatccactgcactgatcgacttctactcgaggtacggtgactttggcacggcgaaaacggtctttgaaaatcttgagtccaagaacgtggtgtcgtggtgctccatgatgcagctgtgcattagggatggaaggttggacgatgcgctgcgagtgttcagtgagatgatttcagagggcgtccagccaaatgaatttgcgttctcaatcgctcttagtgcctgtgggtctgtttgtctggggcgtcaaattcactgctcagccatcaagcgtgacttaatgactgacatccgagtatctaatgctttactctctatgtatggtaggagtggttttgtttcagaactcgaggctgtgcttggcaagattgaaaatcctgatcttgttagctggacagctgccatttctgcgaacttccagaatggtttcagtgagaaggctgtagcattgcttcttcagatgcattcagagggttttacaccgaatgactatgccttctctagtggtctgagttcttgtgcagacctggcattgctgcatcaaggaaggcagcttcattgcctggcactgaaactggggtgtgacttcaaagtttgtactgggaacgcactaattaacatgtattccaagtgtggtagaattggatctgcaaggcttgcatttgacgtcatggatactcatgatgtcatgtcttggaactcattgattcacggtctcgcacagcatggtgacgcaaacttggcactggagacattcagtgagatgtgctcaagcgattggcggccagacgattcaacatttctgtcagtcttggtagggtgcaatcatgcaggtctggtaaaggaaggggagacctttttcagacaaatgactgaccggtatggtctcacaccgaccccttctcactacgcatgcatgatcgacatgctgggtcgaaatggcaggttcgccgaggcgctacgcatgatcgagaatatgccattcgagcctgatgttttgatttggaagacactattagcatcatgcaagctgcacaggaatcttgacatcgggaagctcgcagcagataagctgatggagctttcagaaagagactccgcgagctacgtgctcatgtcaaacctctatgcgatgcatgaagaatggcgggatgccgagagggtgcgtcggaggatggatgaaattggggtgaagaaggatgccggttggagctggattgaggtcaagaacgaggtcaacacctttgttgcaggagacatgtctcatccagactccacatccatctatcagatgcttgcagagctccttgttgtgatgcaagatacagatttagatgttcatatgcagatttagatgtccaaaaagagaacataccacttgcagacattacatgtacagggtacaacagcacatagcgcctgattggttgctcatctgggtggagcctggtccaaacctggatgcaggctgagaccagcctatatgtgtggatgcaagtgccaagtttgcttgcatgtttggttggatgtaccaaagcagccatgatttaatgggcacatgtttggttaaacaacaccaagtcggcgaatgttttttacaagaggttgcggagcgggcgttatttttgtggaataatgaccatatcgagagtctgatcaaacagaatagtagggttatacatctaagtggcttttccttgccatctgggatggcctatggtggtgcaacaacagtcaaaatcttctatcaacggcgtcgaaaaaccactgctggaaataatattgctacaattaatgatgatgatattgcggaggctcatgcttgggattgggcttggatgttgatgtgacagcggttactccgtctgaccccccctcggacgtggaaggcgctgctgatactccgtctgagaccatctcaagatttcaggggccattattattagagtacaatggaacagcgaggagggctgacgcagactcaactgttccactcaggcatgaggtggtagcctttgatgacagttccaggcagaattttggggattcatgtgactcctcattggatccattatcttctatggaatctagaagaagatcattcatggctaagataacaatggcacattcacagctccttgctgctcctgtcctccccaagcggtcaaggggtgccacaaaacatggtactgcgctacgacggagccgacgggttgcaggggcaggggtggaatttaacatgcaggatctggagaacagagccacaaaacaagtaatgcggactctgagagtcatcacagagaatgcaagcatcaaccagcaagctgttaaggattatgagaatctttttcagcatcccttaactcaaagtcatgttgaagcgttagcggctctctttggatgggagactccggggaatctcttcccgtagtgtgtttttctttctgggttgtaatttataattgttgtaatggatcctagcaaaattatatgttggaatgtgagaggtttaaattcagctgatcgtcaaaattcagtccggaatctagttctgtcctctaaagctgatgtggtctgtctccaggaaactaaaatgactgtcatttctacaagaaccattcttgcagccttgggttcggatttctgccagttctcctttctaccatcttgtggtgctagtggtggtgtgctggttgcttggaagcgacatctgggagtgactgggttgtctaggattgacagatacagcatttcaatccaattctgcaatgcgcataatcgctgttggtggttaacttgtgtttatggtcctcaaagtaacagtgataagatgttgtttcttcaagaactgagagacatcagggctgcttgcactggaccctggttgattgctggtgacttcaatctcatctacagggcttcagataaaaataattcaaatattaacagagctatgatggggagatttaggaagttggttgaggacttgagtctcaatgaggttccactttttgg

SEQ ID NO: 52061 - DNA, 7428 bp, Zea Mays
cagacattcccctcgtcgtctcaggctctccgcagtccccacacatcagctgccgtagcaacgttcccgggaattccccaaaatgcccctcgaccccgactcctcgtcgccgccgccgccacaccgcgactggttcttcccgccggcgccgccgttcctcgcctcctccaggtcccggacccccagtgcgcccttcccctccacctaccgctcctccaagccctactcagcctaccccctcgccgaccgccgaccgcctcctaccccacgctcccgctcccgctctccgcacccaccgccggagcagcagcagaagacgccgacgccgcctactcctacgtccgcgccgcgccgccgtgaccctcggtacgccggcgtccgccgcgaagatgcccgtacggctgcctccgagcaagcggcggccccgatggccgcgccagtgcacgggaggaagcccgcagcgtcggcgatcgctccacggtggtcgggggtgctctccgtggcggttattttactgtgcctggcctcccttctccgcaggaacttctctttgcacgaccaggtttaccttctgcaggagcagctggctgtagctactgcaaaacttcagtcctgcactgtagattcttcattgaatacaagcatcattaatctgttctatcaggatgctgctaacagtaccacgcagagcagaagccttaagaacctttccttgcttatctcgctttcggtattatacgcaccactcctcattctcaagtacgtggaccttgtgtcaaagataaggaggtcacgtgactctgaacaagttccaataaacaagcggttcgcatacagggtcgatatatttttgtcacttcatccgtatgctaaaccattggtcctacttgttgctacgttgttactaattgctcttggtggactggctctgtatggtgtgacggatgatagcttatctgattgtctttggctgtcctggaccttcgtcgctgactcagggaaccatgccaatgctgtgggtcttggacccaagctggtttcagtttcaattagtattggtggaatgttggtttttgctatgatgcttggtcttgtcactgattcaatctctgagaagtttgattctttgaggaaaggaagaagtgaagtcatagaacagagccacactctaattcttgggtggagtgataaattgggatctttgctgaaccaaattgccattgctaatgaaagcttgagaggtgggaccattgtagtgatggctgagagagacaaagaagaaatggaagcagatattgctaaaatggagtttgacatgaaaggaacagctgtaatatgtagaagtggaagccctttgatacttgctgatttgaaaaagtttcaaaggcgcgggcaattgttgttttagctgaagaaggaaatgctgaccagagtgatgcacgagcactgcgaacagtcctgagtttaactggagttaaagagggactaagtggtcacatagtagtggagcttagtgatcttgacaatgaagttctagtcaaacttgttggtggagatcttgtggaaacagttgtggcacatgatgtgattggacgattgatgatacagtgtgcacgtcaaccaggccttgcacagatatgggaagacattcttggttttgagaactgtgaattctacattaaaagatggcctaaattggatggaatgcgatttgaagatgtgctgattagctttcctgaagctgttccatgtggcataaaagtggcatcttatgggggcaagattattttaaaccctgatgattgttatgttttgcaagagggtgatgaggtgatagtaattgcagaggatgatgatacatatgctccagcaccattgcccaaggttaggagagggtatctgcctaaagattttgttgttccaaagtctccagaaagaatattgttttgtggttggcgccgtgatatagaagatatgataatggtacttgatgctttccttgcgccaggatcagagttgtggatgtttaatgacgtccctgaggttgacagagaaagaaagctaattgatggaggtttggacttcagtcgcctcgataatattactttggtgcatcgtgagggaaatgctgttattcgccgtcacttggagagccttcctttagaatcattcgattctatcctgattttggcagatgaatctgtagaagattcagcaatccaagctgactcaaggtcacttgcaactttgctgctgataagagatattcaggcaaaacgtcttccatgcaaggaatcattgatttcacatgttccccgagggaccttttctgaaggttcttggataggggagatgcaacaagcatctgataaatctgtcataatcagtgaaattttggaccccaggacaaaaaatttgttgtcagtgtcaaaaattagtgactacgttctttcaaatgaattagtgagcatggcattggcaatggtcgcagaagatcggcagataaataatgtcttggaggagctcttcgctgaacaaggaaatgaaatgcaaatacgaccttctgatatgtaccttagagaagaagaggaattaaatttctttgaggtcattctgcgagctaggcagaggaaagagattgtcattgggtaccgtcttgaggcagctgagcgtgccataatcaatccaatagacaaagtttcaaggcgaaggtggtcacccaaggatgtttttgttgttatatccgagaaagaatgaggtttatcagatcacagttgacacaaaagcaagctcctgaccagtgaccacacctaatgaagaacaggcagctgcgccgcagcacacacacacacaccgaccagcgcagagagctatttgattcagatgcgcatttggctgattcagatgcgcatttggcagaaggcaatcgctgagcgcgaaggagtaaaagcatgatcagatattcagatcttggatcagtctagactgacaccttaggtcgccctttacaaatatgacttaaaaaggatgtgaacagagtagtacagcacatgctttggaagtttggatattcttgtccgtgtaacttcccacatgaacaacgagcaaagcatcgcctgcatgcatcaattaatggcttaaagctattgagtgctgatactgagcagttttccagtgagcctgttacaccctcccatagagcgtagacgacagcgatagttcagcattctgtacattgcataggcgcattctgttgccagtccatgtaaacaacatgagatgtcggccagtccatgtaaatatgtaatctggaagatcatctgtaggtactgttgcggtgttggatcttgtgaagaatgcagagagcaatgccgaagcgtgtcaccttgcctcattgtacttgagcagatatatattatgtccaacaagtctatgcttcacaacgaatactcaaaatctttgattcataaactcaacaaaagatctgctgttgtgatttatgcacacttccatggatatcatcccaactgattctagctggggttttcatgataaaaatgtaggtgtaactccaaaatcctacttactgctgggccccaagaattcgatgcagcccagcccaaccacctcccagcttatccttctcccggtctccctcggctccgctctgccgcagccgcgggaaatggtcgcgctccacctccacgccaagcaacccacgcctcgtctcctccccgttccaccgagccatgcccgtacccgtacgcccacggcggcggcggtcaacgtgagccacgctgcgcctccgcccgacgtcgtcctcgactgcaaacggctggacgggctgatgaagtccgggaggctgggggacgccctggacctgttcgatcggatgcctcgcaagaacgtcgtcgcgtggaccacggccatctccgggtgcacgcggaacgggcgccccgaggcggctgcgaccatgttcgcggacatgctggagtccggcgtcgcgcccaacgacttcgcgtgcaacgcggcgctggcggcgtgcgcggccgctggcgcgctcggcctcggcgagcaggtgcactcgctcgccgtgcgggcgggcttcgcggccgacgcctggatcggaagctgcctcatcgagctctactcgaggtgcggctccctgcgggcggccgaggaggtctttcgccggatggaggcgccggacgtcgtggggtacacctcgctcgtctcggcgctctgccggaacggagagctcgcacgggctgtggatgtgctctgccagatgacgaggcaggggttgcagccgaacgagcacacgatgacgagcatgctggcagagtgccctcgtggaattggtgagcagatacatggatatatgctcaaggtaatgggttcgcagagcgtctatgcatccactgcactgatcgacttctactcgaggtacggtgactttggcacggcgaaaacggtctttgaaaatcttgagtccaagaacgtggtgtcgtggtgctccatgatgcagctgtgcattagggatggaaggttggacgatgcgctgcgagtgttcagtgagatgatttcagagggcgtccagccaaatgaatttgcgttctcaatcgctcttagtgcctgtgggtctgtttgtctggggcgtcaaattcactgctcagccatcaagcgtgacttaatgactgacatccgagtatctaatgctttactctctatgtatggtaggagtggttttgtttcagaactcgaggctgtgcttggcaagattgaaaatcctgatcttgttagctggacagctgccatttctgcgaacttccagaatggtttcagtgagaaggctgtagcattgcttcttcagatgcattcagagggttttacaccgaatgactatgccttctctagtggtctgagttcttgtgcagacctggcattgctgcatcaaggaaggcagcttcattgcctggcactgaaactggggtgtgacttcaaagtttgtactgggaacgcactaattaacatgtattccaagtgtggtagaattggatctgcaaggcttgcatttgacgtcatggatactcatgatgtcatgtcttggaactcattgattcacggtctcgcacagcatggtgacgcaaacttggcactggagacattcagtgagatgtgctcaagcgattggcggccagacgattcaacatttctgtcagtcttggtagggtgcaatcatgcaggtctggtaaaggaaggggagacctttttcagacaaatgactgaccggtatggtctcacaccgaccccttctcactacgcatgcatgatcgacatgctgggtcgaaatggcaggttcgccgaggcgctacgcatgatcgagaatatgccattcgagcctgatgttttgatttggaagacactattagcatcatgcaagctgcacaggaatcttgacatcgggaagctcgcagcagataagctgatggagctttcagaaagagactccgcgagctacgtgctcatgtcaaacctctatgcgatgcatgaagaatggcgggatgccgagagggtgcgtcggaggatggatgaaattggggtgaagaaggatgccggttggagctggattgaggtcaagaacgaggtcaacacctttgttgcaggagacatgtctcatccagactccacatccatctatcagatgcttgcagagctccttgttgtgatgcaagatacagatttagatgttcatatgcagatttagatgtccaaaaagagaacataccacttgcagacattacatgtacagggtacaacagcacatagcgcctgattggttgctcatctgggtggagcctggtccaaacctggatgcaggctgagaccagcctatatgtgtggatgcaagtgccaagtttgcttgcatgtttggttggatgtaccaaagcagccatgatttaatgggcacatgtttggttaaacaacaccaagtcggcgaatgttttttacaagaggttgcggagcgggcgttatttttgtggaataatgaccatatcgagagtctgatcaaacagaatagtagggttatacatctaagtggcttttccttgccatctgggatggcctatggtggtgcaacaacagtcaaaatcttctatcaacggcgtcgaaaaaccactgctggaaataatattgctacaattaatgatgatgatattgcggaggctcatgcttgggattgggcttggatgttgatgtgacagcggttactccgtctgaccccccctcggacgtggaaggcgctgctgatactccgtctgagaccatctcaagatttcaggggccattattattagagtacaatggaacagcgaggagggctgacgcagactcaactgttccactcaggcatgaggtggtagcctttgatgacagttccaggcagaattttggggattcatgtgactcctcattggatccattatcttctatggaatctagaagaagatcattcatggctaagataacaatggcacattcacagctccttgctgctcctgtcctccccaagcggtcaaggggtgccacaaaacatggtactgcgctacgacggagccgacgggttgcaggggcaggggtggaatttaacatgcaggatctggagaacagagccacaaaacaagtaatgcggactctgagagtcatcacagagaatgcaagcatcaaccagcaagctgttaaggattatgagaatctttttcagcatcccttaactcaaagtcatgttgaagcgttagcggctctctttggatgggagactccggggaatctcttcccgtagtgtgtttttctttctgggttgtaatttataattgttgtaatggatcctagcaaaattatatgttggaatgtgagaggtttaaattcagctgatcgtcaaaattcagtccggaatctagttctgtcctctaaagctgatgtggtctgtctccaggaaactaaaatgactgtcatttctacaagaaccattcttgcagccttgggttcggatttctgccagttctcctttctaccatcttgtggtgctagtggtggtgtgctggttgcttggaagcgacatctgggagtgactgggttgtctaggattgacagatacagcatttcaatccaattctgcaatgcgcataatcgctgttggtggttaacttgtgtttatggtcctcaaagtaacagtgataagatgttgtttcttcaagaactgagagacatcagggctgcttgcactggaccctggttgattgctggtgacttcaatctcatctacagggcttcagataaaaataattcaaatattaacagagctatgatggggagatttaggaagttggttgaggacttgagtctcaatgaggttccactttttgg

SEQ ID NO: 52062 - DNA, 7459 bp, Zea Mays
aaacgcagacattcccctcgtcgtctcaggctctccgcagtccccacacatcagctgccgtagcaacgttcccgggaattccccaaaatgcccctcgaccccgactcctcgtcgccgccgccgccacaccgcgactggttcttcccgccggcgccgccgttcctcgcctcctccaggtcccggacccccagtgcgcccttcccctccacctaccgctcctccaagccctactcagcctaccccctcgccgaccgccgaccgcctcctaccccacgctcccgctcccgctctccgcacccaccgccggagcagcagcagaagacgccgacgccgcctactcctacgtccgcgccgcgccgccgtgaccctcggtacgccggcgtccgccgcgaagatgcccgtacggctgcctccgagcaagcggcggccccgatggccgcgccagtgcacgggaggaagcccgcagcgtcggcgatcgctccacggtggtcgggggtgctctccgtggcggttattttactgtgcctggcctcccttctccgcaggaacttctctttgcacgaccaggtttaccttctgcaggagcagctggctgtagctactgcaaaacttcagtcctgcactgtagattcttcattgaatacaagcatcattaatctgttctatcaggatgctgctaacagtaccacgcagagcagaagccttaagaacctttccttgcttatctcgctttcggtattatacgcaccactcctcattctcaagtacgtggaccttgtgtcaaagataaggaggtcacgtgactctgaacaagttccaataaacaagcggttcgcatacagggtcgatatatttttgtcacttcatccgtatgctaaaccattggtcctacttgttgctacgttgttactaattgctcttggtggactggctctgtatggtgtgacggatgatagcttatctgattgtctttggctgtcctggaccttcgtcgctgactcagggaaccatgccaatgctgtgggtcttggacccaagctggtttcagtttcaattagtattggtggaatgttggtttttgctatgatgcttggtcttgtcactgattcaatctctgagaagtttgattctttgaggaaaggaagaagtgaagtcatagaacagagccacactctaattcttgggtggagtgataaattgggatctttgctgaaccaaattgccattgctaatgaaagcttgagaggtgggaccattgtagtgatggctgagagagacaaagaagaaatggaagcagatattgctaaaatggagtttgacatgaaaggaacagctgtaatatgtagaagtggaagccctttgatacttgctgatttgaaaaagtttcaaaggcgcgggcaattgttgttttagctgaagaaggaaatgctgaccagagtgatgcacgagcactgcgaacagtcctgagtttaactggagttaaagagggactaagtggtcacatagtagtggagcttagtgatcttgacaatgaagttctagtcaaacttgttggtggagatcttgtggaaacagttgtggcacatgatgtgattggacgattgatgatacagtgtgcacgtcaaccaggccttgcacagatatgggaagacattcttggttttgagaactgtgaattctacattaaaagatggcctaaattggatggaatgcgatttgaagatgtgctgattagctttcctgaagctgttccatgtggcataaaagtggcatcttatgggggcaagattattttaaaccctgatgattgttatgttttgcaagagggtgatgaggtgatagtaattgcagaggatgatgatacatatgctccagcaccattgcccaaggttaaagaggctgtttacatagacattgttcatcctgaaagaaagcctcagaagattcttctttgtggatggcgacgggatatagatgatatgattgcggtaagttcttactttgaagctcctaatttcttttctctgttaaattgtgcaggttaggagagggtatctgcctaaagattttgttgttccaaagtctccagaaagaatattgttttgtggttggcgccgtgatatagaagatatgataatggtacttgatgctttccttgcgccaggatcagagttgtggatgtttaatgacgtccctgaggttgacagagaaagaaagctaattgatggaggtttggacttcagtcgcctcgataatattactttggtgcatcgtgagggaaatgctgttattcgccgtcacttggagagccttcctttagaatcattcgattctatcctgattttggcagatgaatctgtagaagattcagcaatccaagctgactcaaggtcacttgcaactttgctgctgataagagatattcaggcaaaacgtcttccatgcaaggaatcattgatttcacatgttccccgagggaccttttctgaaggttcttggataggggagatgcaacaagcatctgataaatctgtcataatcagtgaaattttggaccccaggacaaaaaatttgttgtcagtgtcaaaaattagtgactacgttctttcaaatgaattagtgagcatggcattggcaatggtcgcagaagatcggcagataaataatgtcttggaggagctcttcgctgaacaaggaaatgaaatgcaaatacgaccttctgatatgtaccttagagaagaagaggaattaaatttctttgaggtcattctgcgagctaggcagaggaaagagattgtcattgggtaccgtcttgaggcagctgagcgtgccataatcaatccaatagacaaagtttcaaggcgaaggtggtcacccaaggatgtttttgttgttatatccgagaaagaatgaggtttatcagatcacagttgacacaaaagcaagctcctgaccagtgaccacacctaatgaagaacaggcagctgcgccgcagcacacacacacacaccgaccagcgcagagagctatttgattcagatgcgcatttggctgattcagatgcgcatttggcagaaggcaatcgctgagcgcgaaggagtaaaagcatgatcagatattcagatcttggatcagtctagactgacaccttaggtcgccctttacaaatatgacttaaaaaggatgtgaacagagtagtacagcacatgctttggaagtttggatattcttgtccgtgtaacttcccacatgaacaacgagcaaagcatcgcctgcatgcatcaattaatggcttaaagctattgagtgctgatactgagcagttttccagtgagcctgttacaccctcccatagagcgtagacgacagcgatagttcagcattctgtacattgcataggcgcattctgttgccagtccatgtaaacaacatgagatgtcggccagtccatgtaaatatgtaatctggaagatcatctgtaggtactgttgcggtgttggatcttgtgaagaatgcagagagcaatgccgaagcgtgtcaccttgcctcattgtacttgagcagatatatattatgtccaacaagtctatgcttcacaacgaatactcaaaatctttgattcataaactcaacaaaagatctgctgttgtgatttatgcacacttccatggatatcatcccaactgattctagctggggttttcatgataaaaatgtaggtgtaactccaaaatcctacttactgctgggccccaagaattcgatgcagcccagcccaaccacctcccagcttatccttctcccggtctccctcggctccgctctgccgcagccgcgggaaatggtcgcgctccacctccacgccaagcaacccacgcctcgtctcctccccgttccaccgagccatgcccgtacccgtacgcccacggcggcggcggtcaacgtgagccacgctgcgcctccgcccgacgtcgtcctcgactgcaaacggctggacgggctgatgaagtccgggaggctgggggacgccctggacctgttcgatcggatgcctcgcaagaacgtcgtcgcgtggaccacggccatctccgggtgcacgcggaacgggcgccccgaggcggctgcgaccatgttcgcggacatgctggagtccggcgtcgcgcccaacgacttcgcgtgcaacgcggcgctggcggcgtgcgcggccgctggcgcgctcggcctcggcgagcaggtgcactcgctcgccgtgcgggcgggcttcgcggccgacgcctggatcggaagctgcctcatcgagctctactcgaggtgcggctccctgcgggcggccgaggaggtctttcgccggatggaggcgccggacgtcgtggggtacacctcgctcgtctcggcgctctgccggaacggagagctcgcacgggctgtggatgtgctctgccagatgacgaggcaggggttgcagccgaacgagcacacgatgacgagcatgctggcagagtgccctcgtggaattggtgagcagatacatggatatatgctcaaggtaatgggttcgcagagcgtctatgcatccactgcactgatcgacttctactcgaggtacggtgactttggcacggcgaaaacggtctttgaaaatcttgagtccaagaacgtggtgtcgtggtgctccatgatgcagctgtgcattagggatggaaggttggacgatgcgctgcgagtgttcagtgagatgatttcagagggcgtccagccaaatgaatttgcgttctcaatcgctcttagtgcctgtgggtctgtttgtctggggcgtcaaattcactgctcagccatcaagcgtgacttaatgactgacatccgagtatctaatgctttactctctatgtatggtaggagtggttttgtttcagaactcgaggctgtgcttggcaagattgaaaatcctgatcttgttagctggacagctgccatttctgcgaacttccagaatggtttcagtgagaaggctgtagcattgcttcttcagatgcattcagagggttttacaccgaatgactatgccttctctagtggtctgagttcttgtgcagacctggcattgctgcatcaaggaaggcagcttcattgcctggcactgaaactggggtgtgacttcaaagtttgtactgggaacgcactaattaacatgtattccaagtgtggtagaattggatctgcaaggcttgcatttgacgtcatggatactcatgatgtcatgtcttggaactcattgattcacggtctcgcacagcatggtgacgcaaacttggcactggagacattcagtgagatgtgctcaagcgattggcggccagacgattcaacatttctgtcagtcttggtagggtgcaatcatgcaggtctggtaaaggaaggggagacctttttcagacaaatgactgaccggtatggtctcacaccgaccccttctcactacgcatgcatgatcgacatgctgggtcgaaatggcaggttcgccgaggcgctacgcatgatcgagaatatgccattcgagcctgatgttttgatttggaagacactattagcatcatgcaagctgcacaggaatcttgacatcgggaagctcgcagcagataagctgatggagctttcagaaagagactccgcgagctacgtgctcatgtcaaacctctatgcgatgcatgaagaatggcgggatgccgagagggtgcgtcggaggatggatgaaattggggtgaagaaggatgccggttggagctggattgaggtcaagaacgaggtcaacacctttgttgcaggagacatgtctcatccagactccacatccatctatcagatgcttgcagagctccttgttgtgatgcaagatacagatttagatgttcatatgcagatttagatgtccaaaaagagaacataccacttgcagacattacatgtacagggtacaacagcacatagcgcctgattggttgctcatctgggtggagcctggtccaaacctggatgcaggctgagaccagcctatatgtgtggatgcaagtgccaagtttgcttgcatgtttggttggatgtaccaaagcagccatgatttaatgggcacatgtttggttaaacaacaccaagtcggcgaatgttttttacaagaggttgaagcggctcgatttgttcaccagaaattcagattttcgagtggaacggagggagtaactgatagcatctattcttgtccaggctcatgcttgggattgggcttggatgttgatgtgacagcggttactccgtctgaccccccctcggacgtggaaggcgctgctgatactccgtctgagaccatctcaagatttcaggggccattattattagagtacaatggaacagcgaggagggctgacgcagactcaactgttccactcaggcatgaggtggtagcctttgatgacagttccaggcagaattttggggattcatgtgactcctcattggatccattatcttctatggaatctagaagaagatcattcatggctaagataacaatggcacattcacagctccttgctgctcctgtcctccccaagcggtcaaggggtgccacaaaacatggtactgcgctacgacggagccgacgggttgcaggggcaggggtggaatttaacatgcaggatctggagaacagagccacaaaacaagtaatgcggactctgagagtcatcacagagaatgcaagcatcaaccagcaagctgttaaggattatgagaatctttttcagcatcccttaactcaaagtcatgttgaagcgttagcggctctctttggatgggagactccggggaatctcttcccgtagtgtgtttttctttctgggttgtaatttataattgttgtaatggatcctagcaaaattatatgttggaatgtgagaggtttaaattcagctgatcgtcaaaattcagtccggaatctagttctgtcctctaaagctgatgtggtctgtctccaggaaactaaaatgactgtcatttctacaagaaccattcttgcagccttgggttcggatttctgccagttctcctttctaccatcttgtggtgctagtggtggtgtgctggttgcttggaagcgacatctgggagtgactgggttgtctaggattgacagatacagcatttcaatccaattctgcaatgcgcataatcgctgttggtggttaacttgtgtttatggtcctcaaagtaacagtgataagatgttgtttcttcaagaactgagagacatcagggctgcttgcactggaccctggttgattgctggtgacttcaatctcatctacagggcttcagataaaaataattcaaatattaacagagctatgatggggagatttaggaagttggttgaggacttgagtctcaatgaggttccactttttgg

SEQ ID NO: 52063 - DNA, 3360 bp, Zea Mays
agcaacgttcccgggaattccccaaaatgcccctcgaccccgactcctcgtcgccgccgccgccacaccgcgactggttcttcccgccggcgccgccgttcctcgcctcctccaggtcccggacccccagtgcgcccttcccctccacctaccgctcctccaagccctactcagcctaccccctcgccgaccgccgaccgcctcctaccccacgctcccgctcccgctctccgcacccaccgccggagcagcagcagaagacgccgacgccgcctactcctacgtccgcgccgcgccgccgtgaccctcggtacgccggcgtccgccgcgaagatgcccgtacggctgcctccgagcaagcggcggccccgatggccgcgccagtgcacgggaggaagcccgcagcgtcggcgatcgctccacggtggtcgggggtgctctccgtggcggttattttactgtgcctggcctcccttctccgcaggaacttctctttgcacgaccaggtttaccttctgcaggagcagctggctgtagctactgcaaaacttcagtcctgcactgtagattcttcattgaatacaagcatcattaatctgttctatcaggatgctgctaacagtaccacgcagagcagaagccttaagaacctttccttgcttatctcgctttcggtattatacgcaccactcctcattctcaagtacgtggaccttgtgtcaaagataaggaggtcacgtgactctgaacaagttccaataaacaagcggttcgcatacagggtcgatatatttttgtcacttcatccgtatgctaaaccattggtcctacttgttgctacgttgttactaattgctcttggtggactggctctgtatggtgtgacggatgatagcttatctgattgtctttggctgtcctggaccttcgtcgctgactcagggaaccatgccaatgctgtgggtcttggacccaagctggtttcagtttcaattagtattggtggaatgttggtttttgctatgatgcttggtcttgtcactgattcaatctctgagaagtttgattctttgaggaaaggaagaagtgaagtcatagaacagagccacactctaattcttgggtggagtgataaattgggatctttgctgaaccaaattgccattgctaatgaaagcttgagaggtgggaccattgtagtgatggctgagagagacaaagaagaaatggaagcagatattgctaaaatggagtttgacatgaaaggaacagctgtaatatgtagaagtggaagccctttgatacttgctgatttgaaaaaggtaaatacatgcattgaaacatactttttctcagttttgaattttgatcttttgcgacccgttgtggtctattgacagttgatagggtgactgcaatgtacatgttagttagtgcttgaatagcacttcaccttttccctatatgtgcctattttcaactaataaaccttcatgcacaaggtctcagtttcaaaggcgcgggcaattgttgttttagctgaagaaggaaatgctgaccagatatgggaagacattcttggttttgagaactgtgaattctacattaaaagatggcctaaattggatggaatgcgatttgaagatgtgctgattagctttcctgaagctgttccatgtggcataaaagtggcatcttatgggggcaagattattttaaaccctgatgattgttatgttttgcaagagggtgatgaggtgatagtaattgcagaggatgatgatacatatgctccagcaccattgcccaaggttaggagagggtatctgcctaaagattttgttgttccaaagtctccagaaagaatattgttttgtggttggcgccgtgatatagaagatatgataatggtacttgatgctttccttgcgccaggatcagagttgtggatgtttaatgacgtccctgaggttgacagagaaagaaagctaattgatggaggtttggacttcagtcgcctcgataatattactttggtgcatcgtgagggaaatgctgttattcgccgtcacttggagagccttcctttagaatcattcgattctatcctgattttggcagatgaatctgtagaagattcagcaatccaagctgactcaaggtcacttgcaactttgctgctgataagagatattcaggcaaaacgtcttccatgcaaggaatcattgatttcacatgttccccgagggaccttttctgaaggttcttggataggggagatgcaacaagcatctgataaatctgtcataatcagtgaaattttggaccccaggacaaaaaatttgttgtcagtgtcaaaaattagtgactacgttctttcaaatgaattagtgagcatggcattggcaatggtcgcagaagatcggcagataaataatgtcttggaggagctcttcgctgaacaaggaaatgaaatgcaaatacgaccttctgatatgtaccttagagaagaagaggaattaaatttctttgaggtcattctgcgagctaggcagaggaaagagattgtcattgggtaccgtcttgaggcagctgagcgtgccataatcaatccaatagacaaagtttcaaggcgaaggtggtcacccaaggatgtttttgttgttatatccgagaaagaatgaggtttatcagatcacagttgacacaaaagcaagctcctgaccagtgaccacacctaatgaagaacaggcagctgcgccgcagcacacacacacacaccgaccagcgcagagagctatttgattcagatgcgcatttggctgattcagatgcgcatttggcagaaggcaatcgctgagcgcgaaggagtaaaagcatgatcagatattcagatcttggatcagtctagactgacaccttaggtcgccctttacaaatatgacttaaaaaggatgtgaacagagtagtacagcacatgctttggaagtttggatattcttgtccgtgtaacttcccacatgaacaacgagcaaagcatcgcctgcatgcatcaattaatggcttaaagctattgagtgctgatactgagcagttttccagtgagcctgttacaccctcccatagagcgtagacgacagcgatagttcagcattctgtacattgcataggcgcattctgttgccagtccatgtaaacaacatgagatgtcggccagtccatgtaaatatgtaatctggaagatcatctgtaggtactgttgcggtgttggatcttgtgaagaatgcagagagcaatgccgaagcgtgtcaccttgcctcattgtacttgagcagatatatattatgtccaacaagtcta

SEQ ID NO: 52064 - DNA, 3665 bp, Zea Mays
gtcgtctcaggctctccgcagtccccacacatcagctgccgtagcaacgttcccgggaattccccaaaatgcccctcgaccccgactcctcgtcgccgccgccgccacaccgcgactggttcttcccgccggcgccgccgttcctcgcctcctccaggtcccggacccccagtgcgcccttcccctccacctaccgctcctccaagccctactcagcctaccccctcgccgaccgccgaccgcctcctaccccacgctcccgctcccgctctccgcacccaccgccggagcagcagcagaagacgccgacgccgcctactcctacgtccgcgccgcgccgccgtgaccctcggtacgccggcgtccgccgcgaagatgcccgtacggctgcctccgagcaagcggcggccccgatggccgcgccagtgcacgggaggaagcccgcagcgtcggcgatcgctccacggtggtcgggggtgctctccgtggcggttattttactgtgcctggcctcccttctccgcaggaacttctctttgcacgaccaggtttaccttctgcaggagcagctggctgtagctactgcaaaacttcagtcctgcactgtagattcttcattgaatacaagcatcattaatctgttctatcaggatgctgctaacagtaccacgcagagcagaagccttaagaacctttccttgcttatctcgctttcggtattatacgcaccactcctcattctcaagtacgtggaccttgtgtcaaagataaggaggtcacgtgactctgaacaagttccaataaacaagcggttcgcatacagggtcgatatatttttgtcacttcatccgtatgctaaaccattggtcctacttgttgctacgttgttactaattgctcttggtggactggctctgtatggtgtgacggatgatagcttatctgattgtctttggctgtcctggaccttcgtcgctgactcagggaaccatgccaatgctgtgggtcttggacccaagctggtttcagtttcaattagtattggtggaatgttggtttttgctatgatgcttggtcttgtcactgattcaatctctgagaagtttgattctttgaggaaaggaagaagtgaagtcatagaacagagccacactctaattcttgggtggagtgataaattgggatctttgctgaaccaaattgccattgctaatgaaagcttgagaggtgggaccattgtagtgatggctgagagagacaaagaagaaatggaagcagatattgctaaaatggagtttgacatgaaaggaacagctgtaatatgtagaagtggaagccctttgatacttgctgatttgaaaaaggtaaatacatgcattgaaacatactttttctcagttttgaattttgatcttttgcgacccgttgtggtctattgacagttgatagggtgactgcaatgtacatgttagttagtgcttgaatagcacttcaccttttccctatatgtgcctattttcaactaataaaccttcatgcacaaggtctcagtttcaaaggcgcgggcaattgttgttttagctgaagaaggaaatgctgaccaggtaagtgtcgctgatcaagctatgctgttcttgaaatctgttccttacatcattgcacactttttgtagagtgatgcacgagcactgcgaacagtcctgagtttaactggagttaaagagggactaagtggtcacatagtagtggagcttagtgatcttgacaatgaagttctagtcaaacttgttggtggagatcttgtggaaacagttgtggcacatgatgtgattggacgattgatgatacagtgtgcacgtcaaccaggccttgcacagacattcttggttttgagaactgtgaattctacattaaaagatggcctaaattggatggaatgcgatttgaagatgtgctgattagctttcctgaagctgttccatgtggcataaaagtggcatcttatgggggcaagattattttaaaccctgatgattgttatgttttgcaagagggtgatgaggtgatagtaattgcagaggatgatgatacatatgctccagcaccattgcccaaggttaggagagggtatctgcctaaagattttgttgttccaaagtctccagaaagaatattgttttgtggttggcgccgtgatatagaagatatgataatggtacttgatgctttccttgcgccaggatcagagttgtggatgtttaatgacgtccctgaggttgacagagaaagaaagctaattgatggaggtttggacttcagtcgcctcgataatattactttggtgcatcgtgagggaaatgctgttattcgccgtcacttggagagccttcctttagaatcattcgattctatcctgattttggcagatgaatctgtagaagattcagcaatccaagctgactcaaggtcacttgcaactttgctgctgataagagatattcaggcaaaacgtcttccatgcaaggaatcattgatttcacatgttccccgagggaccttttctgaaggttcttggataggggagatgcaacaagcatctgataaatctgtcataatcagtgaaattttggaccccaggacaaaaaatttgttgtcagtgtcaaaaattagtgactacgttctttcaaatgaattagtgagcatggcattggcaatggtcgcagaagatcggcagataaataatgtcttggaggagctcttcgctgaacaaggaaatgaaatgcaaatacgaccttctgatatgtaccttagagaagaagaggaattaaatttctttgaggtcattctgcgagctaggcagaggaaagagattgtcattgggtaccgtcttgaggcagctgagcgtgccataatcaatccaatagacaaagtttcaaggcgaaggtggtcacccaaggatgtttttgttgttatatccgagaaagaatgaggtttatcagatcacagttgacacaaaagcaagctcctgaccagtgaccacacctaatgaagaacaggcagctgcgccgcagcacacacacacacaccgaccagcgcagagagctatttgattcagatgcgcatttggctgattcagatgcgcatttggcagaaggcaatcgctgagcgcgaaggagtaaaagcatgatcagatattcagatcttggatcagtctagactgacaccttaggtcgccctttacaaatatgacttaaaaaggatgtgaacagagtagtacagcacatgctttggaagtttggatattcttgtccgtgtaacttcccacatgaacaacgagcaaagcatcgcctgcatgcatcaattaatggcttaaagctattgagtgctgatactgagcagttttccagtgagcctgttacaccctcccatagagcgtagacgacagcgatagttcagcattctgtacattgcataggcgcattctgttgccagtccatgtaaacaacatgagatgtcggccagtccatgtaaatatgtaatctggaagatcatctgtaggtactgttgcggtgttggatcttgtgaagaatgcagagagcaatgccgaagcgtgtcaccttgcctcattgtacttgagcagatatatattatgtccaacaagtcta

SEQ ID NO: 52065 - DNA, 3539 bp, Zea Mays
gtcgtctcaggctctccgcagtccccacacatcagctgccgtagcaacgttcccgggaattccccaaaatgcccctcgaccccgactcctcgtcgccgccgccgccacaccgcgactggttcttcccgccggcgccgccgttcctcgcctcctccaggtcccggacccccagtgcgcccttcccctccacctaccgctcctccaagccctactcagcctaccccctcgccgaccgccgaccgcctcctaccccacgctcccgctcccgctctccgcacccaccgccggagcagcagcagaagacgccgacgccgcctactcctacgtccgcgccgcgccgccgtgaccctcggtacgccggcgtccgccgcgaagatgcccgtacggctgcctccgagcaagcggcggccccgatggccgcgccagtgcacgggaggaagcccgcagcgtcggcgatcgctccacggtggtcgggggtgctctccgtggcggttattttactgtgcctggcctcccttctccgcaggaacttctctttgcacgaccaggtttaccttctgcaggagcagctggctgtagctactgcaaaacttcagtcctgcactgtagattcttcattgaatacaagcatcattaatctgttctatcaggatgctgctaacagtaccacgcagagcagaagccttaagaacctttccttgcttatctcgctttcggtattatacgcaccactcctcattctcaagtacgtggaccttgtgtcaaagataaggaggtcacgtgactctgaacaagttccaataaacaagcggttcgcatacagggtcgatatatttttgtcacttcatccgtatgctaaaccattggtcctacttgttgctacgttgttactaattgctcttggtggactggctctgtatggtgtgacggatgatagcttatctgattgtctttggctgtcctggaccttcgtcgctgactcagggaaccatgccaatgctgtgggtcttggacccaagctggtttcagtttcaattagtattggtggaatgttggtttttgctatgatgcttggtcttgtcactgattcaatctctgagaagtttgattctttgaggaaaggaagaagtgaagtcatagaacagagccacactctaattcttgggtggagtgataaattgcttgagaggtgggaccattgtagtgatggctgagagagacaaagaagaaatggaagcagatattgctaaaatggagtttgacatgaaaggaacagctgtaatatgtagaagtggaagccctttgatacttgctgatttgaaaaaggtctcagtttcaaaggcgcgggcaattgttgttttagctgaagaaggaaatgctgaccagagtgatgcacgagcactgcgaacagtcctgagtttaactggagttaaagagggactaagtggtcacatagtagtggagcttagtgatcttgacaatgaagttctagtcaaacttgttggtggagatcttgtggaaacagttgtggcacatgatgtgattggacgattgatgatacagtgtgcacgtcaaccaggccttgcacagatatgggaagacattcttggttttgagaactgtgaattctacattaaaagatggcctaaattggatggaatgcgatttgaagatgtgctgattagctttcctgaagctgttccatgtggcataaaagtggcatcttatgggggcaagattattttaaaccctgatgattgttatgttttgcaagagggtgatgaggtgatagtaattgcagaggatgatgatacatatgctccagcaccattgcccaaggttaaagaggctgtttacatagacattgttcatcctgaaagaaagcctcagaagattcttctttgtggatggcgacgggatatagatgatatgattgcggtaagttcttactttgaagctcctaatttcttttctctgttaaattgtgcaggttaggagagggtatctgcctaaagattttgttgttccaaagtctccagaaagaatattgttttgtggttggcgccgtgatatagaagatatgataatggtacttgatgctttccttgcgccaggatcagagttgtggatgtttaatgacgtccctgaggttgacagagaaagaaagctaattgatggaggtttggacttcagtcgcctcgataatattactttggtgcatcgtgagggaaatgctgttattcgccgtcacttggagagccttcctttagaatcattcgattctatcctgattttggcagatgaatctgtagaagattcagcaatccaagctgactcaaggtcacttgcaactttgctgctgataagagatattcaggcaaaacgtcttccatgcaaggaatcattgatttcacatgttccccgagggaccttttctgaaggttcttggataggggagatgcaacaagcatctgataaatctgtcataatcagtgaaattttggaccccaggacaaaaaatttgttgtcagtgtcaaaaattagtgactacgttctttcaaatgaattagtgagcatggcattggcaatggtcgcagaagatcggcagataaataatgtcttggaggagctcttcgctgaacaaggaaatgaaatgcaaatacgaccttctgatatgtaccttagagaagaagaggaattaaatttctttgaggtcattctgcgagctaggcagaggaaagagattgtcattgggtaccgtcttgaggcagctgagcgtgccataatcaatccaatagacaaagtttcaaggcgaaggtggtcacccaaggatgtttttgttgttatatccgagaaagaatgaggtttatcagatcacagttgacacaaaagcaagctcctgaccagtgaccacacctaatgaagaacaggcagctgcgccgcagcacacacacacacaccgaccagcgcagagagctatttgattcagatgcgcatttggctgattcagatgcgcatttggcagaaggcaatcgctgagcgcgaaggagtaaaagcatgatcagatattcagatcttggatcagtctagactgacaccttaggtcgccctttacaaatatgacttaaaaaggatgtgaacagagtagtacagcacatgctttggaagtttggatattcttgtccgtgtaacttcccacatgaacaacgagcaaagcatcgcctgcatgcatcaattaatggcttaaagctattgagtgctgatactgagcagttttccagtgagcctgttacaccctcccatagagcgtagacgacagcgatagttcagcattctgtacattgcataggcgcattctgttgccagtccatgtaaacaacatgagatgtcggccagtccatgtaaatatgtaatctggaagatcatctgtaggtactgttgcggtgttggatcttgtgaagaatgcagagagcaatgccgaagcgtgtcaccttgcctcattgtacttgagcagatatatattatgtccaacaagtcta

SEQ ID NO: 52066 - DNA, 3433 bp, Zea Mays
cagacattcccctcgtcgtctcaggctctccgcagtccccacacatcagctgccgtagcaacgttcccgggaattccccaaaatgcccctcgaccccgactcctcgtcgccgccgccgccacaccgcgactggttcttcccgccggcgccgccgttcctcgcctcctccaggtcccggacccccagtgcgcccttcccctccacctaccgctcctccaagccctactcagcctaccccctcgccgaccgccgaccgcctcctaccccacgctcccgctcccgctctccgcacccaccgccggagcagcagcagaagacgccgacgccgcctactcctacgtccgcgccgcgccgccgtgaccctcggtacgccggcgtccgccgcgaagatgcccgtacggctgcctccgagcaagcggcggccccgatggccgcgccagtgcacgggaggaagcccgcagcgtcggcgatcgctccacggtggtcgggggtgctctccgtggcggttattttactgtgcctggcctcccttctccgcaggaacttctctttgcacgaccaggtttaccttctgcaggagcagctggctgtagctactgcaaaacttcagtcctgcactgtagattcttcattgaatacaagcatcattaatctgttctatcaggatgctgctaacagtaccacgcagagcagaagccttaagaacctttccttgcttatctcgctttcggtattatacgcaccactcctcattctcaagtacgtggaccttgtgtcaaagataaggaggtcacgtgactctgaacaagttccaataaacaagcggttcgcatacagggtcgatatatttttgtcacttcatccgtatgctaaaccattggtcctacttgttgctacgttgttactaattgctcttggtggactggctctgtatggtgtgacggatgatagcttatctgattgtctttggctgtcctggaccttcgtcgctgactcagggaaccatgccaatgctgtgggtcttggacccaagctggtttcagtttcaattagtattggtggaatgttggtttttgctatgatgcttggtcttgtcactgattcaatctctgagaagtttgattctttgaggaaaggaagaagtgaagtcatagaacagagccacactctaattcttgggtggagtgataaattgggatctttgctgaaccaaattgccattgctaatgaaagcttgagaggtgggaccattgtagtgatggctgagagagacaaagaagaaatggaagcagatattgctaaaatggagtttgacatgaaaggaacagctgtaatatgtagaagtggaagccctttgatacttgctgatttgaaaaagtttcaaaggcgcgggcaattgttgttttagctgaagaaggaaatgctgaccagagtgatgcacgagcactgcgaacagtcctgagtttaactggagttaaagagggactaagtggtcacatagtagtggagcttagtgatcttgacaatgaagttctagtcaaacttgttggtggagatcttgtggaaacagttgtggcacatgatgtgattggacgattgatgatacagtgtgcacgtcaaccaggccttgcacagatatgggaagacattcttggttttgagaactgtgaattctacattaaaagatggcctaaattggatggaatgcgatttgaagatgtgctgattagctttcctgaagctgttccatgtggcataaaagtggcatcttatgggggcaagattattttaaaccctgatgattgttatgttttgcaagagggtgatgaggtgatagtaattgcagaggatgatgatacatatgctccagcaccattgcccaaggttaaagaggctgtttacatagacattgttcatcctgaaagaaagcctcagaagattcttctttgtggatggcgacgggatatagatgatatgattgcggtacttgatgctttccttgcgccaggatcagagttgtggatgtttaatgacgtccctgaggttgacagagaaagaaagctaattgatggaggtttggacttcagtcgcctcgataatattactttggtgcatcgtgagggaaatgctgttattcgccgtcacttggagagccttcctttagaatcattcgattctatcctgattttggcagatgaatctgtagaagattcagcaatccaagctgactcaaggtcacttgcaactttgctgctgataagagatattcaggcaaaacgtcttccatgcaaggaatcattgatttcacatgttccccgagggaccttttctgaaggttcttggataggggagatgcaacaagcatctgataaatctgtcataatcagtgaaattttggaccccaggacaaaaaatttgttgtcagtgtcaaaaattagtgactacgttctttcaaatgaattagtgagcatggcattggcaatggtcgcagaagatcggcagataaataatgtcttggaggagctcttcgctgaacaaggaaatgaaatgcaaatacgaccttctgatatgtaccttagagaagaagaggaattaaatttctttgaggtcattctgcgagctaggcagaggaaagagattgtcattgggtaccgtcttgaggcagctgagcgtgccataatcaatccaatagacaaagtttcaaggcgaaggtggtcacccaaggatgtttttgttgttatatccgagaaagaatgaggtttatcagatcacagttgacacaaaagcaagctcctgaccagtgaccacacctaatgaagaacaggcagctgcgccgcagcacacacacacacaccgaccagcgcagagagctatttgattcagatgcgcatttggctgattcagatgcgcatttggcagaaggcaatcgctgagcgcgaaggagtaaaagcatgatcagatattcagatcttggatcagtctagactgacaccttaggtcgccctttacaaatatgacttaaaaaggatgtgaacagagtagtacagcacatgctttggaagtttggatattcttgtccgtgtaacttcccacatgaacaacgagcaaagcatcgcctgcatgcatcaattaatggcttaaagctattgagtgctgatactgagcagttttccagtgagcctgttacaccctcccatagagcgtagacgacagcgatagttcagcattctgtacattgcataggcgcattctgttgccagtccatgtaaacaacatgagatgtcggccagtccatgtaaatatgtaatctggaagatcatctgtaggtactgttgcggtgttggatcttgtgaagaatgcagagagcaatgccgaagcgtgtcaccttgcctcattgtacttgagcagatatatattatgtccaacaagtcta

SEQ ID NO: 52067 - DNA, 3387 bp, Zea Mays
cagacattcccctcgtcgtctcaggctctccgcagtccccacacatcagctgccgtagcaacgttcccgggaattccccaaaatgcccctcgaccccgactcctcgtcgccgccgccgccacaccgcgactggttcttcccgccggcgccgccgttcctcgcctcctccaggtcccggacccccagtgcgcccttcccctccacctaccgctcctccaagccctactcagcctaccccctcgccgaccgccgaccgcctcctaccccacgctcccgctcccgctctccgcacccaccgccggagcagcagcagaagacgccgacgccgcctactcctacgtccgcgccgcgccgccgtgaccctcggtacgccggcgtccgccgcgaagatgcccgtacggctgcctccgagcaagcggcggccccgatggccgcgccagtgcacgggaggaagcccgcagcgtcggcgatcgctccacggtggtcgggggtgctctccgtggcggttattttactgtgcctggcctcccttctccgcaggaacttctctttgcacgaccaggtttaccttctgcaggagcagctggctgtagctactgcaaaacttcagtcctgcactgtagattcttcattgaatacaagcatcattaatctgttctatcaggatgctgctaacagtaccacgcagagcagaagccttaagaacctttccttgcttatctcgctttcggtattatacgcaccactcctcattctcaagtacgtggaccttgtgtcaaagataaggaggtcacgtgactctgaacaagttccaataaacaagcggttcgcatacagggtcgatatatttttgtcacttcatccgtatgctaaaccattggtcctacttgttgctacgttgttactaattgctcttggtggactggctctgtatggtgtgacggatgatagcttatctgattgtctttggctgtcctggaccttcgtcgctgactcagggaaccatgccaatgctgtgggtcttggacccaagctggtttcagtttcaattagtattggtggaatgttggtttttgctatgatgcttggtcttgtcactgattcaatctctgagaagtttgattctttgaggaaaggaagaagtgaagtcatagaacagagccacactctaattcttgggtggagtgataaattgggatctttgctgaaccaaattgccattgctaatgaaagcttgagaggtgggaccattgtagtgatggctgagagagacaaagaagaaatggaagcagatattgctaaaatggagtttgacatgaaaggaacagctgtaatatgtagaagtggaagccctttgatacttgctgatttgaaaaaggtctcagtttcaaaggcgcgggcaattgttgttttagctgaagaaggaaatgctgaccagatatgggaagacattcttggttttgagaactgtgaattctacattaaaagatggcctaaattggatggaatgcgatttgaagatgtgctgattagctttcctgaagctgttccatgtggcataaaagtggcatcttatgggggcaagattattttaaaccctgatgattgttatgttttgcaagagggtgatgaggtgatagtaattgcagaggatgatgatacatatgctccagcaccattgcccaaggttaaagaggctgtttacatagacattgttcatcctgaaagaaagcctcagaagattcttctttgtggatggcgacgggatatagatgatatgattgcggtaagttcttactttgaagctcctaatttcttttctctgttaaattgtgcaggttaggagagggtatctgcctaaagattttgttgttccaaagtctccagaaagaatattgttttgtggttggcgccgtgatatagaagatatgataatggtacttgatgctttccttgcgccaggatcagagttgtggatgtttaatgacgtccctgaggttgacagagaaagaaagctaattgatggaggtttggacttcagtcgcctcgataatattactttggtgcatcgtgagggaaatgctgttattcgccgtcacttggagagccttcctttagaatcattcgattctatcctgattttggcagatgaatctgtagaagattcagcaatccaagctgactcaaggtcacttgcaactttgctgctgataagagatattcaggcaaaacgtcttccatgcaaggaatcattgatttcacatgttccccgagggaccttttctgaaggttcttggataggggagatgcaacaagcatctgataaatctgtcataatcagtgaaattttggaccccaggacaaaaaatttgttgtcagtgtcaaaaattagtgactacgttctttcaaatgaattagtgagcatggcattggcaatggtcgcagaagatcggcagataaataatgtcttggaggagctcttcgctgaacaaggaaatgaaatgcaaatacgaccttctgatatgtaccttagagaagaagaggaattaaatttctttgaggtcattctgcgagctaggcagaggaaagagattgtcattgggtaccgtcttgaggcagctgagcgtgccataatcaatccaatagacaaagtttcaaggcgaaggtggtcacccaaggatgtttttgttgttatatccgagaaagaatgaggtttatcagatcacagttgacacaaaagcaagctcctgaccagtgaccacacctaatgaagaacaggcagctgcgccgcagcacacacacacacaccgaccagcgcagagagctatttgattcagatgcgcatttggctgattcagatgcgcatttggcagaaggcaatcgctgagcgcgaaggagtaaaagcatgatcagatattcagatcttggatcagtctagactgacaccttaggtcgccctttacaaatatgacttaaaaaggatgtgaacagagtagtacagcacatgctttggaagtttggatattcttgtccgtgtaacttcccacatgaacaacgagcaaagcatcgcctgcatgcatcaattaatggcttaaagctattgagtgctgatactgagcagttttccagtgagcctgttacaccctcccatagagcgtagacgacagcgatagttcagcattctgtacattgcataggcgcattctgttgccagtccatgtaaacaacatgagatgtcggccagtccatgtaaatatgtaatctggaagatcatctgtaggtactgttgcggtgttggatcttgtgaagaatgcagagagcaatgccgaagcgtgtcaccttgcctcattgtacttgagcagatatatattatgtccaacaagtcta

SEQ ID NO: 52068 - DNA, 2659 bp, Zea Mays
cgcggcctttcaggcactccctggcggcggcccctagccagcctctcgcgcgtgcgcagccggcaccctgtggctcactcagcagctgcgcgcggcaggccagcagtggtagtggacagcggcagcggctgtgctcggcggcccctgtgttgatgtgcgctgctcagctgctgtgcccagcggccgacacctctgcggctctcctttgctcgacgtcgagcgagggagaaattccagcaatgcttgtcgtgcaactgccgccacctgaggtagcgggtgaggatgagagcaatagccgtggtgtcttcgtggagttcatgaccaaggtcgctcagttcaatgagcttgttgaatctggggagcgattgcttgggagatttcgtgaggagcttggttagtttttgttgacacgtctgatttgccatggaggttcagtttatattatccactgggaagccattttgtgatgagtattttcgtaggccgcagatttctaaggaagcagatgtaatgaatcagatacttaaatcaaactgcactgtcagaatgaggtcctatattgaaactggctgcagggtccactgccaaaacatctcaaacattaatcagctgagctcatgcgaaaatggacttaaagatcatataaagaaagttaagaccttgcttgaagagcttgaatgtctggttgagaatgtctatggcatcacactaacagccagtttaagtgctctggaagtttcagacagtcagtgccttgacagcatgctaagtaccgatcgctgctccgtggagcaggaggacagaagtgcagatcggttggacagggatgtgtcgtttgctacagtaatggtcatggttcgcaacgcgctgaaggctgactacacgatgcaggaaaagattgtctgtgcattgtccttgaaaacaccatcatcagagctcgagggatactgcctcatgtggaatttacgcccgtacatcgatgacgatgtgatgcgtcttgcgtggaaaatgtgtccttagtaggcgcaaggttcgtcattctagcaacaagtaccagaagccggtacggattaaagccaagcttgtttaagctgtttgtcttcaaaaactcacagcagttcacgattacccaaaacattgtttgtattgtacatttcactgtttgcatatgtatacactatattaaagccccctcaaattttcttagatcaaaccaccgtcctctcttccctcgtacccatgtgtcagggatcaaaagagataatggagccagtcaccggcaacgacgtaagaatgtgctaaatgggcttagatgggctatgtaatacattacctgggttcggcctgtatagaacgatatatgtgtgtctcaaactgaggaagacatggtaaaacacataacagaaacgctacttctctgcctcgtctccttcctcgctgccttccttacctcttctccacgaaatctgccattgctgctcgtttctcttctgcagcctcgctaggcatcgctaacaccatgcctccctctctctccctttttccctcgactgcatgtgaaaccttagcctcctcctcaaactactgcgtggagcttcctctccaacttcgcgaacgatgtgttcgctgtgacctctggcaaccactaatatacaaacagtcattaggtgtcgcaaccctttaggtgccgcaaccctttcgtatggaggaggtggcggcccgcgcgggcccggcgtgtccccgacaacacccctcaaggacgccacgcgcgcgccatgatagcacaacgctggcgcccacccagtcctcgcgtccgcttgtctactttcgtatccttgtataaccacgacaccggcccgccagcaaccggcaagcaaaatcaaagtgagccagcccagccatggagaaggcgatcgatcgacagtggcccatccgccacctcagcttgtggtgagcgtcccgatctactgttctattcatccattcattctcaaggattggatcagctcggattggattgggttgggttggctgatcgattccgtgttgggtctgcgtgacagtgcaggcattagtgtgcgcgccgcccctatgctatgagccacatcccaattttttgttagcatctgcaatgataaaattgtgttgcacactttgcttctagcaatttttatgcactacacaaaagcgatttattctagattaaacagaatgaatgtacgatttcgatatatgattccacaatatagttggacttgtattttagtatactatgtactaaataagttccttgtatgatcatcgttctttatgcattttcaaacaaaatttatgatatttattgcattttacgctactactagaaagctcaggctaatccctggcacatgtggctaaatttataacatttttatgtgtttaacggcaacctcgtgtgaagcgagatacacgacaactacctcaatttgaacgtgtcttttacgctttttgtgttgttttttaatgcaaccttgtataaaacgagatacacgacaactaccccaaatcgcccgcgtgatttatgatgtttcgtgactgtcataaaaaatcatcttgttcaccattgtaacaacgatgacaatatatcgccataatttacgctagaaaatgaggattttac

SEQ ID NO: 52069 - DNA, 2729 bp, Zea Mays
cgcggcctttcaggcactccctggcggcggcccctagccagcctctcgcgcgtgcgcagccggcaccctgtggctcactcagcagctgcgcgcggcaggccagcagtggtagtggacagcggcagcggctgtgctcggcggcccctgtgttgatgtgcgctgctcagctgctgtgcccagcggccgacacctctgcggctctcctttgctcgacgtcgagcgagggagaaattccagcaatgcttgtcgtgcaactgccgccacctgaggtagcgggtgaggatgagagcaatagccgtggtgtcttcgtggagttcatgaccaaggtcgctcagttcaatgagcttgttgaatctggggagcgattgcttgggagatttcgtgaggagcttggttagtttttgttgacacgtctgatttgccatggaggttcagtttatattatccactgggaagccattttgtgatgagtattttcgtaggccgcagatttctaaggaagcagatgtaatgaatcagatacttaaatcaaactgcactgtcagaatgaggtcctatattgaaactggctgcagggtccactgccaaaacatctcaaacattaatcagctgagctcatgcgaaaatggacttaaagatcatataaagaaagttaagaccttgcttgaagagcttgaatgtctggttgagaatgtctatggcatcacactaacagccagtttaagtgctctggaagtttcagacagtcagtgccttgacagcatgctaagtaccgatcgctgctccgtggaggaggacagaagtgcagatcggttggacagggatgtgtcgtttgctacagtaatggtcatggttcgcaacgcgctgaaggctgactacacgatgcaggtaaattgaagtgccaggatgtgcatttgctttttgcgctttacattttgcctttctcttatcttgcctacaggaaaagattgtctgtgcattgtccttgaaaacaccatcatcagagctcgagggatactgcctcatgtggaatttacgcccgtacatcgatgacgatgtgatgcgtcttgcgtggaaaatgtgtccttagtaggcgcaaggttcgtcattctagcaacaagtaccagaagccggtacggattaaagccaagcttgtttaagctgtttgtcttcaaaaactcacagcagttcacgattacccaaaacattgtttgtattgtacatttcactgtttgcatatgtatacactatattaaagccccctcaaattttcttagatcaaaccaccgtcctctcttccctcgtacccatgtgtcagggatcaaaagagataatggagccagtcaccggcaacgacgtaagaatgtgctaaatgggcttagatgggctatgtaatacattacctgggttcggcctgtatagaacgatatatgtgtgtctcaaactgaggaagacatggtaaaacacataacagaaacgctacttctctgcctcgtctccttcctcgctgccttccttacctcttctccacgaaatctgccattgctgctcgtttctcttctgcagcctcgctaggcatcgctaacaccatgcctccctctctctccctttttccctcgactgcatgtgaaaccttagcctcctcctcaaactactgcgtggagcttcctctccaacttcgcgaacgatgtgttcgctgtgacctctggcaaccactaatatacaaacagtcattaggtgtcgcaaccctttaggtgccgcaaccctttcgtatggaggaggtggcggcccgcgcgggcccggcgtgtccccgacaacacccctcaaggacgccacgcgcgcgccatgatagcacaacgctggcgcccacccagtcctcgcgtccgcttgtctactttcgtatccttgtataaccacgacaccggcccgccagcaaccggcaagcaaaatcaaagtgagccagcccagccatggagaaggcgatcgatcgacagtggcccatccgccacctcagcttgtggtgagcgtcccgatctactgttctattcatccattcattctcaaggattggatcagctcggattggattgggttgggttggctgatcgattccgtgttgggtctgcgtgacagtgcaggcattagtgtgcgcgccgcccctatgctatgagccacatcccaattttttgttagcatctgcaatgataaaattgtgttgcacactttgcttctagcaatttttatgcactacacaaaagcgatttattctagattaaacagaatgaatgtacgatttcgatatatgattccacaatatagttggacttgtattttagtatactatgtactaaataagttccttgtatgatcatcgttctttatgcattttcaaacaaaatttatgatatttattgcattttacgctactactagaaagctcaggctaatccctggcacatgtggctaaatttataacatttttatgtgtttaacggcaacctcgtgtgaagcgagatacacgacaactacctcaatttgaacgtgtcttttacgctttttgtgttgttttttaatgcaaccttgtataaaacgagatacacgacaactaccccaaatcgcccgcgtgatttatgatgtttcgtgactgtcataaaaaatcatcttgttcaccattgtaacaacgatgacaatatatcgccataatttacgctagaaaatgaggattttac

SEQ ID NO: 52070 - DNA, 2605 bp, Zea Mays
cattgcctcaatcggcccatcacgcggcctttcaggcactccctggcggcggcccctagccagcctctcgcgcgtgcgcagccggcaccctgtggctcactcagcagctgcgcgcggcaggccagcagtggtagtggacagcggcagcggctgtgctcggcggcccctgtgttgatgtgcgctgctcagctgctgtgcccagcggccgacacctctgcggctctcctttgctcgacgtcgagcgagggagaaattccagcaatgcttgtcgtgcaactgccgccacctgaggtagcgggtgaggatgagagcaatagccgtggtgtcttcgtggagttcatgaccaaggtcgctcagttcaatgagcttgttgaatctggggagcgattgcttgggagatttcgtgaggagcttgagtattttcgtaggccgcagatttctaaggaagcagatgtaatgaatcagatacttaaatcaaactgcactgtcagaatgaggtcctatattgaaactggctgcagggtccactgccaaaacatctcaaacattaatcagctgagctcatgcgaaaatggacttaaagatcatataaagaaagttaagaccttgcttgaagagcttgaatgtctggttgagaatgtctatggcatcacactaacagccagtttaagtgctctggaagtttcagacagtcagtgccttgacagcatgctaagtaccgatcgctgctccgtggagcaggaggacagaagtgcagatcggttggacagggatgtgtcgtttgctacagtaatggtcatggttcgcaacgcgctgaaggctgactacacgatgcaggaaaagattgtctgtgcattgtccttgaaaacaccatcatcagagctcgagggatactgcctcatgtggaatttacgcccgtacatcgatgacgatgtgatgcgtcttgcgtggaaaatgtgtccttagtaggcgcaaggttcgtcattctagcaacaagtaccagaagccggtacggattaaagccaagcttgtttaagctgtttgtcttcaaaaactcacagcagttcacgattacccaaaacattgtttgtattgtacatttcactgtttgcatatgtatacactatattaaagccccctcaaattttcttagatcaaaccaccgtcctctcttccctcgtacccatgtgtcagggatcaaaagagataatggagccagtcaccggcaacgacgtaagaatgtgctaaatgggcttagatgggctatgtaatacattacctgggttcggcctgtatagaacgatatatgtgtgtctcaaactgaggaagacatggtaaaacacataacagaaacgctacttctctgcctcgtctccttcctcgctgccttccttacctcttctccacgaaatctgccattgctgctcgtttctcttctgcagcctcgctaggcatcgctaacaccatgcctccctctctctccctttttccctcgactgcatgtgaaaccttagcctcctcctcaaactactgcgtggagcttcctctccaacttcgcgaacgatgtgttcgctgtgacctctggcaaccactaatatacaaacagtcattaggtgtcgcaaccctttaggtgccgcaaccctttcgtatggaggaggtggcggcccgcgcgggcccggcgtgtccccgacaacacccctcaaggacgccacgcgcgcgccatgatagcacaacgctggcgcccacccagtcctcgcgtccgcttgtctactttcgtatccttgtataaccacgacaccggcccgccagcaaccggcaagcaaaatcaaagtgagccagcccagccatggagaaggcgatcgatcgacagtggcccatccgccacctcagcttgtggtgagcgtcccgatctactgttctattcatccattcattctcaaggattggatcagctcggattggattgggttgggttggctgatcgattccgtgttgggtctgcgtgacagtgcaggcattagtgtgcgcgccgcccctatgctatgagccacatcccaattttttgttagcatctgcaatgataaaattgtgttgcacactttgcttctagcaatttttatgcactacacaaaagcgatttattctagattaaacagaatgaatgtacgatttcgatatatgattccacaatatagttggacttgtattttagtatactatgtactaaataagttccttgtatgatcatcgttctttatgcattttcaaacaaaatttatgatatttattgcattttacgctactactagaaagctcaggctaatccctggcacatgtggctaaatttataacatttttatgtgtttaacggcaacctcgtgtgaagcgagatacacgacaactacctcaatttgaacgtgtcttttacgctttttgtgttgttttttaatgcaaccttgtataaaacgagatacacgacaactaccccaaatcgcccgcgtgatttatgatgtttcgtgactgtcataaaaaatcatcttgttcaccattgtaacaacgatgacaatatatcgccataatttacgctagaaaatgaggattttac

SEQ ID NO: 52071 - DNA, 2559 bp, Zea Mays
cacggacgagttccatccgagccctcgtcgaagcgtcgatgcaaacttgagttattggtctggaccggattgagccaaggccattgcctcaatcggcccatcacgcggcctttcaggcactccctggcggcggcccctagccagcctctcgcgcgtgcgcagccggcaccctgtggctcactcagcagctgcgcgcggcaggccagcagtggtagtggacagcggcagcggctgtgctcggcggcccctgtgttgatgtgcgctgctcagctgctgtgcccagcggccgacacctctgcggctctcctttgctcgacgtcgagcgagggagaaattccagcaatgcttgtcgtgcaactgccgccacctgaggtagcgggtgaggatgagagcaatagccgtggtgtcttcgtggagttcatgaccaaggtcgctcagttcaatgagcttgttgaatctggggagcgattgcttgggagatttcgtgaggagcttgagtattttcgtaggccgcagatttctaaggaagcagatgtaatgaatcagatacttaaatcaaactgcactgtcagaatgaggtcctatattgaaactggctgcagggtccactgccaaaacatctcaaacattaatcagctgagctcatgcgaaaatggacttaaagatcatataaagaaagttaagaccttgcttgaagagcttgaatgtctggttgagaatgtctatggcatcacactaacagccagtttaagtgctctggaagtttcagacagtcagtgccttgacagcatgctaagtaccgatcgctgctccgtggagggtgtttgtacacagcaggaggacagaagtgcagatcggttggacagggatgtgtcgtttgctacagtaatggtcatggttcgcaacgcgctgaaggctgactacacgatgcaggaaaagattgtctgtgcattgtccttgaaaacaccatcatcagagctcgagggatactgcctcatgtggaatttacgcccgtacatcgatgacgatgtgatgcgtcttgcgtggaaaatgtgtccttagtaggcgcaaggttcgtcattctagcaacaagtaccagaagccgatcaaaccaccgtcctctcttccctcgtacccatgtgtcagggatcaaaagagataatggagccagtcagcccggcaacgacgtaagaatgtgctaaatgggcttagatgggctatgtaatacattacctgggttcggcctgtatagaacgatatatgtgtgtctcaaactgaggaagacatggtaaaacacataacagaaacgctacttctctgcctcgtctccttcctcgctgccttccttacctcttctccacgaaatctgccattgctgctcgtttctcttctgcagcctcgctaggcatcgctaacaccatgcctccctctctctccctttttccctcgactgcatgtgaaaccttagcctcctcctcaaactactgcgtggagcttcctctccaacttcgcgaacgatgtgttcgctgtgacctctggcaaccactaatatacaaacagtcattaggtgtcgcaaccctttaggtgccgcaaccctttcgtatggaggaggtggcggcccgcgcgggcccggcgtgtccccgacaacacccctcaaggacgccacgcgcgcgccatgatagcacaacgctggcgcccacccagtcctcgcgtccgcttgtctactttcgtatccttgtataaccacgacaccggcccgccagcaaccggcaagcaaaatcaaagtgagccagcccagccatggagaaggcgatcgatcgacagtggcccatccgccacctcagcttgtggtgagcgtcccgatctactgttctattcatccattcattctcaaggattggatcagctcggattggattgggttgggttggctgatcgattccgtgttgggtctgcgtgacagtgcaggcattagtgtgcgcgccgcccctatgctatgagccacatcccaattttttgttagcatctgcaatgataaaattgtgttgcacactttgcttctagcaatttttatgcactacacaaaagcgatttattctagattaaacagaatgaatgtacgatttcgatatatgattccacaatatagttggacttgtattttagtatactatgtactaaataagttccttgtatgatcatcgttctttatgcattttcaaacaaaatttatgatatttattgcattttacgctactactagaaagctcaggctaatccctggcacatgtggctaaatttataacatttttatgtgtttaacggcaacctcgtgtgaagcgagatacacgacaactacctcaatttgaacgtgtcttttacgctttttgtgttgttttttaatgcaaccttgtataaaacgagatacacgacaactaccccaaatcgcccgcgtgatttatgatgtttcgtgactgtcataaaaaatcatcttgttcaccattgtaacaacgatgacaatatatcgccataatttacgctagaaaatgaggattttac

SEQ ID NO: 52072 - DNA, 2790 bp, Zea Mays
ctccgaaccgactaccgagtgctgtgctgaccatcgccgcccgaagcacggacgagttccatccgagccctcgtcgaagcgtcgatgcaaacttgagttattggtctggaccggattgagccaaggccattgcctcaatcggcccatcacgcggcctttcaggcactccctggcggcggcccctagccagcctctcgcgcgtgcgcagccggcaccctgtggctcactcagcagctgcgcgcggcaggccagcagtggtagtggacagcggcagcggctgtgctcggcggcccctgtgttgatgtgcgctgctcagctgctgtgcccagcggccgacacctctgcggctctcctttgctcgacgtcgagttcgtccctgatctggctcaacgatttactggtttttttgccgatgcttcatagttggcgagggagaaattccagcaatgcttgtcgtgcaactgccgccacctgaggtagcgggtgaggatgagagcaatagccgtggtgtcttcgtggagttcatgaccaaggtcgctcagttcaatgagcttgttgaatctggggagcgattgcttgggagatttcgtgaggagcttgagtattttcgtaggccgcagatttctaaggaagcagatgtaatgaatcagatacttaaatcaaactgcactgtcagaatgaggtcctatattgaaactggctgcagggtccactgccaaaacatctcaaacattaatcagctgagctcatgcgaaaatggacttaaagatcatataaagaaagttaagaccttgcttgaagagcttgaatgtctggttgagaatgtctatggcatcacactaacagccagtttaagtgctctggaagtttcagacagtcagtgccttgacagcatgctaagtaccgatcgctgctccgtggagcaggaggacagaagtgcagatcggttggacagggatgtgtcgtttgctacagtaatggtcatggttcgcaacgcgctgaaggctgactacacgatgcaggaaaagattgtctgtgcattgtccttgaaaacaccatcatcagagctcgagggatactgcctcatgtggaatttacgcccgtacatcgatgacgatgtgatgcgtcttgcgtggaaaatgtgtccttagtaggcgcaaggttcgtcattctagcaacaagtaccagaagccggtacggattaaagccaagcttgtttaagctgtttgtcttcaaaaactcacagcagttcacgattacccaaaacattgtttgtattgtacatttcactgtttgcatatgtatacactatattaaagccccctcaaattttcttagatcaaaccaccgtcctctcttccctcgtacccatgtgtcagggatcaaaagagataatggagccagtcaccggcaacgacgtaagaatgtgctaaatgggcttagatgggctatgtaatacattacctgggttcggcctgtatagaacgatatatgtgtgtctcaaactgaggaagacatggtaaaacacataacagaaacgctacttctctgcctcgtctccttcctcgctgccttccttacctcttctccacgaaatctgccattgctgctcgtttctcttctgcagcctcgctaggcatcgctaacaccatgcctccctctctctccctttttccctcgactgcatgtgaaaccttagcctcctcctcaaactactgcgtggagcttcctctccaacttcgcgaacgatgtgttcgctgtgacctctggcaaccactaatatacaaacagtcattaggtgtcgcaaccctttaggtgccgcaaccctttcgtatggaggaggtggcggcccgcgcgggcccggcgtgtccccgacaacacccctcaaggacgccacgcgcgcgccatgatagcacaacgctggcgcccacccagtcctcgcgtccgcttgtctactttcgtatccttgtataaccacgacaccggcccgccagcaaccggcaagcaaaatcaaagtgagccagcccagccatggagaaggcgatcgatcgacagtggcccatccgccacctcagcttgtggtgagcgtcccgatctactgttctattcatccattcattctcaaggattggatcagctcggattggattgggttgggttggctgatcgattccgtgttgggtctgcgtgacagtgcaggcattagtgtgcgcgccgcccctatgctatgagccacatcccaattttttgttagcatctgcaatgataaaattgtgttgcacactttgcttctagcaatttttatgcactacacaaaagcgatttattctagattaaacagaatgaatgtacgatttcgatatatgattccacaatatagttggacttgtattttagtatactatgtactaaataagttccttgtatgatcatcgttctttatgcattttcaaacaaaatttatgatatttattgcattttacgctactactagaaagctcaggctaatccctggcacatgtggctaaatttataacatttttatgtgtttaacggcaacctcgtgtgaagcgagatacacgacaactacctcaatttgaacgtgtcttttacgctttttgtgttgttttttaatgcaaccttgtataaaacgagatacacgacaactaccccaaatcgcccgcgtgatttatgatgtttcgtgactgtcataaaaaatcatcttgttcaccattgtaacaacgatgacaatatatcgccataatttacgctagaaaatgaggattttac

SEQ ID NO: 52073 - DNA, 2827 bp, Zea Mays
ctccgaaccgactaccgagtgctgtgctgaccatcgccgcccgaagcacggacgagttccatccgagccctcgtcgaagcgtcgatgcaaacttgagttattggtctggaccggattgagccaaggccattgcctcaatcggcccatcacgcggcctttcaggcactccctggcggcggcccctagccagcctctcgcgcgtgcgcagccggcaccctgtggctcactcagcagctgcgcgcggcaggccagcagtggtagtggacagcggcagcggctgtgctcggcggcccctgtgttgatgtgcgctgctcagctgctgtgcccagcggccgacacctctgcggctctcctttgctcgacgtcgagttcgtccctgatctggctcaacgatttactggtttttttgccgatgcttcatagttggcgagggagaaattccagcaatgcttgtcgtgcaactgccgccacctgaggtagcgggtgaggatgagagcaatagccgtggtgtcttcgtggagttcatgaccaaggtcgctcagttcaatgagcttgttgaatctggggagcgattgcttgggagatttcgtgaggagcttgagtattttcgtaggccgcagatttctaaggaagcagatgtaatgaatcagatacttaaatcaaactgcactgtcagaatgaggtcctatattgaaactggctgcagggtccactgccaaaacatctcaaacattaatcagctgagctcatgcgaaaatggacttaaagatcatataaagaaagttaagaccttgcttgaagagcttgaatgtctggttgagaatgtctatggcatcacactaacagccagtttaagtgctctggaagtttcagacagtcagtgccttgacagcatgctaagtaccgatcgctgctccgtggagtgaaatggaaaatgggtgacagggtgtttgtacacagcaggaggacagaagtgcagatcggttggacagggatgtgtcgtttgctacagtaatggtcatggttcgcaacgcgctgaaggctgactacacgatgcaggaaaagattgtctgtgcattgtccttgaaaacaccatcatcagagctcgagggatactgcctcatgtggaatttacgcccgtacatcgatgacgatgtgatgcgtcttgcgtggaaaatgtgtccttagtaggcgcaaggttcgtcattctagcaacaagtaccagaagccggtacggattaaagccaagcttgtttaagctgtttgtcttcaaaaactcacagcagttcacgattacccaaaacattgtttgtattgtacatttcactgtttgcatatgtatacactatattaaagccccctcaaattttcttagatcaaaccaccgtcctctcttccctcgtacccatgtgtcagggatcaaaagagataatggagccagtcaccggcaacgacgtaagaatgtgctaaatgggcttagatgggctatgtaatacattacctgggttcggcctgtatagaacgatatatgtgtgtctcaaactgaggaagacatggtaaaacacataacagaaacgctacttctctgcctcgtctccttcctcgctgccttccttacctcttctccacgaaatctgccattgctgctcgtttctcttctgcagcctcgctaggcatcgctaacaccatgcctccctctctctccctttttccctcgactgcatgtgaaaccttagcctcctcctcaaactactgcgtggagcttcctctccaacttcgcgaacgatgtgttcgctgtgacctctggcaaccactaatatacaaacagtcattaggtgtcgcaaccctttaggtgccgcaaccctttcgtatggaggaggtggcggcccgcgcgggcccggcgtgtccccgacaacacccctcaaggacgccacgcgcgcgccatgatagcacaacgctggcgcccacccagtcctcgcgtccgcttgtctactttcgtatccttgtataaccacgacaccggcccgccagcaaccggcaagcaaaatcaaagtgagccagcccagccatggagaaggcgatcgatcgacagtggcccatccgccacctcagcttgtggtgagcgtcccgatctactgttctattcatccattcattctcaaggattggatcagctcggattggattgggttgggttggctgatcgattccgtgttgggtctgcgtgacagtgcaggcattagtgtgcgcgccgcccctatgctatgagccacatcccaattttttgttagcatctgcaatgataaaattgtgttgcacactttgcttctagcaatttttatgcactacacaaaagcgatttattctagattaaacagaatgaatgtacgatttcgatatatgattccacaatatagttggacttgtattttagtatactatgtactaaataagttccttgtatgatcatcgttctttatgcattttcaaacaaaatttatgatatttattgcattttacgctactactagaaagctcaggctaatccctggcacatgtggctaaatttataacatttttatgtgtttaacggcaacctcgtgtgaagcgagatacacgacaactacctcaatttgaacgtgtcttttacgctttttgtgttgttttttaatgcaaccttgtataaaacgagatacacgacaactaccccaaatcgcccgcgtgatttatgatgtttcgtgactgtcataaaaaatcatcttgttcaccattgtaacaacgatgacaatatatcgccataatttacgctagaaaatgaggattttac

SEQ ID NO: 52074 - DNA, 2776 bp, Zea Mays
gcctgacctccgaaccgactaccgagtgctgtgctgaccatcgccgcccgaagcacggacgagttccatccgagccctcgtcgaagcgtcgatgcaaacttgagttattggtctggaccggattgagccaaggccattgcctcaatcggcccatcacgcggcctttcaggcactccctggcggcggcccctagccagcctctcgcgcgtgcgcagccggcaccctgtggctcactcagcagctgcgcgcggcaggccagcagtggtagtggacagcggcagcggctgtgctcggcggcccctgtgttgatgtgcgctgctcagctgctgtgcccagcggccgacacctctgcggctctcctttgctcgacgtcgagcgagggagaaattccagcaatgcttgtcgtgcaactgccgccacctgaggtagcgggtgaggatgagagcaatagccgtggtgtcttcgtggagttcatgaccaaggtcgctcagttcaatgagcttgttgaatctggggagcgattgcttgggagatttcgtgaggagcttgagtattttcgtaggccgcagatttctaaggaagcagatgtaatgaatcagatacttaaatcaaactgcactgtcagaatgaggtcctatattgaaactggctgcagggtccactgccaaaacatctcaaacattaatcagctgagctcatgcgaaaatggacttaaagatcatataaagaaagttaagaccttgcttgaagagcttgaatgtctggttgagaatgtctatggcatcacactaacagccagtttaagtgctctggaagtttcagacagtcagtgccttgacagcatgctaagtaccgatcgctgctccgtggagtgaaatggaaaatgggtgacagggtgtttgtacacagcaggaggacagaagtgcagatcggttggacagggatgtgtcgtttgctacagtaatggtcatggttcgcaacgcgctgaaggctgactacacgatgcaggaaaagattgtctgtgcattgtccttgaaaacaccatcatcagagctcgagggatactgcctcatgtggaatttacgcccgtacatcgatgacgatgtgatgcgtcttgcgtggaaaatgtgtccttagtaggcgcaaggttcgtcattctagcaacaagtaccagaagccggtacggattaaagccaagcttgtttaagctgtttgtcttcaaaaactcacagcagttcacgattacccaaaacattgtttgtattgtacatttcactgtttgcatatgtatacactatattaaagccccctcaaattttcttagatcaaaccaccgtcctctcttccctcgtacccatgtgtcagggatcaaaagagataatggagccagtcaccggcaacgacgtaagaatgtgctaaatgggcttagatgggctatgtaatacattacctgggttcggcctgtatagaacgatatatgtgtgtctcaaactgaggaagacatggtaaaacacataacagaaacgctacttctctgcctcgtctccttcctcgctgccttccttacctcttctccacgaaatctgccattgctgctcgtttctcttctgcagcctcgctaggcatcgctaacaccatgcctccctctctctccctttttccctcgactgcatgtgaaaccttagcctcctcctcaaactactgcgtggagcttcctctccaacttcgcgaacgatgtgttcgctgtgacctctggcaaccactaatatacaaacagtcattaggtgtcgcaaccctttaggtgccgcaaccctttcgtatggaggaggtggcggcccgcgcgggcccggcgtgtccccgacaacacccctcaaggacgccacgcgcgcgccatgatagcacaacgctggcgcccacccagtcctcgcgtccgcttgtctactttcgtatccttgtataaccacgacaccggcccgccagcaaccggcaagcaaaatcaaagtgagccagcccagccatggagaaggcgatcgatcgacagtggcccatccgccacctcagcttgtggtgagcgtcccgatctactgttctattcatccattcattctcaaggattggatcagctcggattggattgggttgggttggctgatcgattccgtgttgggtctgcgtgacagtgcaggcattagtgtgcgcgccgcccctatgctatgagccacatcccaattttttgttagcatctgcaatgataaaattgtgttgcacactttgcttctagcaatttttatgcactacacaaaagcgatttattctagattaaacagaatgaatgtacgatttcgatatatgattccacaatatagttggacttgtattttagtatactatgtactaaataagttccttgtatgatcatcgttctttatgcattttcaaacaaaatttatgatatttattgcattttacgctactactagaaagctcaggctaatccctggcacatgtggctaaatttataacatttttatgtgtttaacggcaacctcgtgtgaagcgagatacacgacaactacctcaatttgaacgtgtcttttacgctttttgtgttgttttttaatgcaaccttgtataaaacgagatacacgacaactaccccaaatcgcccgcgtgatttatgatgtttcgtgactgtcataaaaaatcatcttgttcaccattgtaacaacgatgacaatatatcgccataatttacgctagaaaatgaggattttac

SEQ ID NO: 52075 - DNA, 1224 bp, Zea Mays
cgcggcctttcaggcactccctggcggcggcccctagccagcctctcgcgcgtgcgcagccggcaccctgtggctcactcagcagctgcgcgcggcaggccagcagtggtagtggacagcggcagcggctgtgctcggcggcccctgtgttgatgtgcgctgctcagctgctgtgcccagcggccgacacctctgcggctctcctttgctcgacgtcgagcgagggagaaattccagcaatgcttgtcgtgcaactgccgccacctgaggtagcgggtgaggatgagagcaatagccgtggtgtcttcgtggagttcatgaccaaggtcgctcagttcaatgagcttgttgaatctggggagcgattgcttgggagatttcgtgaggagcttgagtattttcgtaggccgcagatttctaaggaagcagatgtaatgaatcagatacttaaatcaaactgcactgtcagaatgaggtcctatattgaaactggctgcagggtccactgccaaaacatctcaaacattaatcagctgagctcatgcgaaaatggacttaaagatcatataaagaaagttaagaccttgcttgaagagcttgaatgtctggttgagaatgtctatggcatcacactaacagccagtttaagtgctctggaagtttcagacagtcagtgccttgacagcatgctaagtaccgatcgctgctccgtggaggaggacagaagtgcagatcggttggacagggatgtgtcgtttgctacagtaatggtcatggttcgcaacgcgctgaaggctgactacacgatgcaggaaaagattgtctgtgcattgtccttgaaaacaccatcatcagagctcgagggatactgcctcatgtggaatttacgcccgtacatcgatgacgatgtgatgcgtcttgcgtggaaaatgtgtccttagtaggcgcaaggttcgtcattctagcaacaagtaccagaagccggtacggattaaagccaagcttgtttaagctgtttgtcttcaaaaactcacagcagttcacgattacccaaaacattgtttgtattgtacatttcactgtttgcatatgtatacactatattaaagccccctcaaattttcttagatcaaaccaccgtcctctcttccctcgtacccatgtgtcagggatcaaaagagataatggagccagtcagcggcatgcggtgtgtgtcagagggac

SEQ ID NO: 52076 - DNA, 1218 bp, Zea Mays
cgcggcctttcaggcactccctggcggcggcccctagccagcctctcgcgcgtgcgcagccggcaccctgtggctcactcagcagctgcgcgcggcaggccagcagtggtagtggacagcggcagcggctgtgctcggcggcccctgtgttgatgtgcgctgctcagctgctgtgcccagcggccgacacctctgcggctctcctttgctcgacgtcgagcgagggagaaattccagcaatgcttgtcgtgcaactgccgccacctgaggtagcgggtgaggatgagagcaatagccgtggtgtcttcgtggagttcatgaccaaggtcgctcagttcaatgagcttgttgaatctggggagcgattgcttgggagatttcgtgaggagcttgagtattttcgtaggccgcagatttctaaggaagcagatgtaatgaatcagatacttaaatcaaactgcactgtcagaatgaggtcctatattgaaactggctgcagggtccactgccaaaacatctcaaacattaatcagctgagctcatgcgaaaatggacttaaagatcatataaagaaagttaagaccttgcttgaagagcttgaatgtctggttgagaatgtctatggcatcacactaacagccagtttaagtgctctggaagtttcagacagtcagtgccttgacagcatgctaagtaccgatcgctgctccgtggaggaggacagaagtgcagatcggttggacagggatgtgtcgtttgctacagtaatggtcatggttcgcaacgcgctgaaggctgactacacgatgcagattgtctgtgcattgtccttgaaaacaccatcatcagagctcgagggatactgcctcatgtggaatttacgcccgtacatcgatgacgatgtgatgcgtcttgcgtggaaaatgtgtccttagtaggcgcaaggttcgtcattctagcaacaagtaccagaagccggtacggattaaagccaagcttgtttaagctgtttgtcttcaaaaactcacagcagttcacgattacccaaaacattgtttgtattgtacatttcactgtttgcatatgtatacactatattaaagccccctcaaattttcttagatcaaaccaccgtcctctcttccctcgtacccatgtgtcagggatcaaaagagataatggagccagtcagcggcatgcggtgtgtgtcagagggac

SEQ ID NO: 52077 - DNA, 1259 bp, Zea Mays
cgcggcctttcaggcactccctggcggcggcccctagccagcctctcgcgcgtgcgcagccggcaccctgtggctcactcagcagctgcgcgcggcaggccagcagtggtagtggacagcggcagcggctgtgctcggcggcccctgtgttgatgtgcgctgctcagctgctgtgcccagcggccgacacctctgcggctctcctttgctcgacgtcgagcgagggagaaattccagcaatgcttgtcgtgcaactgccgccacctgaggtagcgggtgaggatgagagcaatagccgtggtgtcttcgtggagttcatgaccaaggtcgctcagttcaatgagcttgttgaatctggggagcgattgcttgggagatttcgtgaggagcttgagtattttcgtaggccgcagatttctaaggaagcagatgtaatgaatcagatacttaaatcaaactgcactgtcagaatgaggtcctatattgaaactggctgcagggtccactgccaaaacatctcaaacattaatcagctgagctcatgcgaaaatggacttaaagatcatataaagaaagaccttgcttgaagagcttgaatgtctggttgagaatgtctatggcatcacactaacagccagtttaagtgctctggaagtttcagacagtcagtgccttgacagcatgctaagtaccgatcgctgctccgtggagtgaaatggaaaatgggtgacagggtgtttgtacacagcaggaggacagaagtgcagatcggttggacagggatgtgtcgtttgctacagtaatggtcatggttcgcaacgcgctgaaggctgactacacgatgcaggaaaagattgtctgtgcattgtccttgaaaacaccatcatcagagctcgagggatactgcctcatgtggaatttacgcccgtacatcgatgacgatgtgatgcgtcttgcgtggaaaatgtgtccttagtaggcgcaaggttcgtcattctagcaacaagtaccagaagccggtacggattaaagccaagcttgtttaagctgtttgtcttcaaaaactcacagcagttcacgattacccaaaacattgtttgtattgtacatttcactgtttgcatatgtatacactatattaaagccccctcaaattttcttagatcaaaccaccgtcctctcttccctcgtacccatgtgtcagggatcaaaagagataatggagccagtcagcggcatgcggtgtgtgtcagagggac

SEQ ID NO: 52078 - DNA, 1237 bp, Zea Mays
cgcggcctttcaggcactccctggcggcggcccctagccagcctctcgcgcgtgcgcagccggcaccctgtggctcactcagcagctgcgcgcggcaggccagcagtggtagtggacagcggcagcggctgtgctcggcggcccctgtgttgatgtgcgctgctcagctgctgtgcccagcggccgacacctctgcggctctcctttgctcgacgtcgagcgagggagaaattccagcaatgcttgtcgtgcaactgccgccacctgaggtagcgggtgaggatgagagcaatagccgtggtgtcttcgtggagttcatgaccaaggtcgctcagttcaatgagcttgttgaatctggggagcgattgcttgggagatttcgtgaggagcttgagtattttcgtaggccgcagatttctaaggaagcagatgtaatgaatcagatacttaaatcaaactgcactgtcagaatgaggtcctatattgaaactggctgcagggtccactgccaaaacatctcaaacattaatcagctgagctcatgcgaaaatggacttaaagatcatataaagaaagaccttgcttgaagagcttgaatgtctggttgagaatgtctatggcatcacactaacagccagtttaagtgctctggaagtttcagacagtcagtgccttgacagcatgctaagtaccgatcgctgctccgtggagggtgtttgtacacagcaggaggacagaagtgcagatcggttggacagggatgtgtcgtttgctacagtaatggtcatggttcgcaacgcgctgaaggctgactacacgatgcaggaaaagattgtctgtgcattgtccttgaaaacaccatcatcagagctcgagggatactgcctcatgtggaatttacgcccgtacatcgatgacgatgtgatgcgtcttgcgtggaaaatgtgtccttagtaggcgcaaggttcgtcattctagcaacaagtaccagaagccggtacggattaaagccaagcttgtttaagctgtttgtcttcaaaaactcacagcagttcacgattacccaaaacattgtttgtattgtacatttcactgtttgcatatgtatacactatattaaagccccctcaaattttcttagatcaaaccaccgtcctctcttccctcgtacccatgtgtcagggatcaaaagagataatggagccagtcagcggcatgcggtgtgtgtcagagggac

SEQ ID NO: 52079 - DNA, 1222 bp, Zea Mays
cgcggcctttcaggcactccctggcggcggcccctagccagcctctcgcgcgtgcgcagccggcaccctgtggctcactcagcagctgcgcgcggcaggccagcagtggtagtggacagcggcagcggctgtgctcggcggcccctgtgttgatgtgcgctgctcagctgctgtgcccagcggccgacacctctgcggctctcctttgctcgacgtcgagcgagggagaaattccagcaatgcttgtcgtgcaactgccgccacctgaggtagcgggtgaggatgagagcaatagccgtggtgtcttcgtggagttcatgaccaaggtcgctcagttcaatgagcttgttgaatctggggagcgattgcttgggagatttcgtgaggagcttgagtattttcgtaggccgcagatttctaaggaagcagatgtaatgaatcagatacttaaatcaaactgcactgtcagaatgaggtcctatattgaaactggctgcagggtccactgccaaaacatctcaaacattaatcagctgagctcatgcgaaaatggacttaaagatcatataaagaaagaccttgcttgaagagcttgaatgtctggttgagaatgtctatggcatcacactaacagccagtttaagtgctctggaagtttcagacagtcagtgccttgacagcatgctaagtaccgatcgctgctccgtggagcaggaggacagaagtgcagatcggttggacagggatgtgtcgtttgctacagtaatggtcatggttcgcaacgcgctgaaggctgactacacgatgcaggaaaagattgtctgtgcattgtccttgaaaacaccatcatcagagctcgagggatactgcctcatgtggaatttacgcccgtacatcgatgacgatgtgatgcgtcttgcgtggaaaatgtgtccttagtaggcgcaaggttcgtcattctagcaacaagtaccagaagccggtacggattaaagccaagcttgtttaagctgtttgtcttcaaaaactcacagcagttcacgattacccaaaacattgtttgtattgtacatttcactgtttgcatatgtatacactatattaaagccccctcaaattttcttagatcaaaccaccgtcctctcttccctcgtacccatgtgtcagggatcaaaagagataatggagccagtcagcggcatgcggtgtgtgtcagagggac

SEQ ID NO: 52080 - DNA, 1520 bp, Zea Mays
ctccgaaccgactaccgagtgctgtgctgaccatcgccgcccgaagcacggacgagttccatccgagccctcgtcgaagcgtcgatgcaaacttgagttattggtctggaccggattgagccaaggccattgcctcaatcggcccatcacgcggcctttcaggcactccctggcggcggcccctagccagcctctcgcgcgtgcgcagccggcaccctgtggctcactcagcagctgcgcgcggcaggccagcagtggtagtggacagcggcagcggctgtgctcggcggcccctgtgttgatgtgcgctgctcagctgctgtgcccagcggccgacacctctgcggctctcctttgctcgacgtcgagttcgtccctgatctggctcaacgatttactggtttttttgccgatgcttcatagttggcgagggagaaattccagcaatgcttgtcgtgcaactgccgccacctgaggtagcgggtgaggatgagagcaatagccgtggtgtcttcgtggagttcatgaccaaggtcgctcagttcaatgagcttgttgaatctggggagcgattgcttgggagatttcgtgaggagcttgagtattttcgtaggccgcagatttctaaggaagcagatgtaatgaatcagatacttaaatcaaactgcactgtcagaatgaggtcctatattgaaactggctgcagggtccactgccaaaacatctcaaacattaatcatgagctcatgcgaaaatggacttaaagatcatataaagaaagttaagaccttgcttgaagagcttgaatgtctggttgagaatgtctatggcatcacactaacagccagtttaagtgctctggaagtttcagacagtcagtgccttgacagcatgctaagtaccgatcgctgctccgtggagggtgtttgtacacagcaggaggacagaagtgcagatcggttggacagggatgtgtcgtttgctacagtaatggtcatggttcgcaacgcgctgaaggctgactacacgatgcaggtaaattgaagtgccaggatgtgcatttgctttttgcgctttacattttgcctttctcttatcttgcctacaggaaaagattgtctgtgcattgtccttgaaaacaccatcatcagagctcgagggatactgcctcatgtggaatttacgcccgtacatcgatgacgatgtgatgcgtcttgcgtggaaaatgtgtccttagtaggcgcaaggttcgtcattctagcaacaagtaccagaagccggtacggattaaagccaagcttgtttaagctgtttgtcttcaaaaactcacagcagttcacgattacccaaaacattgtttgtattgtacatttcactgtttgcatatgtatacactatattaaagccccctcaaattttcttagatcaaaccaccgtcctctcttccctcgtacccatgtgtcagggatcaaaagagataatggagccagtcagcggcatgcggtgtgtgtcagagggac

SEQ ID NO: 52081 - DNA, 1431 bp, Zea Mays
ctccgaaccgactaccgagtgctgtgctgaccatcgccgcccgaagcacggacgagttccatccgagccctcgtcgaagcgtcgatgcaaacttgagttattggtctggaccggattgagccaaggccattgcctcaatcggcccatcacgcggcctttcaggcactccctggcggcggcccctagccagcctctcgcgcgtgcgcagccggcaccctgtggctcactcagcagctgcgcgcggcaggccagcagtggtagtggacagcggcagcggctgtgctcggcggcccctgtgttgatgtgcgctgctcagctgctgtgcccagcggccgacacctctgcggctctcctttgctcgacgtcgagttcgtccctgatctggctcaacgatttactggtttttttgccgatgcttcatagttggcgagggagaaattccagcaatgcttgtcgtgcaactgccgccacctgaggtagcgggtgaggatgagagcaatagccgtggtgtcttcgtggagttcatgaccaaggtcgctcagttcaatgagcttgttgaatctggggagcgattgcttgggagatttcgtgaggagcttgagtattttcgtaggccgcagatttctaaggaagcagatgtaatgaatcagatacttaaatcaaactgcactgtcagaatgaggtcctatattgaaactggctgcagggtccactgccaaaacatctcaaacattaatcagctgagctcatgcgaaaatggacttaaagatcatataaagaaagttaagaccttgcttgaagagcttgaatgtctggttgagaatgtctatggcatcacactaacagccagtttaagtgctctggaagtttcagacagtcagtgccttgacagcatgctaagtaccgatcgctgctccgtggaggaggacagaagtgcagatcggttggacagggatgtgtcgtttgctacagtaatggtcatggttcgcaacgcgctgaaggctgactacacgatgcaggaaaagattgtctgtgcattgtccttgaaaacaccatcatcagagctcgagggatactgcctcatgtggaatttacgcccgtacatcgatgacgatgtgatgcgtcttgcgtggaaaatgtgtccttagtaggcgcaaggttcgtcattctagcaacaagtaccagaagccggtacggattaaagccaagcttgtttaagctgtttgtcttcaaaaactcacagcagttcacgattacccaaaacattgtttgtattgtacatttcactgtttgcatatgtatacactatattaaagccccctcaaattttcttagatcaaaccaccgtcctctcttccctcgtacccatgtgtcagggatcaaaagagataatggagccagtcagcggcatgcggtgtgtgtcagagggac

SEQ ID NO: 52082 - DNA, 1505 bp, Zea Mays
gacctccgaaccgactaccgagtgctgtgctgaccatcgccgcccgaagcacggacgagttccatccgagccctcgtcgaagcgtcgatgcaaacttgagttattggtctggaccggattgagccaaggccattgcctcaatcggcccatcacgcggcctttcaggcactccctggcggcggcccctagccagcctctcgcgcgtgcgcagccggcaccctgtggctcactcagcagctgcgcgcggcaggccagcagtggtagtggacagcggcagcggctgtgctcggcggcccctgtgttgatgtgcgctgctcagctgctgtgcccagcggccgacacctctgcggctctcctttgctcgacgtcgagttcgtccctgatctggctcaacgatttactggtttttttgccgatgcttcatagttggcgagggagaaattccagcaatgcttgtcgtgcaactgccgccacctgaggtagcgggtgaggatgagagcaatagccgtggtgtcttcgtggagttcatgaccaaggtcgctcagttcaatgagcttgttgaatctggggagcgattgcttgggagatttcgtgaggagcttgagtattttcgtaggccgcagatttctaaggaagcagatgtaatgaatcagatacttaaatcaaactgcactgtcagaatgaggtcctatattgaaactggctgcagggtccactgccaaaacatctcaaacattaatcagctgagctcatgcgaaaatggacttaaagatcatataaagaaagaccttgcttgaagagcttgaatgtctggttgagaatgtctatggcatcacactaacagccagtttaagtgctctggaagtttcagacagtcagtgccttgacagcatgctaagtaccgatcgctgctccgtggagcaggaggacagaagtgcagatcggttggacagggatgtgtcgtttgctacagtaatggtcatggttcgcaacgcgctgaaggctgactacacgatgcaggtaaattgaagtgccaggatgtgcatttgctttttgcgctttacattttgcctttctcttatcttgcctacaggaaaagattgtctgtgcattgtccttgaaaacaccatcatcagagctcgagggatactgcctcatgtggaatttacgcccgtacatcgatgacgatgtgatgcgtcttgcgtggaaaatgtgtccttagtaggcgcaaggttcgtcattctagcaacaagtaccagaagccggtacggattaaagccaagcttgtttaagctgtttgtcttcaaaaactcacagcagttcacgattacccaaaacattgtttgtattgtacatttcactgtttgcatatgtatacactatattaaagccccctcaaattttcttagatcaaaccaccgtcctctcttccctcgtacccatgtgtcagggatcaaaagagataatggagccagtcagcggcatgcggtgtgtgtcagagggac

SEQ ID NO: 52083 - DNA, 1549 bp, Zea Mays
gcctgacctccgaaccgactaccgagtgctgtgctgaccatcgccgcccgaagcacggacgagttccatccgagccctcgtcgaagcgtcgatgcaaacttgagttattggtctggaccggattgagccaaggccattgcctcaatcggcccatcacgcggcctttcaggcactccctggcggcggcccctagccagcctctcgcgcgtgcgcagccggcaccctgtggctcactcagcagctgcgcgcggcaggccagcagtggtagtggacagcggcagcggctgtgctcggcggcccctgtgttgatgtgcgctgctcagctgctgtgcccagcggccgacacctctgcggctctcctttgctcgacgtcgagttcgtccctgatctggctcaacgatttactggtttttttgccgatgcttcatagttggcgagggagaaattccagcaatgcttgtcgtgcaactgccgccacctgaggtagcgggtgaggatgagagcaatagccgtggtgtcttcgtggagttcatgaccaaggtcgctcagttcaatgagcttgttgaatctggggagcgattgcttgggagatttcgtgaggagcttggttagtttttgttgacacgtctgatttgccatggaggttcagtttatattatccactgggaagccattttgtgatgagtattttcgtaggccgcagatttctaaggaagcagatgtaatgaatcagatacttaaatcaaactgcactgtcagaatgaggtcctatattgaaactggctgcagggtccactgccaaaacatctcaaacattaatcagctgagctcatgcgaaaatggacttaaagatcatataaagaaagaccttgcttgaagagcttgaatgtctggttgagaatgtctatggcatcacactaacagccagtttaagtgctctggaagtttcagacagtcagtgccttgacagcatgctaagtaccgatcgctgctccgtggagtgaaatggaaaatgggtgacagggtgtttgtacacagcaggaggacagaagtgcagatcggttggacagggatgtgtcgtttgctacagtaatggtcatggttcgcaacgcgctgaaggctgactacacgatgcaggaaaagattgtctgtgcattgtccttgaaaacaccatcatcagagctcgagggatactgcctcatgtggaatttacgcccgtacatcgatgacgatgtgatgcgtcttgcgtggaaaatgtgtccttagtaggcgcaaggttcgtcattctagcaacaagtaccagaagccggtacggattaaagccaagcttgtttaagctgtttgtcttcaaaaactcacagcagttcacgattacccaaaacattgtttgtattgtacatttcactgtttgcatatgtatacactatattaaagccccctcaaattttcttagatcaaaccaccgtcctctcttccctcgtacccatgtgtcagggatcaaaagagataatggagccagtcagcggcatgcggtgtgtgtcagagggac

SEQ ID NO: 52084 - DNA, 1473 bp, Zea Mays
gcctgacctccgaaccgactaccgagtgctgtgctgaccatcgccgcccgaagcacggacgagttccatccgagccctcgtcgaagcgtcgatgcaaacttgagttattggtctggaccggattgagccaaggccattgcctcaatcggcccatcacgcggcctttcaggcactccctggcggcggcccctagccagcctctcgcgcgtgcgcagccggcaccctgtggctcactcagcagctgcgcgcggcaggccagcagtggtagtggacagcggcagcggctgtgctcggcggcccctgtgttgatgtgcgctgctcagctgctgtgcccagcggccgacacctctgcggctctcctttgctcgacgtcgagttcgtccctgatctggctcaacgatttactggtttttttgccgatgcttcatagttggcgagggagaaattccagcaatgcttgtcgtgcaactgccgccacctgaggtagcgggtgaggatgagagcaatagccgtggtgtcttcgtggagttcatgaccaaggtcgctcagttcaatgagcttgttgaatctggggagcgattgcttgggagatttcgtgaggagcttgagtattttcgtaggccgcagatttctaaggaagcagatgtaatgaatcagatacttaaatcaaactgcactgtcagaatgaggtcctatattgaaactggctgcagggtccactgccaaaacatctcaaacattaatcagctgagctcatgcgaaaatggacttaaagatcatataaagaaagaccttgcttgaagagcttgaatgtctggttgagaatgtctatggcatcacactaacagccagtttaagtgctctggaagtttcagacagtcagtgccttgacagcatgctaagtaccgatcgctgctccgtggagtgaaatggaaaatgggtgacagggtgtttgtacacagcaggaggacagaagtgcagatcggttggacagggatgtgtcgtttgctacagtaatggtcatggttcgcaacgcgctgaaggctgactacacgatgcaggaaaagattgtctgtgcattgtccttgaaaacaccatcatcagagctcgagggatactgcctcatgtggaatttacgcccgtacatcgatgacgatgtgatgcgtcttgcgtggaaaatgtgtccttagtaggcgcaaggttcgtcattctagcaacaagtaccagaagccggtacggattaaagccaagcttgtttaagctgtttgtcttcaaaaactcacagcagttcacgattacccaaaacattgtttgtattgtacatttcactgtttgcatatgtatacactatattaaagccccctcaaattttcttagatcaaaccaccgtcctctcttccctcgtacccatgtgtcagggatcaaaagagataatggagccagtcagcggcatgcggtgtgtgtcagagggac

SEQ ID NO: 52085 - DNA, 1312 bp, Zea Mays
gacagggcctgacctccgaaccgactaccgagtgctgtgctgaccatcgccgcccgaagcacggacgagttccatccgagccctcgtcgaagcgtcgatgcaaacttgagttattggtctggaccggattgagccaaggccattgcctcaatcggcccatcacgcggcctttcaggcactccctggcggcggcccctagccagcctctcgcgcgtgcgcagccggcaccctgtggctcactcagcagctgcgcgcggcaggccagcagtggtagtggacagcggcagcggctgtgctcggcggcccctgtgttgatgtgcgctgctcagctgctgtgcccagcggccgacacctctgcggctctcctttgctcgacgtcgagttcgtccctgatctggctcaacgatttactggtttttttgccgatgcttcatagttggcgagggagaaattccagcaatgcttgtcgtgcaactgccgccacctgaggtagcgggtgaggatgagagcaatagccgtggtgtcttcgtggagttcatgaccaaggtcgctcagttcaatgagcttgttgaatctggggagcgattgcttgggagatttcgtgaggagcttgagtattttcgtaggccgcagatttctaaggaagcagatgtaatgaatcagatacttaaatcaaactgcactgtcagaatgaggtcctatattgaaactggctgcagggtccactgccaaaacatctcaaacattaatcagctgagctcatgcgaaaatggacttaaagatcatataaagaaagttaagaccttgcttgaagagcttgaatgtctggttgagaatgtctatggcatcacactaacagccagtttaagtgctctggaagtttcagacagtcagtgccttgacagcatgctaagtaccgatcgctgctccgtggagggtgtttgtacacagcaggaggacagaagtgcagatcggttggacagggatgtgtcgtttgctacagtaatggtcatggttcgcaacgcgctgaaggctgactacacgatgcagattgtctgtgcattgtccttgaaaacaccatcatcagagctcgagggatactgcctcatgtggaatttacgcccgtacatcgatgacgatgtgatgcgtcttgcgtggaaaatgtgtccttagtaggcgcaaggttcgtcattctagcaacaagtaccagaagccgatcaaaccaccgtcctctcttccctcgtacccatgtgtcagggatcaaaagagataatggagccagtcagcggcatgcggtgtgtgtcagagggac

SEQ ID NO: 52086 - DNA, 1462 bp, Zea Mays
gacagggcctgacctccgaaccgactaccgagtgctgtgctgaccatcgccgcccgaagcacggacgagttccatccgagccctcgtcgaagcgtcgatgcaaacttgagttattggtctggaccggattgagccaaggccattgcctcaatcggcccatcacgcggcctttcaggcactccctggcggcggcccctagccagcctctcgcgcgtgcgcagccggcaccctgtggctcactcagcagctgcgcgcggcaggccagcagtggtagtggacagcggcagcggctgtgctcggcggcccctgtgttgatgtgcgctgctcagctgctgtgcccagcggccgacacctctgcggctctcctttgctcgacgtcgagttcgtccctgatctggctcaacgatttactggtttttttgccgatgcttcatagttggcgagggagaaattccagcaatgcttgtcgtgcaactgccgccacctgaggtagcgggtgaggatgagagcaatagccgtggtgtcttcgtggagttcatgaccaaggtcgctcagttcaatgagcttgttgaatctggggagcgattgcttgggagatttcgtgaggagcttgagtattttcgtaggccgcagatttctaaggaagcagatgtaatgaatcagatacttaaatcaaactgcactgtcagaatgaggtcctatattgaaactggctgcagggtccactgccaaaacatctcaaacattaatcagctgagctcatgcgaaaatggacttaaagatcatataaagaaagttaagaccttgcttgaagagcttgaatgtctggttgagaatgtctatggcatcacactaacagccagtttaagtgctctggaagtttcagacagtcagtgccttgacagcatgctaagtaccgatcgctgctccgtggagggtgtttgtacacagcaggaggacagaagtgcagatcggttggacagggatgtgtcgtttgctacagtaatggtcatggttcgcaacgcgctgaaggctgactacacgatgcaggaaaagattgtctgtgcattgtccttgaaaacaccatcatcagagctcgagggatactgcctcatgtggaatttacgcccgtacatcgatgacgatgtgatgcgtcttgcgtggaaaatgtgtccttagtaggcgcaaggttcgtcattctagcaacaagtaccagaagccggtacggattaaagccaagcttgtttaagctgtttgtcttcaaaaactcacagcagttcacgattacccaaaacattgtttgtattgtacatttcactgtttgcatatgtatacactatattaaagccccctcaaattttcttagatcaaaccaccgtcctctcttccctcgtacccatgtgtcagggatcaaaagagataatggagccagtcagcggcatgcggtgtgtgtcagagggac

SEQ ID NO: 52087 - DNA, 1605 bp, Zea Mays
gacagggcctgacctccgaaccgactaccgagtgctgtgctgaccatcgccgcccgaagcacggacgagttccatccgagccctcgtcgaagcgtcgatgcaaacttgagttattggtctggaccggattgagccaaggccattgcctcaatcggcccatcacgcggcctttcaggcactccctggcggcggcccctagccagcctctcgcgcgtgcgcagccggcaccctgtggctcactcagcagctgcgcgcggcaggccagcagtggtagtggacagcggcagcggctgtgctcggcggcccctgtgttgatgtgcgctgctcagctgctgtgcccagcggccgacacctctgcggctctcctttgctcgacgtcgagttcgtccctgatctggctcaacgatttactggtttttttgccgatgcttcatagttggcgagggagaaattccagcaatgcttgtcgtgcaactgccgccacctgaggtagcgggtgaggatgagagcaatagccgtggtgtcttcgtggagttcatgaccaaggtcgctcagttcaatgagcttgttgaatctggggagcgattgcttgggagatttcgtgaggagcttggttagtttttgttgacacgtctgatttgccatggaggttcagtttatattatccactgggaagccattttgtgatggtattatgtacttgtccaccggtcaattttctgtaattgtgatgactgaggcacataacaatcttattgcagagtattttcgtaggccgcagatttctaaggaagcagatgtaatgaatcagatacttaaatcaaactgcactgtcagaatgaggtcctatattgaaactggctgcagggtccactgccaaaacatctcaaacattaatcagctgagctcatgcgaaaatggacttaaagatcatataaagaaagaccttgcttgaagagcttgaatgtctggttgagaatgtctatggcatcacactaacagccagtttaagtgctctggaagtttcagacagtcagtgccttgacagcatgctaagtaccgatcgctgctccgtggagggtgtttgtacacagcaggaggacagaagtgcagatcggttggacagggatgtgtcgtttgctacagtaatggtcatggttcgcaacgcgctgaaggctgactacacgatgcaggaaaagattgtctgtgcattgtccttgaaaacaccatcatcagagctcgagggatactgcctcatgtggaatttacgcccgtacatcgatgacgatgtgatgcgtcttgcgtggaaaatgtgtccttagtaggcgcaaggttcgtcattctagcaacaagtaccagaagccggtacggattaaagccaagcttgtttaagctgtttgtcttcaaaaactcacagcagttcacgattacccaaaacattgtttgtattgtacatttcactgtttgcatatgtatacactatattaaagccccctcaaattttcttagatcaaaccaccgtcctctcttccctcgtacccatgtgtcagggatcaaaagagataatggagccagtcagcggcatgcggtgtgtgtcagagggac

SEQ ID NO: 52088 - DNA, 2510 bp, Zea Mays
ttctctgaggacctgctcgctctcggcctgttcgaggtgctggggcacgcggcgccccgcgtatgagcttggtcgcgatgggccctgcacccgtccttgtcacatgggccaccacacatatagcaatctattcctctctctttttttctcatttttttatgatggaaacatccgcctgagcctcctctttctgaggaaaaaatcacctccaaactccgaccgagcatcttccccgggccggtaggccttatccggtttcttcttgcacctctccagtgagccagtcaccgccagtccacgccatggcttgtcgcgccactctcctgcctctcttcctcttcctcctcgtggcgcccgagcctgcgctcgccacatccggcaccatcgtcttcaccacgctgggccggagccgctacgcctttgacgtcttcgcgctcacgatcgccccgctctccgccgcctccgcggagctgcgcctcacggacggcgcctccgtcaactacaacggcaacttcgcgccctcctcctccggaccgccctccctcctcttcgtctccgagcgcaacggctcgctcaacctctacctcacccccgtccccacatccgcctccgcccgtcgccgcgacgcgctggaggaggaggaggaggactcggcgccgcccacgccgctgctcccgtgggaccctatcgcgctcaaggaccggccttcgctcacccccgacggcgcccacctagtgtacgtctccacggcggagcccgcgggggcgccgcgccggagctgggcggccgtgtactccacgagcctggcccccggccgcgccacgcgccgcctcaccccgcggggagtcgccgacttcagccccgccgtgtcgccgtccggggtctggaccgccgccgcgtcacccggcccgcgcggctgggccggcgaggtggaggacctccgcaccgacatctacgtcttccggacctccgacgggtcgcgccgggcgctggccgtcccggacggcgggtggccgacctgggccgacgacaccaccgtcttcttccaccgccgggacgccgacggctggtacggcgtgtaccgcgccaggctcaccttcacggacgacgacgtcgcgtccgtcgtcgaccggatcaccccgccgggtttccacgcgttcacccccgccgcgtcgcccggcgcgccggggctcgtggccgtggccaccaggcgcccgggttccgactaccgccacatcgaggtcatcgacttgtccggcggcggcggcggcgccaacaacaggagcgcctactacgaggtgacccggcccgtggccccgcgcgcgcaccacttcaacccgttcatctcgccggacggcgagcgcgtcgggtaccaccggtgccggggcagcgggaacggggactcgccgctgctgctggagagcatcaagggccccgcgccggacacgttctcgctcttcaggatcgacgggtcgttcccctccttctcgcacgacggcaagaggatcgccttcgtcgggctgccggggctgtacgtggtcaactccgacggctccggtggccgccgccgggtcttctcgggcaacgcgttcccgacgacatgggactggaagaggaaaggggtcatctacaccagcgtcggcccagacttcgcgagcgagagcaccgaggtggacgtggtcgccgtgtcgctcggcgacggcgacggcgacgaccccagcgtctccatcaagaagctcaccgtgggcggcgagaacaacgcgttcccgtccccttcgcccgacggcaagtgggtggtgttccggtccgggcggtccgggcacaagaacctctacatcatggacgcggaggacggcgagtggatcgcgttcgcctcggaccggcacaacccgggcggcggcagcttcgccatctacatggtgcacccgaacggcaccggcctgcggagggtggtgcacagcgccgacggcggccgcaccaaccacccctggttcagcccggactcgaagacgctggtgttcacgtcggactacgccgccgtgtccgcggagcccatctccaacccgcaccactaccagccctacggggagatcttcaccgtaaacatcgacgggtctggcatccgccggctcacgcacaactccttcgaggacgggacgccgtcgtggacgccgtaccacctcaaggcggaggacgtgggcgagacgctgcaggcctccgggacgtgcgcgttcgaggactgccactggctcaacatcgctgcccggcctgatggcctcatgtgtggcaagcacgcctagttatagtatctgtggaagaaatgggactcacgtatatatgtgtgtgtgtatatagtgcggtgatgccatcttgtttgcttgcatatgcatactactgaacatacgatgatgaataaggtcatgccaactttagggcaaaaaataaacatacttatgatgacgctttacatttatactggctcatgtttgtatagcaagcatctagggcac

SEQ ID NO: 52089 - DNA, 1842 bp, Zea Mays
ttgagttccaagaacagacaagaatggctcgctcgccaaccataggtgggcaacgagctgggcgccgggaagccgcggcgcgcccggatggcggcgctggtggcgctgtggtgcgcgctggcggtcggcgtgctgcacgtggcgtggacggtggcgctgagcaggcggtgggtggagctgttcacggcggatcccggcgtggtgcggctggcgtcggcggcgatgcccgtggtggggctgtgcgagctgggcaactgcccgcagacggcgggctgcggggtgctccggggcacggcgcgcccggccgtgggcgcccgcatcaacctcctctccttctacctggtgggcacccccgtggcggtgtacctggcgttcggcgcccgcgccgggttccgcggcctctggtacggcctcctgtcggcgcaggccacgtgcgtggcgctcgtcctcgtcgccgtcgtctggcgcacggactggcgcgtcgaggccatgcgcgccaagaagctggcggggctggagctcaccaacgacgccgaggaggagagcaggcgcctcgtggccgccaccggcgagcaggcggaggatactagctagtagtggcgtaggtaggtaagctagctagctagctagctaggtgctgacagcggcgcgacgtgcgtgcgtgcgtgcagggtcgccgtcatcgtctttgaggccccagcagccagcatcaatggaccatactactagtaccatagctagagtggcttggccttttcaattcgctgcaggctagagcttcgtggggcgtgcaggggcctgacggattacaattgattatacctagctttgcgatggcggtggtggtggctgctgtcgcggctcgcaacttgtaggaggacagggtagggcatcccgcgccgtcgctgtcgccttttaatttcctcctgcgcggcgagcggacggagctgcctgcctgaatcagcctgatcgtgtcgccgccgctgtctgatcgggtgcggttttctccatcggcaacttaacggcagcgcgtcgtcttcatatatatctatcttgtttcttcgatcgctagctagcttcgtcgtcgcagccggcccagactgtgcagtgcgctctagctagcagtggaggcagacagagagcccagagccctcaggcgtgcgtacgtcgccgtccgtcttgcgtgcattggcatgccaggcggactgggctgcctgcgcgggcatctcgtgcctttgaccgtgacgccgtcgctgtttccaagcaccgtgtgtgcttgtggaaaggctgcatatgatacaactatggcaggctcgagcatgccgcgggttcgtcgcgattgggacatgatgagccgtggaagtcaggctgccgctcatcaggctgccgctgccaggacggcaacacagacagacagggagacagcctctatctctctcgctttttctggggtgcaggcagcagcgtgccgctgatgcaggcgccgccgaggcggaaattccggggattcggaggccacgaccacgagagacgagagatggggatatgtaaccgcgatccgatatctatgtgatggctattttctctatttgagtatatatacctataagtattttattgaacactaaccttcatctaatctaatagataaaagtgtcttagtctcttggaacgttcgggtctcgctcatatctcttaactcgtgagtataaaatacccgatataaacttagtctaaaaacataaacttagtcttcagccatccatctcttttgactatttaacaattttttaaacgaaaatgttatataaggcttaacaactatttgataaccctgtaaat

SEQ ID NO: 52090 - DNA, 678 bp, Zea Mays
tccagttccattgtgtggtggccgggccctgcatgccatgaagcgttcggcggcgtccaccgtgcccctcgccctcgtcctcatcgccgtcgcgacgacggcggcggccgccgacatgaccggcgccagcaactacctcgttgaggcccaggcgaaggcggcgatgctgtacaactacaggaacgtcatgagcgggttctcggcgaggctcacgccgccggagttggaggccgtcaagaagcaacctcaggtgagccgggtgctgccgagcgcgaccttgtctctgatgagcagcaagttcgacggcgtcagctgatcccgcttcttccatccatgcaccagccagagcaagctcatccgtcgacaaacccctaaaataaatacatgttttagtttgttaattaatatatatatcattatggaataaagataccaggatgtggacccatgaagcagaagcagatcaaatactgctacatgacgggggcatgccctaatgcagcaacggggaatgaagagcagtctgacgagtgtcaataaaataggatatcatgtattttcaaacaaaaacaataatcaaaccgttttcaattctgatttttaattttattttcaacccgatttcagttttgttcgagccttcaccggctagctcagtctgattctgattaaataaac

SEQ ID NO: 52091 - DNA, 1707 bp, Zea Mays
gctgtaaatttatatggattaggtgggatttgatgggtttaaatcctaaataagtcaaactcttttgtattttttttcaatgggataggaataactgatttctgccacaacatgacaaataaatcgtatttcgtatcaccagctacccaaaaaaaatgtccctcgaggtatcaatcaagaaagcttgagagcgaccgacaaccatacaactcccctgtcgcatcatcatataaccgaatggagacgcctcaaaagaaatggtagaatgggagttcaagagcaaggaagacgggaagatgcatgcgtgcggccatgacgcccacgtggcgatgcttcttggagcagctaggttgcttcagtctcggagggacgatttaaagggtacagtgaagctcgtcttccagccagccgaggagggacacgccggcgcataccacgtcctcaaggaaggcgtcctggacaacgtgcaggccatcttcggcgtgcacgtggacacggcgttgccggtggggctcgtcgggtccaggccagggccgttcctcgccggatcggcgcggttcacggcgaccatcacggggaaaggcgggcacgcagcggggccgcagcacgtcgtcgacccgatcgtcgcggcgtcctccgccgtgctcagcctccagcagctcgtcgcccgcgagaccgacccgctacagggcgcagttgtgtcggtgaccttcatcaaaggaggaggcggagctttcaatgtcatcccagaatccgtcaccatgggcggcaccttgaggagcatgacgaacgatggcatgtcctatctcgtgaaaagaatcagagaggtgatacaaggacaagccgccgtgagccgctgcgccgctacggtggacttgatggaggagaagatgaggccgtacccggccaccgtgaacgacgaggccatgtactcccacgccaaggcggtggcggagagcatgctgggcgaggccagcgtgatgctgtgcccccagttcatggcggcggaggacttcggcttctacgcgcagcggatcccggcggccttcttcagcgtcggcgtccgcgacgaggcgacggggaaggtccaccacgtgcactcaccgcacctggacatcgacgaggccgcgctccccgtcggagccgcgttgcacgccgccgtggccatggagtacctgaacaaacacgcaccatgcaaataaacacaaggctctggccatcccgataatacatgtcattcttattgaagtgactgcatgccgcaaaatcttccctccttggagcggtaagaatttgctaccccgcatccgtgctctgtacgtcgaaaataaatgtgtccagacatccctgaaagattggtttggttgtactgcgcctgttccaccaattgtatgtaaacgcatgtgcctgaaattcatgtaatgattaatttagattgcaaacggtaatagtaaatatgaacaacatttgaaattaaattacagccccgagaaaaatattcaagggggccaattcaaatatgaacaacgatattctgaattcaagggggccaattcaactaaaaaacacacactcggactatattttgtatttttctctttattttcaatagtatattcaagcaactcaatgctcgtccctcttttctttgaaaagtctaataaatatgttcacattaaacattgaatgactcacataatttctatc

SEQ ID NO: 52092 - DNA, 703 bp, Zea Mays
gagatattggggtgaggattcacaggagtgaactgcgcgatcattgtcgcttgaagagaccatctgctggaaaaacataatgacgttaggtgaaacttagcaatgttttcagccaaacggagtggtgatggtatgcatgagttgaacagcgttaagtgaatcgggcaatccagcggcagttgacgacgtcccaattgtggatatgtgattgttgatgaaaagttgccaagatttgtggtccctgacttgactgatttcaagctgaaggcatacgtgtcacaatgcgccagggacctcacagcgtcgacagcatcctctacttcagcagaaagtactgaaagcaagagctgatctgatctttgcttgcggggaggcagcccaactctgaagttatgtttccctagactgcccatgttccgaggattagcatcagcattctagctacaaacatttcagatatctttcttgtaagggcaaacattatggcatacctagattcacttttcctgcttgtaattttgatcttcattttgaagtaataagtacttgagttaaggggacatttcttgtggaaaaaatgacgggaaatagctggacgttcctcttgtgagctacggtgtgcttctgacttcgatttagttgggtctcgtctcgtccacttcgacttctttaagatcattaagaaattttctttcagttaatt

SEQ ID NO: 52093 - DNA, 1300 bp, Zea Mays
cccacgccataggccgcctcctgaaacgcctgtcccgccgccttgtcgcttctctccgctctgcttctccgccgccggccgtcgcctctctagcgccgctcgcccactccggctccgttacgcgcggggcgcaaccgcgcctgcggcctgcccagctgcccccctctccaaggtccagccgactgccgtgacgccgtccggccggcgtcgagcgcgtctccgcgccccccaccacccctctccgcgcaatcgcgcctccgcggcccccgtcctctgcctccgacgactgaacgtggtgagtggtgacgcgactggcggagtggtgattgacgcgcttgccggcgagttgcgaactggagttcagccctgcctgctattttagtctggatctgccactggtcaaggttcaagtatggcttctgtagggttggctcgggtgagtggtgtggctcgccctctcatgaggcttgtcaccatgagccgcatgccgatcctgcagcagctgcacctggaggagcagctcctgcgacgcacatcagacaactggtgtattatcaacgatggcacggcccctgctaccatcgttatgggcgtgtctgggagagtctcggagcttgtcaatatacagctggtcctccgggacaaggtgccgattgtgaggaggttcagtggaggtggcaccgtcattgttgatcagggaacggtgtttgtgactttcatttgcaacaagaatgttgttgctgggctgcagccctttccacgggacatcatgtcatggagtggtcagttatatggcaaagtttttgacagatttggtgaatttcatctacgtgagaatggcaagaaaccacacagatttcttgtgccgcatgaaggagtacataccttcgcgatcagttttcaccgatggggtcattgctgccctgggagaacacttctcagttcagcccatggatctacaagcaattctttccggtgatgaagaatttgtgccttctacaaagctgctgtcacaacaatacctagaagaaattgtttcctccaaagaatcccttgaaattatagaaagctgaagcatgacctgatgaccatggttgtcgtttttgttgtgaaatgtgagcaattttattgtgaaatccgagcaattatcggcgagctgtgaattcattcaactttgagtccgacattatttcactgaaccacttacattgttttttaagacccagtacatttttgtggttactggttacatgccataaagggcatcagcagtcgatgtttaattattttttgaggggca

SEQ ID NO: 52094 - DNA, 1385 bp, Zea Mays
caagcccacgccataggccgcctcctgaaacgcctgtcccgccgccttgtcgcttctctccgctctgcttctccgccgccggccgtcgcctctctagcgccgctcgcccactccggctccgttacgcgcggggcgcaaccgcgcctgcggcctgcccagctgcccccctctccaaggtccagccgactgccgtgacgccgtccggccggcgtcgagcgcgtctccgcgccccccaccacccctctccgcgcaatcgcgcctccgcggcccccgtcctctgcctccgacgactgaacgtggtgagtggtgacgcgactggcggagtggtgattgacgcgcttgccggcgagttgcgaactggggttggctcgggtgagtggtgtggctcgccctctcatgaggcttgtcaccatgagccgcatgccgatcctgcagcagctgcacctggaggagcagctcctgcgacgcacatcagacaactggtgtattatcaacgatggcacggcccctgctaccatcgttatgggcgtgtctgggagagtctcggagcttgtcaatatacagctggtcctccgggacaaggtgccgattgtgaggaggttcagtggaggtggcaccgtcattgttgatcagggaacggtgtttgtgactttcatttgcaacaagaatgttgttgctgggctgcagccctttccacgggacatcatgtcatggagtggtcagttatatggcaaagtttttgacagatttggtgaatttcatctacgtgagaatgactatgcatttagtcatcgaaagtttggtggaaatgctcagtcaataacaaaaaatcgttgggttcatcacacatcgtttttgtgggattatgatgtaaaaaatatggattatctcaaaatcccaaagcgtgcacctgaatatcgactggcaagaaaccacacagatttcttgtgccgcatgaaggagtacataccttcgcgatcagttttcaccgatggggtcattgctgccctgggagaacacttctcagttcagcccatggatctacaagcaattctttccggtgatgaagaatttgtgccttctacaaagctgctgtcacaacaatacctagaagaaattgtttcctccaaagaatcccttgaaattatagaaagctgaagcatgacctgatgaccatggttgtcgtttttgttgtgaaatgtgagcaattttattgtgaaatccgagcaattatcggcgagctgtgaattcattcaactttgagtccgacattatttcactgaaccacttacattgttttttaagacccagtacatttttgtggttactggttacatgccataaagggcatcagcagtcgatgtttaattattttttgaggggca

SEQ ID NO: 52095 - DNA, 3936 bp, Zea Mays
atggcgctgctggtgcgcgcgcggctgtccccgctggacgacgacgacgacgcgtccacggcgtcctcgctctcctcggcggcctcctccccgccgctctcgcccgcggccgcctccacgccgctaccgctgtacgcgcgcgccgcggtgctcgtcgccccgcggatcgccgcgcagctctcgtccacggaggaggacgtcagcgagtccttcgatgacaccaccagctccggcgaggacgtcgacctgccggaggaggtgtccaacggcttcttcttcagcgtcgccagggtgccgccgacgccgacgtccgaggacccgatcctggtccccggcggcggggtggcggggatcgccgctgcggaggcgcccgaggccgagggcggggacggcttgggcgccgcggaggagccgctggaggggggcatcttcgtgagcgccaagaatgggttggatggcgtcgagggttcgctgggtggcagcttcctcaaatctgggagctgcattggcgcgcacaacggcggggaggctgctgcgtcaggtgattcggtgatcgtttcagatggcaccgtgctgaatgaggaggatgataagcagggggagcaggctgtcaatgacgcggcgtctgggcctttactgatgcctgttgctggggtagatggcctcgtcattgtggatgctttggaggggatgcttgatcgtgaggctgctgaatcgcttcctattcccagtgctactgctactggtacagaaggagaggaggctgctgccgagcttcgcagcgatgcagtaggtagtgcagccaagcttgatgctagtcctgaatatgctgccacaggagatgtcatatctgatgccatgcaagttcttgatagtgtagatgatgaagctgatggtgatcatgaaggttccgacgatcttacatccatgccaatctcttcaagtgactatgctgtggaacttgcaaaagaactggagaacaacgtgcctacttccataggcgcacgctttgttgcggatgattcagatgatgcagagatcaacggtgatgatgaatatgaagaagagatgaatggaaaggagaacgagctttttgatcatacagctttaattgagcttctaagagctgcaagcagctcgcctgaacaaggcaaggccaaggttttcccagttgaatcttctgaacctagggatctgcctcccactttagccagcaatgctaggatgaacgtggcttctgctcctgtgccacaagcaatcgctgaccctgagaaacagatgaccgatgaggaaaagaagatttacggaaaggtggacatggcacgaatcaaatacatgcgtcttgttcatagattggggtatgatactaaccatcaggtaccagtacaagtgttgtttcggcttagtcttgttgaaagtttcaggtgcgtaaggatgacaaaccattcctcagagatcgagaatgcctggaagagggctttgcagcgtgaggcagagggaactgagaaccttgaattctcctgcaatgttttggtccttgggaagactggagttgggaaaagtgcaacaataaattccatcttcggggaagataaatccaaaacaaatgcttttctaccggcaacatcatctgtgaaggagattaatggagttgttaatggtgttaagtttcatgtcgtcgacacccctgggcttgggacttcagccgaggatgaaaaatcaaataggaaaatgctcaatgctgtgaagaagtatatgaagagatgccctccagatattattctgtatgttgataggcttgatacaccgcgggaggaggcaaatagcctatccctcttgcgatgcattaccagtgtgctaggcctgtcaatatggcccagaacaattattactctcactcactcaggagcagcttcccctgaaggccctaatggtttggaagtgaactatgatatggttgtgtctcgtcgaactcatgccattcagcaaagcatccggcagataactaatgatcctcaaattcagaatcctgtggctcttgtggagaaccatcatctgtgtcggaggaacgcagaaggtgaaaagatgcttcctgatggccttatctggaggcggctcctcctcctcctatgcttctcactaaagatgattgctgagattgacagtctctcaacccgccgtgcttcttctgcaagtttcttaggccgccttctccaagtgcctccaattccttacttcttatcatctttgttgaaatctagagagcaccctaagcgttccaatgaccataatgttgtgagtgtggactcagatttttacctagatgaattgttgaatggggaccaagaggatgaagatgactatgatcaacttcctcccttcaagccactaagtaaatcccaggttgcaaaactctccaaggagcaacagattttgtattttgatgaatctgattaccgaactaagctgcttcagaagaagcagctgaaggaacagctcaaaggatttaaggaaatgaagaagaaagagggtgatgataatgatatactttctgatgatgatcatcccgatgatggatatgatacagatagatatcctatgccagaatggaccttgccatcttcatttgattctgatgatcctgtgtaccgctatcgttgccctgtgtctacaccaaaccttctggtgcgtgctgtttacaatcctgatggatgggatcatgattttggatttgatggtgtgagtgtccaacacagccatgatgttgctaacaaatatccagcatctctgtgggttcaagttaacaaggacaagagagagtttaccatccatttggattcctcaatgtcagttaagcatggagattatgcctcgagcctggcaggctttgacatccaaacaattatgaaccagctttcttacaccctcagaggggagaccaaatttaaaaacttcaagaaaaacatcactactggtggtttatccatgacctttttgggaaattccatggtggctggagcaaagcttgaagacaagcttttagttggtaacaggttaacactatcaggcaacactggtgctgtgtccatgagaggtgatgctgcatatggagtgattatggaagcaactcttcgtgaaaaaagctatcctgtaggtcaaggcgttgccactttgggtgcatccttagtgaaatggcataaagagtggaccatggccgcaaatttggattcccatgtctctgttggaaggtcttcaaacatgtcagttcatgttgatgtaaacaacaaactaactggacgggtcagcatcaaggccaacacttcagaacagttgaacattgcccttttaggtacatgttcagtgataatgtatgtgtggaacaagatgcaccctagtgcagatcctaatgctgagtagcactgatccaagcagtcacaggttggcaagcacatcatttgtgtcccagcttatgattcaagaacgaggtagctgaaaactgcacactctggcaacttgccaggattggaagttgaaccatcgctttctgtcaagaatcgagataagtgtagctgtgctggcgtttttacccccatccagtgcgcagttggtggccaacttcatgaatcatgagtgactcaactttttttttttgtcaaaagttgtaattagggtgtgagggtaaaatatcactttaagaccataaataagctgaaattagctagtattgggtagcttattttagcttatttgtaattctaaagtgatatttcatctttctaacatttcaccataatccagcttatataatctaggagggaaacaaacagggtctcagtaacacggctcaatggttcatgaagccccaaaaaaatactgtttttttttgcctccctttattaagcagtttcaattagaagacacaaaaagtgtcccccc

SEQ ID NO: 52096 - DNA, 3971 bp, Zea Mays
caggactcgactctaccgcgccgccatggcgctgctggtgcgcgcgcggctgtccccgctggacgacgacgacgacgcgtccacggcgtcctcgctctcctcggcggcctcctccccgccgctctcgcccgcggccgcctccacgccgctaccgctgtacgcgcgcgccgcggtgctcgtcgccccgcggatcgccgcgcagctctcgtccacggaggaggacgtcagcgagtccttcgatgacaccaccagctccggcgaggacgtcgacctgccggaggaggtgtccaacggcttcttcttcagcgtcgccagggtgccgccgacgccgacgtccgaggacccgatcctggtccccggcggcggggtggcggggatcgccgctgcggaggcgcccgaggccgagggcggggacggcttgggcgccgcggaggagccgctggaggggggcatcttcgtgagcgccaagaatgggttggatggcgtcgagggttcgctgggtggcagcttcctcaaatctgggagctgcattggcgcgcacaacggcggggaggctgctgcgtcaggtgattcggtgatcgtttcagatggcaccgtgctgaatgaggaggatgataagcagggggagcaggctgtcaatgacgcggcgtctgggcctttactgatgcctgttgctggggtagatggcctcgtcattgtggatgctttggaggggatgcttgatcgtgaggctgctgaatcgcttcctattcccagtgctactgctactggtacagaaggagaggaggctgctgccgagcttcgcagcgatgcagtaggtagtgcagccaagcttgatgctagtcctgaatatgctgccacaggagatgtcatatctgatgccatgcaagttcttgatagtgtagatgatgaagctgatggtgatcatgaaggttccgacgatcttacatccatgccaatctcttcaagtgactatgctgtggaacttgcaaaagaactggagaacaacgtgcctacttccataggcgcacgctttgttgcggatgattcagatgatgcagagatcaacggtgatgatgaatatgaagaagagatgaatggaaaggagaacgagctttttgatcatacagctttaattgagcttctaagagctgcaagcagctcgcctgaacaaggcaaggccaaggttttcccagttgaatcttctgaacctagggatctgcctcccactttagccagcaatgctaggatgaacgtggcttctgctcctgtgccacaagcaatcgctgaccctgagaaacagatgaccgatgaggaaaagaagatttacggaaaggtggacatggcacgaatcaaatacatgcgtcttgttcatagattggggtatgatactaaccatcaggtaccagtacaagtgttgtttcggcttagtcttgttgaaagtttcaggtgcgtaaggatgacaaaccattcctcagagatcgagaatgcctggaagagggctttgcagcgtgaggcagagggaactgagaaccttgaattctcctgcaatgttttggtccttgggaagactggagttgggaaaagtgcaacaataaattccatcttcggggaagataaatccaaaacaaatgcttttctaccggcaacatcatctgtgaaggagattaatggagttgttaatggtgttaagtttcatgtcgtcgacacccctgggcttgggacttcagccgaggatgaaaaatcaaataggaaaatgctcaatgctgtgaagaagtatatgaagagatgccctccagatattattctgtatgttgataggcttgatacaccgcgggaggaggcaaatagcctatccctcttgcgatgcattaccagtgtgctaggcctgtcaatatggcccagaacaattattactctcactcactcaggagcagcttcccctgaaggccctaatggtttggaagtgaactatgatatggttgtgtctcgtcgaactcatgccattcagcaaagcatccggcagataactaatgatcctcaaattcagaatcctgtggctcttgtggagaaccatcatctgtgtcggaggaacgcagaaggtgaaaagatgcttcctgatggccttatctggaggcggctcctcctcctcctatgcttctcactaaagatgattgctgagattgacagtctctcaacccgccgtgcttcttctgcaagtttcttaggccgccttctccaagtgcctccaattccttacttcttatcatctttgttgaaatctagagagcaccctaagcgttccaatgaccataatgttgtgagtgtggactcagatttttacctagatgaattgttgaatggggaccaagaggatgaagatgactatgatcaacttcctcccttcaagccactaagtaaatcccaggttgcaaaactctccaaggagcaacagattttgtattttgatgaatctgattaccgaactaagctgcttcagaagaagcagctgaaggaacagctcaaaggatttaaggaaatgaagaagaaagagggtgatgataatgatatactttctgatgatgatcatcccgatgatggatatgatacagatagatatcctatgccagaatggaccttgccatcttcatttgattctgatgatcctgtgtaccgctatcgttgccctgtgtctacaccaaaccttctggtgcgtgctgtttacaatcctgatggatgggatcatgattttggatttgatggtgtgagtgtccaacacagccatgatgttgctaacaaatatccagcatctctgtgggttcaagttaacaaggacaagagagagtttaccatccatttggattcctcaatgtcagttaagcatggagattatgcctcgagcctggcaggctttgacatccaaacaattatgaaccagctttcttacaccctcagaggggagaccaaatttaaaaacttcaagaaaaacatcactactggtggtttatccatgacctttttgggaaattccatggtggctggagcaaagcttgaagacaagcttttagttggtaacaggttaacactatcaggcaacactggtgctgtgtccatgagaggtgatgctgcatatggagtgattatggaagcaactcttcgtgaaaaaagctatcctgtaggtcaaggcgttgccactttgggtgcatccttagtgaaatggcataaagagtggaccatggccgcaaatttggattcccatgtctctgttggaaggtcttcaaacatgtcagttcatgttgatgtaaacaacaaactaactggacgggtcagcatcaaggccaacacttcagaacagttgaacattgcccttttaggtacatgttcagtgataatgtatgtgtggaacaagatgcaccctagtgcagatcctaatgctgagtagcactgaactccccagatccaagcagtcacaggttggcaagcacatcatttgtgtcccagcttatgattcaagaacgaggtagctgaaaactgcacactctggcaacttgccaggattggaagttgaaccatcgctttctgtcaagaatcgagataagtgtagctgtgctggcgtttttacccccatccagtgcgcagttggtggccaacttcatgaatcatgagtgactcaactttttttttttgtcaaaagttgtaattagggtgtgagggtaaaatatcactttaagaccataaataagctgaaattagctagtattgggtagcttattttagcttatttgtaattctaaagtgatatttcatctttctaacatttcaccataatccagcttatataatctaggagggaaacaaacagggtctcagtaacacggctcaatggttcatgaagccccaaaaaaatactgtttttttttgcctccctttattaagcagtttcaattagaagacacaaaaagtgtcccccc

SEQ ID NO: 52097 - DNA, 590 bp, Zea Mays
gtccgccgtactcttcttcgctagactgctccccttctccatcgatcacttgctccactacgcgcaagacgcaaccgtgcctacggcctgctagtgcctaacttcctccccctctctatgcgtgccactccaggcgtcgagctcgcctctgcgggaccgtagcccccacccctcattggctctctgcgcgagcgtgatcgcgcctccgcatcccatgttcagtggagccctaaaggttgtgtttctacgaagatccaaaattccttggaccaaaagcttcagcttccaatagtcgttaagggccttgtactgcgaactctggacaaagtttcatgctgctacaaagggagttgccgagctttctcaacaatagcgatcgtggaaggcgtcaaccagattgtggatgttgaaactattctatctacttttggatctaagttataggatatttgaacattttaatgtttgatacctggatgctttatgcttatatgtggatgctagaaaaagttgtgtacacatgtttttgacaaaattgtacgcacgatttggattgcattcaattgaatgatcattttattaactgatgg

SEQ ID NO: 52098 - DNA, 850 bp, Zea Mays
cgccgttcggccgccttccctgccgccggtccgccgtactcttcttcgctagactgctccccttctccatcgatcacttgctccactacgcgcaagacgcaaccgtgcctacggcctgctagtgcctaacttcctccccctctctatgcgtgccactccaggcgtcgagctcgcctctgcgggaccgtagcccccacccctcattggctctctgcgcgagcgtgatcgcgcctccgcatcccatgttcagtggagccctaaagttctggctaccgatgctggaggatttggaaaggcgctgtttgattagaagacgagcatcctgacaagtgggtacctatatcctgtatgggccattttctggtagcagtttgtttcgcatctccatgtatttctcaatttggagactggagagagaacaacagagagaaactgatgttgaggagaaccatagaagtaattggttaggcttgagattaggaatttggcaaacaggttgtgtttctacgaagatccaaaattccttggaccaaaagcttcagcttccaatagtcgttaagggccttgtactgcgaactctggacaaagtttcatgctgctacaaagggagttgccgagctttctcaacaatagcgatcgtggaaggcgtcaaccagattgtggatgttgaaactattctatctacttttggatctaagttataggatatttgaacattttaatgtttgatacctggatgctttatgcttatatgtggatgctagaaaaagttgtgtacacatgtttttgacaaaattgtacgcacgatttggattgcattcaattgaatgatcattttattaactgatgg

SEQ ID NO: 52099 - DNA, 465 bp, Zea Mays
cttcgcgcccatggccgaccgccttgacgtgttgctatatctcggccccttcgtcgattcgcttaacatcagcccgcacgatagtgtccagacgcttgtcaagtttctcggttgtgtttctacgaagatccaaaattccttggaccaaaagcttcagcttccaatagtcgttaagggccttgtactgcgaactctggacaaagtttcatgctgctacaaagggagttgccgagctttctcaacaatagcgatcgtggaaggcgtcaaccagattgtggatgttgaaactattctatctacttttggatctaagttataggatatttgaacattttaatgtttgatacctggatgctttatgcttatatgtggatgctagaaaaagttgtgtacacatgtttttgacaaaattgtacgcacgatttggattgcattcaattgaatgatcattttattaactgatgg

SEQ ID NO: 52100 - DNA, 479 bp, Zea Mays
caagccgctcgccacgcgcgcgacgccgtgtttggcccccaccgccgttcggccgccttccctgccgccggtccgccgtactcttcttcgctagactgctccccttctccatcgatcacttgctccactacgcgcaagacgcaaccgtgcctacggcctgctagtgcctaacttcctccccctctctatgcgtgccactccaggcgtcgagctcgcctctgcgggaccgtagcccccacccctcattggctctctgcgcgagcgtgatcgcgcctccgcatcccatgttcagtggagccctaaaggttgtgtttctacgaagatccaaaattccttggaccaaaagcttcagcttccaatagtcgttaagggccttgtactgcgaactctggacaaagtttcatgctgctacaaagtgctctgcatacctggtgagtgtttaatcaatctcggtgctgatttgttagttttctttaaga

SEQ ID NO: 52101 - DNA, 626 bp, Zea Mays
caccgcctgctagtgcagccagcaagccgctcgccacgcgcgcgacgccgtgtttggcccccaccgccgttcggccgccttccctgccgccggtccgccgtactcttcttcgctagactgctccccttctccatcgatcacttgctccactacgcgcaagacgcaaccgtgcctacggcctgctagtgcctaacttcctccccctctctatgcgtgccactccaggcgtcgagctcgcctctgcgggaccgtagcccccacccctcattggctctctgcgcgagcgtgatcgcgcctccgcatcccatgttcagtggagccctaaagtttgtttcgcatctccatgtatttctcaatttggagactggagagagaacaacagagagaaactgatgttgaggagaaccatagaagtaattggttaggcttgagattaggaatttggcaaacaggttgtgtttctacgaagatccaaaattccttggaccaaaagcttcagcttccaatagtcgttaagggccttgtactgcgaactctggacaaagtttcatgctgctacaaagtgctctgcatacctggtgagtgtttaatcaatctcggtgctgatttgttagttttctttaaga

SEQ ID NO: 52102 - DNA, 467 bp, Zea Mays
agccgccataaccaccgcctgctagtgcagccagcaagccgctcgccacgcgcgcgacgccgtgtttggcccccaccgccgttcggccgccttccctgccgccggtccgccgtactcttcttcgctagactgctccccttctccatcgatcacttgctccactacgcgcaagacgcaaccgtgcctacggcctgctagtgcctaacttcctccccctctctatgcgtgccactccaggcgtcgagctcgcctctgcgggaccgtagcccccacccctcattggctctctgcgcgagcgtgatcgcgcctccgcatcccatgttcagtggagccctaaagttctggctaccgatgctggaggatttggaaaggcgctgtttgattagaagacgagcatcctgacaagttgtgtttctacgaagatccaaaattccttggaccaaaagcttcagcttccaatagtcggt

SEQ ID NO: 52103 - DNA, 434 bp, Zea Mays
ctttctcgggcgtgctaggcgctatccatcctgagccgccataaccaccgcctgctagtgcagccagcaagccgctcgccacgcgcgcgacgccgtgtttggcccccaccgccgttcggccgccttccctgccgccggtccgccgtactcttcttcgctagactgctccccttctccatcgatcacttgctccactacgcgcaagacgcaaccgtgcctacggcctgctagtgcctaacttcctccccctctctatgcgtgccactccaggcgtcgagctcgcctctgcgggaccgtagcccccacccctcattggctctctgcgcgagcgtgatcgcgcctccgcatcccatgttcagtggagccctaaaggttgtgtttctacgaagatccaaaattccttggaccaaaagcttcagcttccaatagtcggt

SEQ ID NO: 52104 - DNA, 3578 bp, Zea Mays
gggaaaagccagaaaggcgtcctctgtcctctccttttctctcccctccctccctccctccaagctccaatccagcaaccccggtctccccaccccacctcacgcaggcggcattaatggattccgcggccgcggccacctccctccaccacacccgcctccttcccgctgcggcgagaaccctaacgtgacgcgctgcccccgaacggctcctcctccctccctccacgccgtcgtttgctccgggtgtgctctcgttgggggagggaaaagaaaaggtcgctgcttttctgtgtgggcgtgggtggcgcggcggcccaatgcggctcgatccggattgctccgcgcctcgatttgcctcgggtttggcgccggctccgtgagtccccgcgcctgctgctgccgccgccgccgccgccgttccgcctcggaaaggtttatttagttggtgaggagaaatggatgtggagaaacctgcttccaaggggcatggtttctttgcgctcttcgattggggaaagaagtctaagaagcgcctgttcgtcgggagcacgggcagttctccaaatctgaagaatgctgcagatgggaaggatattgatgatagtacaccaagcacacggtcaaatttgatccttgaagacaccccaagcttgaaggaaagcactgaacatagctgctcatcttcagtaattgatgaagaggctcattcaagaaggagcccgactgttgtggctaggcttatgggcttggattctatgcctgcggcaagctcaaccgaatccaatcccatgccattaaccgtgcaaccacctttccaaaccaacagccatgaagattttattggcagaagttatgttggtagtccccttaagacgccgggtagtcctattgatcggtttaaagtggaagcactgcctcctagacttgccaagaggacagtatctgttgcacagtataagttgctgtctcccatgaaaaatcctaacaatatatcaagcaggaatgcagctgatataatggaagcagcatcgaggatcatcagacctggagtagaaaatatcagtccctacagagttcatgatgttgggagtgcaattgctgcacgtgcctacaacccaggagagctcataggagcccaacaaaggtcacagaaacttaatgaagcactgagaaaatgtgatggccctgcatcttttaggccgccaagtggaaaaccttcagatggaaggttgagaggttcggagggcacctcgacgtccaggatctcacaggcaaatgtatgtgttccagttggtccaaaggtaaaatccggcgatagattagatactgctcgagctatgcatgcccaggaaaaaagaggcatgagaaaaggtggtagaaagcttgaaactctcaagaaccctgaaaataacatggctaaaagaagtgggttgaaccgacaaaaggatagtaaccaaatcggcacaacaagttcatccagtgtgctcatgccaaacagcagaaaacagaatgctacagccaccaaacataaggtgaactcgaacccagcaacccccagtagacaacggagcaatatccaccagataaatgcccatccaagaaaggtgagggtggccagcacatttgctggaaacagtagtcaaggtagcagaaaagtggacttgcagccaaatgctcatgctaacgtaagaaataattctgtacccaaagcaatcccgaagccaagaagattacaagacaggagagcgtactctgatacaagccagtcaagtgatagtattaattctgagagaagccagaggcggattcggcacaatattgtgattgatgagcagtcatctttttcaacaaacaaaaagaaagtcagcactgagattgtttcattcacatttacctcaccagttgataagtcactacatggcatccacttccccaatcattcagtatttacctcaccagttgataagtcactacatggcatccacttccccaatcattcagtggaaaaacagtttttagggaatctgaacactgtgtcaacttcaagcaatacatcaaacactaaacttgatgtcattgatggtgattttttgggactcctgttggagcagaaattgagagagttgacatctggtgtgagatcgccctacactaagacaaccaaaggtgttcaagcgcatcacacttcaacagcttgggaagatatggcatcagcatgtgaaacatctagcattgcttctactgattatgatagggagtcgttacaatctttcaatgatggaaaagctactctcccccagaccgatcttgcttctagaagtctccagtcatctcagcctgtgaagaagtacgatcacgatgtcacggatcaagcagagccgcctgagcgtctcggccgaggtccactcttcacatgggaggcttctatttcaaccgaaacctgtagctcatcagagagctggaggagtgcaaagggtaaacagagtagcttggaatttgctgtaacaggaacaagattgtttggttcagccgaaggaggcagaacctgtgactcgacgcgctcgagcaagttcctagaagcggacgcctcgtcagagtattccgacacagcctcatcgatcacggtggctacgacagagatccctcgatcagaaagcaacagttcatgtcatatggatggtagacaggatctgcagtttataagagagatactgaaagccagctctcctgcccggcacatcttctcttatctggagcggttcggcgattcaggtgttctggatgcgcacgtattggaggaactaaacggggatattaggctgttgggtggtgaagagcgcaagggttacaggctgaggcggaggctgctcttcgactgtgtcaatgaatcgttgagcgcgagatgcgcttactacttcaacggtggctacggcctgtggttcacgggaacggcggtcctgcagagcttgtcggcagaagggatccaccgagagatgaccggcctgcaggtcggcgaggagtggatggtggacgagctcgtgtacagggagatgagtggtcctctggggagctgggtcgacttcaaggtggagtcgtaccaaggcggcggagacatggcggcagagctgctaggctccttgatcgacgaagtggtcgctgatcttctgaccaccggctcgttctcgtagcggatgctggattggatggatcctccgccctcactaacgatacctaccttgtttgtatatcggtagctcgtctcgagaggaattgtgtagctagcgttcctaagatgaatggaatgtcactaacgtaccattcattcactattcgatgactgatcgttttcctgtcaaaagtggaaagaaaggggaaacaaaaaagaaacattcttggcctgttctatgggtagtttgatctactcagatggtcatgttgcaggaaaaatagtagctggacaagtcaattttgtgaagccactgacaatggctgttagtgtaggtatgactgcatttttgtttaaagggttcaaaggatgactggctgaatcttattaaaaaggtggcgaattgtat

SEQ ID NO: 52105 - DNA, 3642 bp, Zea Mays
aaacgaccaaaattgttgggtttttttataggagccaaaacaatcgcgaacagagaagaagaggagtacgagcgtgtgtgtgtgtgtgagagagagggggaaaagccagaaaggcgtcctctgtcctctccttttctctcccctccctccctccctccaagctccaatccagcaaccccggtctccccaccccacctcacgcaggcggcattaatggattccgcggccgcggccacctccctccaccacacccgcctccttcccgctgcggcgagaaccctaacgtgacgcgctgcccccgaacggctcctcctccctccctccacgccgtcgtttgctccgggtgtgctctcgttgggggagggaaaagaaaaggtcgctgcttttctgtgtgggcgtgggtggcgcggcggcccaatgcggctcgatccggattgctccgcgcctcgatttgcctcgggtttggcgccggctccgtgagtccccgcgcctgctgctgccgccgccgccgccgccgttccgcctcggaaaggtttatttagttggtgaggagaaatggatgtggagaaacctgcttccaaggggcatggtttctttgcgctcttcgattggggaaagaagtctaagaagcgcctgttcgtcgggagcacgggcagttctccaaatctgaagaatgctgcagatgggaaggatattgatgatagtacaccaagcacacggtcaaatttgatccttgaagacaccccaagcttgaaggaaagcactgaacatagctgctcatcttcagtaattgatgaagaggctcattcaagaaggagcccgactgttgtggctaggcttatgggcttggattctatgcctgcggcaagctcaaccgaatccaatcccatgccattaaccgtgcaaccacctttccaaaccaacagccatgaagattttattggcagaagttatgttggtagtccccttaagacgccgggtagtcctattgatcggtttaaagtggaagcactgcctcctagacttgccaagaggacagtatctgttgcacagtataagttgctgtctcccatgaaaaatcctaacaatatatcaagcaggaatgcagctgatataatggaagcagcatcgaggatcatcagacctggagtagaaaatatcagtccctacagagttcatgatgttgggagtgcaattgctgcacgtgcctacaacccaggagagctcataggagcccaacaaaggtcacagaaacttaatgaagcactgagaaaatgtgatggccctgcatcttttaggccgccaagtggaaaaccttcagatggaaggttgagaggttcggagggcacctcgacgtccaggatctcacaggcaaatgtatgtgttccagttggtccaaaggtaaaatccggcgatagattagatactgctcgagctatgcatgcccaggaaaaaagaggcatgagaaaaggtggtagaaagcttgaaactctcaagaaccctgaaaataacatggctaaaagaagtgggttgaaccgacaaaaggatagtaaccaaatcggcacaacaagttcatccagtgtgctcatgccaaacagcagaaaacagaatgctacagccaccaaacataaggtgaactcgaacccagcaacccccagtagacaacggagcaatatccaccagataaatgcccatccaagaaaggtgagggtggccagcacatttgctggaaacagtagtcaaggtagcagaaaagtggacttgcagccaaatgctcatgctaacgtaagaaataattctgtacccaaagcaatcccgaagccaagaagattacaagacaggagagcgtactctgatacaagccagtcaagtgatagtattaattctgagagaagccagaggcggattcggcacaatattgtgattgatgagcagtcatctttttcaacaaacaaaaagaaagtcagcactgagattgtttcattcacatttacctcaccagttgataagtcactacatggcatccacttccccaatcattcagtatttacctcaccagttgataagtcactacatggcatccacttccccaatcattcagtggaaaaacagtttttagggaatctgaacactgtgtcaacttcaagcaatacatcaaacactaaacttgatgtcattgatggtgattttttgggactcctgttggagcagaaattgagagagttgacatctggtgtgagatcgccctacactaagacaaccaaaggtgttcaagcgcatcacacttcaacagcttgggaagatatggcatcagcatgtgaaacatctagcattgcttctactgattatgatagggagtcgttacaatctttcaatgatggaaaagctactctcccccagaccgatcttgcttctagaagtctccagtcatctcagcctgtgaagaagtacgatcacgatgtcacggatcaagcagagccgcctgagcgtctcggccgaggtccactcttcacatgggaggcttctatttcaaccgaaacctgtagctcatcagagagctggaggagtgcaaagggaacaagattgtttggttcagccgaaggaggcagaacctgtgactcgacgcgctcgagcaagttcctagaagcggacgcctcgtcagagtattccgacacagcctcatcgatcacggtggctacgacagagatccctcgatcagaaagcaacagttcatgtcatatggatggtagacaggatctgcagtttataagagagatactgaaagccagctctcctgcccggcacatcttctcttatctggagcggttcggcgattcaggtgttctggatgcgcacgtattggaggaactaaacggggatattaggctgttgggtggtgaagagcgcaagggttacaggctgaggcggaggctgctcttcgactgtgtcaatgaatcgttgagcgcgagatgcgcttactacttcaacggtggctacggcctgtggttcacgggaacggcggtcctgcagagcttgtcggcagaagggatccaccgagagatgaccggcctgcaggtcggcgaggagtggatggtggacgagctcgtgtacagggagatgagtggtcctctggggagctgggtcgacttcaaggtggagtcgtaccaaggcggcggagacatggcggcagagctgctaggctccttgatcgacgaagtggtcgctgatcttctgaccaccggctcgttctcgtagcggatgctggattggatggatcctccgccctcactaacgatacctaccttgtttgtatatcggtagctcgtctcgagaggaattgtgtagctagcgttcctaagatgaatggaatgtcactaacgtaccattcattcactattcgatgactgatcgttttcctgtcaaaagtggaaagaaaggggaaacaaaaaagaaacattcttggcctgttctatgggtagtttgatctactcagatggtcatgttgcaggaaaaatagtagctggacaagtcaattttgtgaagccactgacaatggctgttagtgtaggtatgactgcatttttgtttaaagggttcaaaggatgactggctgaatcttattaaaaaggtggcgaattgtat

SEQ ID NO: 52106 - DNA, 1932 bp, Zea Mays
caaccgaacaaacaggccagcgctctgtaccggcgtttctcctcctgtctcctccccgctcgcgctgtcgcttcgccgcttcagatccaaacccgcgtattaaaaagcgctccaagcgaccaaaaccctaaccctaatcaccgcaattccccaatcatcggccccgcgcaaaaccctagcccagcgccacctacccgtccctctcgccgccgccgacatggcaggctcatccggcggcgcagcctcctcttcctcctcccgtggcgtgccggagaacaggttctataatcctccccacgtacgacgccaacagcagcagcaggggcaacggccgttgcggcccgcatcaccgtcgccctcgccgcggccggtgcggcagaagccccctccgccggcggcggccgttgccgcgtcggcggatgtggacatccgggtggattccgacgactcttcgtcgacgacctcgtccaagccatcggtggcgtccaccgcggctactgcagcagcgggtgaggtgaatgtggccgtggcggaggcggaggctgggaatttggagaggttcctcgcctccacgacgccctctgtgaccgctcagttcttgcccatgtcaagcctaaggatgcggcgaggtggtgatgctatggattcacgaccttatttctgcctgggagatctttgggaatcattcagggaatggagtgcttatggggccggtgttccacttgtgctaaatggcagtgactctgtgattcagtattatgtgccatatctttctgctatccaactatttgcagatccatcaagacctgcttcaagaaacagttatttttctcgcttacttaaggcgtcctggggatgaaagtgatggggactctatggatactagcagtgagagcagcattgagaatgacgttgagcggctaagagtctcatcatcactggaaggtaaacatcgactggaaaatggtggcatacgaagtgatgatggtgaaggcgatgcatcttcaagttttccaatatttcagtatatggagagggatcctccatatggtagagagcctctgacagacaaggtatcaactcttgcacacagatttccagctctgaagacattcaaaagctgtgatcttctgccatcgagctggatgtctgttgcatgattgtgaccctcctacgccagcatgccctggctttgggggaattaaccgcggcacgactgcagctgggaaactatctttgcctatctttgggctggcaccttacaaattacgtgcctccatttggacatctgacaaaactcaagaacgggacctcgtcacctctctgatgcaggaggctgacagctggctccgcagaatacaagtagaccatccggatttccggtttttcgtatcccatttcagtacaacgtggagatgacccgtggctgtaaatggttcatttagtatgaatatggcatagagacacctgagtgcccttttgtaacgggggggaatgtatgagttataagcctgcgtgcataactttttctcttgtctccagtaagctgtatcttttgtaggtttgttttgttgtggggtgaaagtaaagatggatggtggaaaaagcaaaattggaggcattgtggaactgaagtgaaatatggggaaaaaagaataaagatttccagttattagagttgagaaaggtccagtgtttcatgtttaggttacctgagctgcccgtgtgtttggtccatcactcatcggttctacaataaatagaggaaatacaccagaagtacagatactgatcttcgaagtgcagatgttggtcctcttcgttttaacagtgggtttcttcaggtagttttttttaaatagagcgtttaggccttattcaatctgactgttgcaatacaattaggcaaaatcttattcaatctgagagcaa

SEQ ID NO: 52107 - DNA, 2351 bp, Zea Mays
caaccgaacaaacaggccagcgctctgtaccggcgtttctcctcctgtctcctccccgctcgcgctgtcgcttcgccgcttcagatccaaacccgcgtattaaaaagcgctccaagcgaccaaaaccctaaccctaatcaccgcaattccccaatcatcggccccgcgcaaaaccctagcccagcgccacctacccgtccctctcgccgccgccgacatggcaggctcatccggcggcgcagcctcctcttcctcctcccgtggcgtgccggagaacaggttctataatcctccccacgtacgacgccaacagcagcagcaggggcaacggccgttgcggcccgcatcaccgtcgccctcgccgcggccggtgcggcagaagccccctccgccggcggcggccgttgccgcgtcggcggatgtggacatccgggtggattccgacgactcttcgtcgacgacctcgtccaagccatcggtggcgtccaccgcggctactgcagcagcgggatatcgcttcgtagaggtatctgccgtggtcgataggaaagggatccgatggagaggattgtagtctctgtgccatttctactgcatttgcagagccaaacagatgagtcgacagaaacactgcactgtagattagataaatgatgaatcgtgaagtaatcgtttagctctggttgacggttatttatcgaaagccccacaatcttcctttgatatcaaacgacgattgacataatggcatatgtaatgtgtgtatgcatatctgtcgttgtctctggattatgcatttgtgtgaagcgatctctggcaaataaataaactgcaatttggatgatgctgtttgtttctgtatccgtgtgtagtaataaagtttgtgctactacattcttcatccgttacaattttcgattctttggttgaaataccactcccgtttaaggaactgttttgtttttctgctgctgactagcttcaaatattttccactgcagtcaagcctaaggatgcggcgaggtggtgatgctatggattcacgaccttatttctgcctgggagatctttgggaatcattcagggaatggagtgcttatggggccggtgttccacttgtgctaaatggcagtgactctgtgattcagtattatgtgccatatctttctgctatccaactatttgcagatccatcaagacctgcttcaagaaacagtgagagcagcattgagaatgacgttgagcggctaagagtctcatcatcactggaaggtaaacatcgactggaaaatggtggcatacgaagtgatgatggtgaaggcgatgcatcttcaagttttccaatatttcagtatatggagagggatcctccatatggtagagagcctctgacagacaaggtatcaactcttgcacacagatttccagctctgaagacattcaaaagctgtgatcttctgccatcgagctggatgtctgttgcatggtaccccatttatagaattccaacagggccaacattgaaggatctcgatgcctgttttttgacattccattgcctagcaacaccttgcaaggattgtgaccctcctacgccagcatgccctggctttgggggaattaaccgcggcacgactgcagctgggaaactatctttgcctatctttgggctggcaccttacaaattacgtgcctccatttggacatctgacaaaactcaagaacgggacctcgtcacctctctgatgcaggaggctgacagctggctccgcagaatacaagtagaccatccggatttccggtttttcgtatcccatttcagtacaacgtggagatgacccgtggctgtaaatggttcatttagtatgaatatggcatagagacacctgagtgcccttttgtaacgggggggaatgtatgagttataagcctgcgtgcataactttttctcttgtctccagtaagctgtatcttttgtaggtttgttttgttgtggggtgaaagtaaagatggatggtggaaaaagcaaaattggaggcattgtggaactgaagtgaaatatggggaaaaaagaataaagatttccagttattagagttgagaaaggtccagtgtttcatgtttaggttacctgagctgcccgtgtgtttggtccatcactcatcggttctacaataaatagaggaaatacaccagaagtacagatactgatcttcgaagtgcagatgttggtcctcttcgttttaacagtgggtttcttcaggtagttttttttaaatagagcgtttaggccttattcaatctgactgttgcaatacaattaggcaaaatcttattcaatctgagagcaa

SEQ ID NO: 52108 - DNA, 2454 bp, Zea Mays
cgcagggccacgctacgcgagcgcggaggaacaaccgaacaaacaggccagcgctctgtaccggcgtttctcctcctgtctcctccccgctcgcgctgtcgcttcgccgcttcagatccaaacccgcgtattaaaaagcgctccaagcgaccaaaaccctaaccctaatcaccgcaattccccaatcatcggccccgcgcaaaaccctagcccagcgccacctacccgtccctctcgccgccgccgacatggcaggctcatccggcggcgcagcctcctcttcctcctcccgtggcgtgccggagaacaggttctataatcctccccacgtacgacgccaacagcagcagcaggggcaacggccgttgcggcccgcatcaccgtcgccctcgccgcggccggtgcggcagaagccccctccgccggcggcggccgttgccgcgtcggcggatgtggacatccgggtggattccgacgactcttcgtcgacgacctcgtccaagccatcggtggcgtccaccgcggctactgcagcagcgggtgaggatatcgcttcgtagaggtatctgccgtggtcgataggaaagggatccgatggagaggattgtagtctctgtgccatttctactgcatttgcagagccaaacagatgagtcgacagaaacactgcactgtagattagataaatgatgaatcgtgaagtaatcgtttagctctggttgacggttatttatcgaaagccccacaatcttcctttgatatcaaacgacgattgacataatggcatatgtaatgtgtgtatgcatatctgtcgttgtctctggattatgcatttgtgtgaagcgatctctggcaaataaataaactgcaatttggatgatgctgtttgtttctgtatccgtgtgtagtaataaagtttgtgctactacattcttcatccgttacaattttcgattctttggttgaaataccactcccgtttaaggaactgttttgtttttctgctgctgactagcttcaaatattttccactgcagtcaagcctaaggatgcggcgaggtggtgatgctatggattcacgaccttatttctgcctgggagatctttgggaatcattcagggaatggagtgcttatggggccggtgttccacttgtgctaaatggcagtgactctgtgattcagtattatgtgccatatctttctgctatccaactatttgcagatccatcaagacctgcttcaagaaacagttatttttctcgcttacttaaggcgtcctggggatgaaagtgatggggactctatggatactagcagtgagagcagcattgagaatgacgttgagcggctaagagtctcatcatcactggaaggtaaacatcgactggaaaatggtggcatacgaagtgatgatggtgaaggcgatgcatcttcaagttttccaatatttcagtatatggagagggatcctccatatggtagagagcctctgacagacaaggtatcaactcttgcacacagatttccagctctgaagacattcaaaagctgtgatcttctgccatcgagctggatgtctgttgcatggtaccccatttatagaattccaacagggccaacattgaaggatctcgatgcctgttttttgacattccattgcctagcaacaccttgcaaggattgtgaccctcctacgccagcatgccctggctttgggggaattaaccgcggcacgactgcagctgggaaactatctttgcctatctttgggctggcaccttacaaattacgtgcctccatttggacatctgacaaaactcaagaacgggacctcgtcacctctctgatgcaggaggctgacagctggctccgcagaatacaagtagaccatccggatttccggtttttcgtatcccatttcagtacaacgtggagatgacccgtggctgtaaatggttcatttagtatgaatatggcatagagacacctgagtgcccttttgtaacgggggggaatgtatgagttataagcctgcgtgcataactttttctcttgtctccagtaagctgtatcttttgtaggtttgttttgttgtggggtgaaagtaaagatggatggtggaaaaagcaaaattggaggcattgtggaactgaagtgaaatatggggaaaaaagaataaagatttccagttattagagttgagaaaggtccagtgtttcatgtttaggttacctgagctgcccgtgtgtttggtccatcactcatcggttctacaataaatagaggaaatacaccagaagtacagatactgatcttcgaagtgcagatgttggtcctcttcgttttaacagtgggtttcttcaggtagttttttttaaatagagcgtttaggccttattcaatctgactgttgcaatacaattaggcaaaatcttattcaatctgagagcaa

SEQ ID NO: 52109 - DNA, 2471 bp, Zea Mays
gtcatacgctacaggcagggggcgcagggccacgctacgcgagcgcggaggaacaaccgaacaaacaggccagcgctctgtaccggcgtttctcctcctgtctcctccccgctcgcgctgtcgcttcgccgcttcagatccaaacccgcgtattaaaaagcgctccaagcgaccaaaaccctaaccctaatcaccgcaattccccaatcatcggccccgcgcaaaaccctagcccagcgccacctacccgtccctctcgccgccgccgacatggcaggctcatccggcggcgcagcctcctcttcctcctcccgtggcgtgccggagaacaggttctataatcctccccacgtacgacgccaacagcagcagcaggggcaacggccgttgcggcccgcatcaccgtcgccctcgccgcggccggtgcggcagaagccccctccgccggcggcggccgttgccgcgtcggcggatgtggacatccgggtggattccgacgactcttcgtcgacgacctcgtccaagccatcggtggcgtccaccgcggctactgcagcagcgggatatcgcttcgtagaggtatctgccgtggtcgataggaaagggatccgatggagaggattgtagtctctgtgccatttctactgcatttgcagagccaaacagatgagtcgacagaaacactgcactgtagattagataaatgatgaatcgtgaagtaatcgtttagctctggttgacggttatttatcgaaagccccacaatcttcctttgatatcaaacgacgattgacataatggcatatgtaatgtgtgtatgcatatctgtcgttgtctctggattatgcatttgtgtgaagcgatctctggcaaataaataaactgcaatttggatgatgctgtttgtttctgtatccgtgtgtagtaataaagtttgtgctactacattcttcatccgttacaattttcgattctttggttgaaataccactcccgtttaaggaactgttttgtttttctgctgctgactagcttcaaatattttccactgcagtcaagcctaaggatgcggcgaggtggtgatgctatggattcacgaccttatttctgcctgggagatctttgggaatcattcagggaatggagtgcttatggggccggtgttccacttgtgctaaatggcagtgactctgtgattcagtattatgtgccatatctttctgctatccaactatttgcagatccatcaagacctgcttcaagaaacagttatttttctcgcttacttaaggcgtcctggggatgaaagtgatggggactctatggatactagcagtgagagcagcattgagaatgacgttgagcggctaagagtctcatcatcactggaaggtaaacatcgactggaaaatggtggcatacgaagtgatgatggtgaaggcgatgcatcttcaagttttccaatatttcagtatatggagagggatcctccatatggtagagagcctctgacagacaaggtatcaactcttgcacacagatttccagctctgaagacattcaaaagctgtgatcttctgccatcgagctggatgtctgttgcatggtaccccatttatagaattccaacagggccaacattgaaggatctcgatgcctgttttttgacattccattgcctagcaacaccttgcaaggattgtgaccctcctacgccagcatgccctggctttgggggaattaaccgcggcacgactgcagctgggaaactatctttgcctatctttgggctggcaccttacaaattacgtgcctccatttggacatctgacaaaactcaagaacgggacctcgtcacctctctgatgcaggaggctgacagctggctccgcagaatacaagtagaccatccggatttccggtttttcgtatcccatttcagtacaacgtggagatgacccgtggctgtaaatggttcatttagtatgaatatggcatagagacacctgagtgcccttttgtaacgggggggaatgtatgagttataagcctgcgtgcataactttttctcttgtctccagtaagctgtatcttttgtaggtttgttttgttgtggggtgaaagtaaagatggatggtggaaaaagcaaaattggaggcattgtggaactgaagtgaaatatggggaaaaaagaataaagatttccagttattagagttgagaaaggtccagtgtttcatgtttaggttacctgagctgcccgtgtgtttggtccatcactcatcggttctacaataaatagaggaaatacaccagaagtacagatactgatcttcgaagtgcagatgttggtcctcttcgttttaacagtgggtttcttcaggtagttttttttaaatagagcgtttaggccttattcaatctgactgttgcaatacaattaggcaaaatcttattcaatctgagagcaa

SEQ ID NO: 52110 - DNA, 710 bp, Zea Mays
cgtgtccatttgctgtgggcggtattgtatctttaagcaaaggctgcatgccacaaggaggaaaatgttctcaggaaacatagtttttgtctcaaagtgacaaataaattaaaacacaatggtcttacttgttttttacagcatgctcacaatacggcaaggaaataatgttcaattaatttggttgccttggtgaagcgagggggcttaccagaaaactcgggcagcagaaatgcactccgtagaagttaatatatcttttagcaattgcaatgtcaacgaaattataatcactcaaacttgtatgttggatctactttaaatagtagtagacagaagtgttgccgatgctgggctgctggcccacggttgctagtggactagtggtactggtagtgattgggatggtacatgcatcagaaagatttagtggatctcaacagctacttgtacattacaaaccctgggtgattgactaacctcacatttgtacaggactccatatgtgtcttagatacctttcttttaaaaaaaatgaaaagaaaaaatgctatcatgtgttaacttggtgatttcagtaaccagactataaaatgagatattgggatattctacctcagaaatactagagccgtaatctgcaatcttccctgttgagtgagagatggagagcatatgggacctgatgaaggcaacacgctggcttatag

SEQ ID NO: 52111 - DNA, 1641 bp, Zea Mays
cgccggctggttgactcgcgtcgcgtcatgtgcgcgtctctcgtctcgttgggattatattccccatccgcaccgcttgccaatcacccgataataagtagcaggggcagggagaacgaagacgacgacgacgtacgccacccgtaagtgagccgagagccctcgagataccatcagctagctagataaccagccagcgcgagcatggaggcggcggcggcggcggtcctgcaccggacggtggaggcgaacggcatctcgatgcacgtggcggagtccggccccgacggcgacggcgcgcccgcggtggtgttcctgcacggcttcccggagctctggtactcgtggcgccaccagatggcgcacctggccgcgcggggctaccgctgcgtggcgccggacctccgcggctacggcggcaccgccgcgccgcccgacgtcgcgtcctactccgccttccacgtcgtcggcgacgtcgtcgccctgctcgacgcgctcggcatccacaacaaggtgttcgtggtgggtcacgactggggcgccatcatcgcgtggtacctctgcctgttccggccggaccgggtggcggcgcttgtcaacaccagcgccgccgccgtcacgcccatcgactacttccaccgcacctacgggcccacctactacatctgccgcttccaggagcctggtgtcgcagagaaggagttctcgccggccaacgccgggtacctgatgaagcggatcctgtgcaaccgcttcacctcctcggcggccggcgacgacaagcgaccgccggcggacgccgccgaggaggagccgctgccgccgtggctgacggaggaggacgtgggccacttcgcgtcggagttcgagcggacgggcttcacggggcccatcaactactaccgcaacatggaccgcaactgggagctggcggcgccgtgggcggacgccaaggtgcgggtgcccaccaggttcatcgtcggcgacggcgacctcacctaccactacccgggcatccaggactacatccacaagggcgggttcgaggccgacgtcccggggctcgagagcgtcgtcgtcatccccggcgccggccacttcgtccagcaggagaaggccgacgaggtcagccagcacatctacgacttcatctccaagttctgatacatgtgcatggatcgaccatcagcttgcttgcttacctgctaaagcctgtaatctcaacctcgatatccgtgctgccaacttgttttgtttttcgaactaagagtaataagtgttcgcatatatgtctggtttaatttgtgacttggacatggtatgttcgatgtgaaatggataaaccatgcgtttcgtaatttaaatgtacaatgcttgtaccggtgaccgtgtactgttgtcggacgatcaacagtggcatactggcatctatgttggaaactataccatgtccaatagctaccagaagcctaggcccgacgtgcctttcggttgagccagatcacgtacgagcgtctataaaaacaccctagacccctaggaattaaggtttcgaggcctcatagcggctgcaactgcgtgaggtgctagaggaggcgagcggcgaccggacgtcgatgacgacttcctgcaggctgcgac

SEQ ID NO: 52112 - DNA, 2633 bp, Zea Mays
ggcgcggtgccggtggttgcttgttgttgttgctgtccgccgcgatgctttgcgcttgcgcccatgacatccacgtgtccgcatgatacagatgcgtcacggtcgacgtcatcgtcaaggcagctgcacgagaacaaggagaagaagtagaagtcgacactccaacggtgcgcgccggctggttgactcgcgtcgcgtcatcaggggcagggagaacgaagacgacgacgacgtacgccacccgtaagtgagccgagagccctcgagataccatcagctagctagataaccagccagcgcgagcatggaggcggcggcggcggcggtcctgcaccggacggtggaggcgaacggcatctcgatgcacgtggcggagtccggccccgacggcgacggcgcgcccgcggtggtgttcctgcacggcttcccggagctctggtactcgtggcgccaccagatggcgcacctggccgcgcggggctaccgctgcgtggcgccggacctccgcggctacggcggcaccgccgcgccgcccgacgtcgcgtcctactccgccttccacgtcgtcggcgacgtcgtcgccctgctcgacgcgctcggcatccacaacaaggtccttccttttccgtatcaacgttgacttcttcaattcctctcgtgtgtactactgctataagcctataacacacttcgtactcatccatcctctgtgaagtgtgtgaacatatatacaaacgcctctacttctataattttttttaattttgaaaactaactaaaacaataattctaaaactgataaaaatcatctactcatcttaaaactaataataagccaataatatggaattcttcgcatccgtgtttcttcgaaattaaatttgatttttttattaattacgatctcccgtacgtacgtattgtttgctatccagccttttgttccgaggttaaagtaacaagctaattaagttaaagttaaactaagttcattttactgtaatctggtgagtctaatcagtacaccaagctagttaataggctgtttggtttgagaaatgagttagttcattatcttctcactcctcactttcctcactttttttgtttggtttgtggaatggaatgagttgatccatcatcacctcattcctcatagttagttagttagtagtaatataaggaatgaggtcatcccaccaaatttaaggaatggacccatgatgcaccactatattttggatgtagtgattcctcaaaccaaacacccctaagtttctttctttctatccctaagtggtgcagcgtatggccaggcatccgagaatatccaagaatatgtgtataaaacgcacatgttacatgtacgatagaataaagcggtggttgtagcatcagcatcatcaatttagcgtgtgcacatatgtaatcaaactagctagcatgcatgcttatcaaataattgcctgatctctcatcggtgacacaatggagcaataatcaatgtgttcgtggtgggtcacgactggggcgccatcatcgcgtggtacctctgcctgttccggccggaccgggtggcggcgcttgtcaacaccagcgccgccgccgtcacgcccatcgactacttccaccgcacctacgggcccacctactacatctgccgcttccaggagcctggtgtcgcagagaaggagttctcgccggccaacgccgggtacctgatgaagcggatcctgtgcaaccgcttcacctcctcggcggccggcgacgacaagcgaccgccggcggacgccgccgaggaggagccgctgccgccgtggctgacggaggaggacgtgggccacttcgcgtcggagttcgagcggacgggcttcacggggcccatcaactactaccgcaacatggaccgcaactgggagctggcggcgccgtgggcggacgccaaggtgcgggtgcccaccaggttcatcgtcggcgacggcgacctcacctaccactacccgggcatccaggactacatccacaagggcgggttcgaggccgacgtcccggggctcgagagcgtcgtcgtcatccccggcgccggccacttcgtccagcaggagaaggccgacgaggtcagccagcacatctacgacttcatctccaagttctgatacatgtgcatggatcgaccatcagcttgcttgcttacctgctaaagcctgtaatctcaacctcgatatccgtgctgccaacttgttttgtttttcgaactaagagtaataagtgttcgcatatatgtctggtttaatttgtgacttggacatggtatgttcgatgtgaaatggataaaccatgcgtttcgtaatttaaatgtacaatgcttgtaccggtgaccgtgtactgttgtcggacgatcaacagtggcatactggcatctatgttggaaactataccatgtccaatagctaccagaagcctaggcccgacgtgcctttcggttgagccagatcacgtacgagcgtctataaaaacaccctagacccctaggaattaaggtttcgaggcctcatagcggctgcaactgcgtgaggtgctagaggaggcgagcggcgaccggacgtcgatgacgacttcctgcaggctgcgac

SEQ ID NO: 52113 - DNA, 320 bp, Zea Mays
tcgcggagagaacgctccgtgagcacaagggtgatgccgtggctgcggttcgattcctgctgcgctagttccgagatttcgtcgccagcatcatatgttccccttcagttccacacaagaggtgatgatgtgaagtgaagcactagtacttttgtgtgcctgttttggaagtttgctattagaactatgttgcagaaaatttaagaatgagaataccatgcaaaaggtgtaatatgatttgtattagttatttgctattagaactaattaatcattatataaaattaaatactagacgaaatactaaaatttgatactat

SEQ ID NO: 52114 - DNA, 1303 bp, Zea Mays
gcctgtggcacagtgcacacactcgtctcatcggagaaaagtagatccggattagggttttagacggcgatgggtgcggcgggcgacgagaaggctgcggtggctgcggccgctgcggccgcgggggccggtgccgccgagggcgagggcgcggtggactccaaggaccttcagcagcagagcaaggcgctcgacaagctcactgatcatgtcgaggaccggcagctcgattcatcccgtgtccaatccgaatattggagatgtgccttcaacaatctacgctcgattgtctccagatgagcaactcactgcagaaacaagatacacctcttgacatctgaaagaaacggttcgaacacatacggcaagaacaatgagtcgacgatccgcaaacagcagatgcagacgaatctgcaaatggagggtggacaaacgcacgtaccgtggaggcggacgccagcgcggttgaggtggttgacgcgatcgggacgccagcgagggggccctggccaccgtcgcggcggggggccaggagcgctcctgcaccacgagcgcgcagatctgagaagggaggactacggctggcttcgtccgcgaaccgagtcgtcgtcctggtctaggcgttcccaggaagtcagcggcgagctccgccatgagcacgcgcacctcggtgcggctctggttcgtcgtgcccaccggccccgactcctggaacatgtacccagggcagcgccacggcaccacttcgaagatcctgctgctttgctgctagtagtggtagcgacggtggtgctagcggtggctgtggtttgagcggaggatttcttgagccacttgaggcgacgaggccatggcggcacttgcttcatccaaggaggctgactggaacgcgatgaggctgagggagaaagaattggctgctgtgaagatcaaccctgcggatgtcgaaattatcgctagtgagcttgagctggacaagaagatcgcggagagaacgctccgtgagcacaagggtgatgccgtggctgcggttcgattcctgctgcgctagttccgagatttcgtcgccagcatcatatgttccccttcagttccacacaagaggtgatgatgtgaagtgaagcactagtacttttgtgtgcctgttttggaagtttgctattagaactatgttgcagaaaatttaagaatgagaataccatgcaaaaggtgtaatatgatttgtattagttatttgctattagaactaattaatcattatataaaattaaatactagacgaaatactaaaatttgatactat

SEQ ID NO: 52115 - DNA, 1962 bp, Zea Mays
cccggtcgcgtactctgtcttctcgtggttctcccgtgcccctcgcgtgcgctctctgtctctcggggcgacgactaggcggctgctcgccggccgccgacgccgacgcccgccgccagattcccaggtatctatcttcgggacctcgaccggcgacgagcacccaacaggcgattgcagcttctgcgtttgccttcataggtctaggttttgctatcctgcttatatcagtgcttgcagtggtaatcttatggttttatggaagtttttggacgaccacttgtgtaatgattcttggaggtgttctctttttcttgaaacgcgaaagaataactcttcttgttgcctgtttatattcgatgtattgcgcgagatgctatgttggatggctcggattgcttttgggcctcaacttatctttcttttctagtgatattctagtgcagttcctaagggacaatgcagacaataaaaaattcaatggttcttcaaggtactcagagcgaagctctggtagacaaggcaatatctttgaagaatttcagccatcagcaaatagcacctaccaagccagatatgctcgagcttcagatcgagatcctggtgatccttcaacaagtggacctgagaaagagcttacctctgaagatgaagtggctcgtttactgaactgcactgaccactattcagcattaggtttccgtcgatatgagaacatagatgtatcatctcttaagagagaatacaagaaaaaggctatgttagtccatcctgataagaatatgggcaatgataaagctgctgatgcatttaaaaagcttcaaaatgcatatgagattcttcttgattcactgaaacgcaagacatatgatgatgagttgaggagggaagacctcttgaactacttcaggcagagtgtttctcaaaagaatggaagaaacagtactttccaacatgggttcagcccttcagaaggtgttgatgaaggtccttatggtctttccagaagaatagcttgtaaaaagtgcagcgactttcatctttggatttatactggaagagctaaatcacaagctagatggtgtcaggactgcaaggagttccatcaagctaaagatggcgatggatgggttgaacagtcctttcaacctgttctatttggcatgctgcagaagcctgatttacctcatgcatatgtttgcgcagaaagctacatatttgatgtcactgagtggttcaactgtcagggaatgagatgcccggcgaacactcacaaggcaaccttccatgtcaatgccaacatggcaaagcagagcagtggcaaggcgagtacctcaacgcagagggctggtaaggccccaagtggtgtaaacatggatggaggaggactcaacgaggaagagttcttcgagtggttccagaatgcagtcaactctggaatgtttgaaactacattcggggcacaaggcgacccgacttctcctggtaacggaagcaatgccaagagtagcggtagcagcagcagcaacaacaatagtaggaaaaagaagaaaggaaagaaacagtggtaatcaaagcaaagcaggctggggtctggtgatcacttctcggggcagagaaaaaaagaaacaaacagaataagcgttttgggtatgtaaatacaactcggaaaaatcggtccctggcttaaatggttcctaacgagaggccactgtaaatccttgttcatcatggggtgctgacggctgttaaatggccattataaatcctggttcattatgttgtcggatcttaatatatcgtcctggccctcggtaacttgctagcaaaaaaaatgttataaagcaagttactacgaaacaagaatttgcaagattaaagatagttttttttgactgtcatggggaatccctacctggatttcattgattctagcatggctaagccacgcctcaacgacct

SEQ ID NO: 52116 - DNA, 2726 bp, Zea Mays
cccggtcgcgtactctgtcttctcgtggttctcccgtgcccctcgcgtgcgctctctgtctctcggggcgacgactaggcggctgctcgccggccgccgacgccgacgcccgccgccagattcccaggtatctatcttcgggacctcgaccggcgacgagcacccaacaggtactgattttgctgaagcaacagaataatgtattagccctcatgcgttaacacctacataaactttgagtatcctagtttcaagtgaaatcatggcacgaaaaggaaatcaaagtaagagtggccccaatcatgcttcacctaagtggaaaaatacaactgatggtgatgcactaagtacaccagaaagaggtgctgcagatagtgaaaatccgagttcacatgttcaaggcagatcaaagggtcctgaaggaagcagtgagaagaaaggaagaggcagcaaaaggaacagcacaaacaacggcatatcatcctctggaaaaaaacaacaaatggacaccggttgtgatataaacagttcagaagaaaaggagattccggtaagaggtactaaaaatagaagaggtagccagaaaccctctaggcgcggttttggtagaagttttttcattgagcaaacaacatcgtctggattggcaggaaatgttttggagaagaccaggtgcattgcttgcatggctgcatccattattagagcttccatgatatatctagttgaagaaggcaaaagatttatcgaaaaaagaatgccaacaatcaacacttatatggcttttgtcaacaaagggcatgcatatgtcttaagcaaaattgcatatgtttatcccatagttcgagcttggatgcttaatgctggaagggtgatgctgctcttgtttacagtttggttagactgcaatgtaaggggctttgattctttgctacgattggggacaaactctctcctagcagtactttggtgcagcacgctgtcaacttttgcaatgattgggataaaaaagatgctcatattcatggcgattgcagcttctgcgtttgccttcataggtctaggttttgctatcctgcttatatcagtgcttgcagtggtaatcttatggttttatggaagtttttggacgaccacttgtgtaatgattcttggaggtgttctctttttcttgaaacgcgaaagaataactcttcttgttgcctgtttatattcgatgtattgcgcgagatgctatgttggatggctcggattgcttttgggcctcaacttatctttcttttctagtgatattctagtgcagttcctaagggacaatgcagacaataaaaaattcaatggttcttcaaggtactcagagcgaagctctggtagacaaggcaatatctttgaagaatttcagccatcagcaaatagcacctaccaagccagatatgctcgagcttcagatcgagatcctggtgatccttcaacaagtggacctgagaaagagcttacctctgaagatgaagtggctcgtttactgaactgcactgaccactattcagcattaggtttccgtcgatatgagaacatagatgtatcatctcttaagagagaatacaagaaaaaggctatgttagtccatcctgataagaatatgggcaatgataaagctgctgatgcatttaaaaagcttcaaaatgcatatgagaatggaagaaacagtactttccaacatgggttcagcccttcagaaggtgttgatgaaggtccttatggtctttccagaagaatagcttgtaaaaagtgcagcgactttcatctttggatttatactggaagagctaaatcacaagctagatggtgtcaggactgcaaggagttccatcaagctaaagatggcgatggatgggttgaacagtcctttcaacctgttctatttggcatgctgcagaagcctgatttacctcatgcatatgtttgcgcagaaagctacatatttgatgtcactgagtggttcaactgtcagggaatgagatgcccggcgaacactcacaaggcaaccttccatgtcaatgccaacatggcaaagcagagcagtggcaaggcgagtacctcaacgcagagggctggtaaggccccaagtggtgtaaacatggatggaggaggactcaacgaggaagagttcttcgagtggttccagaatgcagtcaactctggaatgtttgaaactacattcggggcacaaggcgacccgacttctcctggtaacggaagcaatgccaagagtagcggtagcagcagcagcaacaacaatagtaggaaaaagaagaaaggaaagaaacagtggtaatcaaagcaaagcaggctggggtctggtgatcacttctcggggcagagaaaaaaagaaacaaacagaataagcgttttgggtatgtaaatacaactcggaaaaatcggtccctggcttaaatggttcctaacgagaggccactgtaaatccttgttcatcatggggtgctgacggctgttaaatggccattataaatcctggttcattatgttgtcggatcttaatatatcgtcctggccctcggtaacttgctagcaaaaaaaatgttataaagcaagttactacgaaacaagaatttgcaagattaaagatagttttttttgactgtcatggggaatccctacctggatttcattgattctagcatggctaagccacgcctcaacgacct

SEQ ID NO: 52117 - DNA, 2655 bp, Zea Mays
cgtccttcccggtcgcgtactctgtcttctcgtggttctcccgtgcccctcgcgtgcgctctctgtctctcggggcgacgactaggcggctgctcgccggccgccgacgccgacgcccgccgccagattcccaggtatctatcttcgggacctcgaccggcgacgagcacccaacagtttcaagtgaaatcatggcacgaaaaggaaatcaaagtaagagtggccccaatcatgcttcacctaagtggaaaaatacaactgatggtgatgcactaagtacaccagaaagaggtgctgcagatagtgaaaatccgagttcacatgttcaaggcagatcaaagggtcctgaaggaagcagtgagaagaaaggaagaggcagcaaaaggaacagcacaaacaacggcatatcatcctctggaaaaaaacaacaaatggacaccggttgtgatataaacagttcagaagaaaaggagattccggtaagaggaaatgttttggagaagaccaggtgcattgcttgcatggctgcatccattattagagcttccatgatatatctagttgaagaaggcaaaagatttatcgaaaaaagaatgccaacaatcaacacttatatggcttttgtcaacaaagggcatgcatatgtcttaagcaaaattgcatatgtttatcccatagttcgagcttggatgcttaatgctggaagggtgatgctgctcttgtttacagtttggttagactgcaatgtaaggggctttgattctttgctacgattggggacaaactctctcctagcagtactttggtgcagcacgctgtcaacttttgcaatgattgggataaaaaagatgctcatattcatggcgattgcagcttctgcgtttgccttcataggtctaggttttgctatcctgcttatatcagtgcttgcagtggtaatcttatggttttatggaagtttttggacgaccacttgtgtaatgattcttggaggtgttctctttttcttgaaacgcgaaagaataactcttcttgttgcctgtttatattcgatgtattgcgcgagatgctatgttggatggctcggattgcttttgggcctcaacttatctttcttttctagtgatattctagtgcagttcctaagggacaatgcagacaataaaaaattcaatggttcttcaaggtactcagagcgaagctctggtagacaaggcaatatctttgaagaatttcagccatcagcaaatagcacctaccaagccagatatgctcgagcttcagatcgagatcctggtgatccttcaacaagtggacctgagaaagagcttacctctgaagatgaagtggctcgtttactgaactgcactgaccactattcagcattaggtttccgtcgatatgagaacatagatgtatcatctcttaagagagaatacaagaaaaaggctatgttagtccatcctgataagaatatgggcaatgataaagctgctgatgcatttaaaaagcttcaaaatgcatatgagattcttcttgattcactgaaacgcaagacatatgatgatgagttgaggagggaagacctcttgaactacttcaggcagagtgtttctcaaaagaatggaagaaacagtactttccaacatgggttcagcccttcagaaggtgttgatgaaggtccttatggtctttccagaagaatagcttgtaaaaagtgcagcgactttcatctttggatttatactggaagagctaaatcacaagctagatggtgtcaggactgcaaggagttccatcaagctaaagatggcgatggatgggttgaacagtcctttcaacctgttctatttggcatgctgcagaagcctgatttacctcatgcatatgtttgcgcagaaagctacatatttgatgtcactgagtggttcaactgtcagggaatgagatgcccggcgaacactcacaaggcaaccttccatgtcaatgccaacatggcaaagcagagcagtggcaaggcgagtacctcaacgcagagggctggtaaggccccaagtggtgtaaacatggatggaggaggactcaacgaggaagagttcttcgagtggttccagaatgcagtcaactctggaatgtttgaaactacattcggggcacaaggcgacccgacttctcctggtaacggaagcaatgccaagagtagcggtagcagcagcagcaacaacaatagtaggaaaaagaagaaaggaaagaaacagtggtaatcaaagcaaagcaggctggggtctggtgatcacttctcggggcagagaaaaaaagaaacaaacagaataagcgttttgggtatgtaaatacaactcggaaaaatcggtccctggcttaaatggttcctaacgagaggccactgtaaatccttgttcatcatggggtgctgacggctgttaaatggccattataaatcctggttcattatgttgtcggatcttaatatatcgtcctggccctcggtaacttgctagcaaaaaaaatgttataaagcaagttactacgaaacaagaatttgcaagattaaagatagttttttttgactgtcatggggaatccctacctggatttcattgattctagcatggctaagccacgcctcaacgacct

SEQ ID NO: 52118 - DNA, 2735 bp, Zea Mays
cccgtccttcccggtcgcgtactctgtcttctcgtggttctcccgtgcccctcgcgtgcgctctctgtctctcggggcgacgactaggcggctgctcgccggccgccgacgccgacgcccgccgccagattcccaggtatctatcttcgggacctcgaccggcgacgagcacccaacaggtactgattttgctgaagcaacagaataatgtattagccctcatgcgttaacacctacataaactttgagtatcctagtttcaagtgaaatcatggcacgaaaaggaaatcaaagtaagagtggccccaatcatgcttcacctaagtggaaaaatacaactgatggtgatgcactaagtacaccagaaagaggtgctgcagatagtgaaaatccgagttcacatgttcaaggcagatcaaagggtcctgaaggaagcagtgagaagaaaggaagaggcagcaaaaggaacagcacaaacaacggcatatcatcctctggaaaaaaacaacaaatggacaccggttgtgatataaacagttcagaagaaaaggagattccggtaagaggaaatgttttggagaagaccaggtgcattgcttgcatggctgcatccattattagagcttccatgatatatctagttgaagaaggcaaaagatttatcgaaaaaagaatgccaacaatcaacacttatatggcttttgtcaacaaagggcatgcatatgtcttaagcaaaattgcatatgtttatcccatagttcgagcttggatgcttaatgctggaagggtgatgctgctcttgtttacagtttggttagactgcaatgtaaggggctttgattctttgctacgattggggacaaactctctcctagcagtactttggtgcagcacgctgtcaacttttgcaatgattgggataaaaaagatgctcatattcatggcgattgcagcttctgcgtttgccttcataggtctaggttttgctatcctgcttatatcagtgcttgcagtggtaatcttatggttttatggaagtttttggacgaccacttgtgtaatgattcttggaggtgttctctttttcttgaaacgcgaaagaataactcttcttgttgcctgtttatattcgatgtattgcgcgagatgctatgttggatggctcggattgcttttgggcctcaacttatctttcttttctagtgatattctagtgcagttcctaagggacaatgcagacaataaaaaattcaatggttcttcaaggtactcagagcgaagctctggtagacaaggcaatatctttgaagaatttcagccatcagcaaatagcacctaccaagccagatatgctcgagcttcagatcgagatcctggtgatccttcaacaagtggacctgagaaagagcttacctctgaagatgaagtggctcgtttactgaactgcactgaccactattcagcattaggtttccgtcgatatgagaacatagatgtatcatctcttaagagagaatacaagaaaaaggctatgttagtccatcctgataagaatatgggcaatgataaagctgctgatgcatttaaaaagcttcaaaatgcatatgagattcttcttgattcactgaaacgcaagacatatgatgatgagttgaggagggaagacctcttgaactacttcaggcagagtgtttctcaaaagaatggaagaaacagtactttccaacatgggttcagcccttcagaaggtgttgatgaaggtccttatggtctttccagaagaatagcttgtaaaaagtgcagcgactttcatctttggatttatactggaagagctaaatcacaagctagatggtgtcaggactgcaaggagttccatcaagctaaagatggcgatggatgggttgaacagtcctttcaacctgttctatttggcatgctgcagaagcctgatttacctcatgcatatgtttgcgcagaaagctacatatttgatgtcactgagtggttcaactgtcagggaatgagatgcccggcgaacactcacaaggcaaccttccatgtcaatgccaacatggcaaagcagagcagtggcaaggcgagtacctcaacgcagagggctggtaaggccccaagtggtgtaaacatggatggaggaggactcaacgaggaagagttcttcgagtggttccagaatgcagtcaactctggaatgtttgaaactacattcggggcacaaggcgacccgacttctcctggtaacggaagcaatgccaagagtagcggtagcagcagcagcaacaacaatagtaggaaaaagaagaaaggaaagaaacagtggtaatcaaagcaaagcaggctggggtctggtgatcacttctcggggcagagaaaaaaagaaacaaacagaataagcgttttgggtatgtaaatacaactcggaaaaatcggtccctggcttaaatggttcctaacgagaggccactgtaaatccttgttcatcatggggtgctgacggctgttaaatggccattataaatcctggttcattatgttgtcggatcttaatatatcgtcctggccctcggtaacttgctagcaaaaaaaatgttataaagcaagttactacgaaacaagaatttgcaagattaaagatagttttttttgactgtcatggggaatccctacctggatttcattgattctagcatggctaagccacgcctcaacgacct

SEQ ID NO: 52119 - DNA, 2728 bp, Zea Mays
cccgtccttcccggtcgcgtactctgtcttctcgtggttctcccgtgcccctcgcgtgcgctctctgtctctcggggcgacgactaggcggctgctcgccggccgccgacgccgacgcccgccgccagattcccaggtatctatcttcgggacctcgaccggcgacgagcacccaacaggtactgattttgctgaagcaacagaataatgtattagccctcatgcgttaacacctacataaactttgagtatcctagtttcaagtgaaatcatggcacgaaaaggaaatcaaagtaagagtggccccaatcatgcttcacctaagtggaaaaatacaactgatggtgatgcactaagtacaccagaaagaggtgctgcagatagtgaaaatccgagttcacatgttcaaggcagatcaaagggtcctgaaggaagcagtgagaagaaaggaagaggcagcaaaaggaacagcacaaacaacggcatatcatcctctggaaaaaaacaacaaatggacaccggttgtgatataaacagttcagaagaaaaggagattccggaaatgttttggagaagaccaggtgcattgcttgcatggctgcatccattattagagcttccatgatatatctagttgaagaaggcaaaagatttatcgaaaaaagaatgccaacaatcaacacttatatggcttttgtcaacaaagggcatgcatatgtcttaagcaaaattgcatatgtttatcccatagttcgagcttggatgcttaatgctggaagggtgatgctgctcttgtttacagtttggttagactgcaatgtaaggggctttgattctttgctacgattggggacaaactctctcctagcagtactttggtgcagcacgctgtcaacttttgcaatgattgggataaaaaagatgctcatattcatggcgattgcagcttctgcgtttgccttcataggtctaggttttgctatcctgcttatatcagtgcttgcagtggtaatcttatggttttatggaagtttttggacgaccacttgtgtaatgattcttggaggtgttctctttttcttgaaacgcgaaagaataactcttcttgttgcctgtttatattcgatgtattgcgcgagatgctatgttggatggctcggattgcttttgggcctcaacttatctttcttttctagtgatattctagtgcagttcctaagggacaatgcagacaataaaaaattcaatggttcttcaaggtactcagagcgaagctctggtagacaaggcaatatctttgaagaatttcagccatcagcaaatagcacctaccaagccagatatgctcgagcttcagatcgagatcctggtgatccttcaacaagtggacctgagaaagagcttacctctgaagatgaagtggctcgtttactgaactgcactgaccactattcagcattaggtttccgtcgatatgagaacatagatgtatcatctcttaagagagaatacaagaaaaaggctatgttagtccatcctgataagaatatgggcaatgataaagctgctgatgcatttaaaaagcttcaaaatgcatatgagattcttcttgattcactgaaacgcaagacatatgatgatgagttgaggagggaagacctcttgaactacttcaggcagagtgtttctcaaaagaatggaagaaacagtactttccaacatgggttcagcccttcagaaggtgttgatgaaggtccttatggtctttccagaagaatagcttgtaaaaagtgcagcgactttcatctttggatttatactggaagagctaaatcacaagctagatggtgtcaggactgcaaggagttccatcaagctaaagatggcgatggatgggttgaacagtcctttcaacctgttctatttggcatgctgcagaagcctgatttacctcatgcatatgtttgcgcagaaagctacatatttgatgtcactgagtggttcaactgtcagggaatgagatgcccggcgaacactcacaaggcaaccttccatgtcaatgccaacatggcaaagcagagcagtggcaaggcgagtacctcaacgcagagggctggtaaggccccaagtggtgtaaacatggatggaggaggactcaacgaggaagagttcttcgagtggttccagaatgcagtcaactctggaatgtttgaaactacattcggggcacaaggcgacccgacttctcctggtaacggaagcaatgccaagagtagcggtagcagcagcagcaacaacaatagtaggaaaaagaagaaaggaaagaaacagtggtaatcaaagcaaagcaggctggggtctggtgatcacttctcggggcagagaaaaaaagaaacaaacagaataagcgttttgggtatgtaaatacaactcggaaaaatcggtccctggcttaaatggttcctaacgagaggccactgtaaatccttgttcatcatggggtgctgacggctgttaaatggccattataaatcctggttcattatgttgtcggatcttaatatatcgtcctggccctcggtaacttgctagcaaaaaaaatgttataaagcaagttactacgaaacaagaatttgcaagattaaagatagttttttttgactgtcatggggaatccctacctggatttcattgattctagcatggctaagccacgcctcaacgacct

SEQ ID NO: 52120 - DNA, 3696 bp, Zea Mays
ccactcacacatgccatcccacctctacctttctctgctctttcccctccaccctgctgctcccagtcccccccacctcgagactccactgctgactgctgtgcatcccaaccaaagcttccccgccgaattccccaacctcccgccggattcgccaagctcgtggattacggagcccgattcgtccgcggagctgcggcctgggccgcctattcgctcggttcattgcctcgctgattcgctccggcaccctctttctgcatgagctcggattggaggtggcgtttctgattccctctggcaggaggcgcgaggggcatgtgggtttcgctggtgtgggtccggggctgcgtgggcgtcacattcgtcgatttccagaccgggagggaagcccactagatctctcggctcctgcgctcctcgggagagtcggggaggctagctagctgtgatcggagaaggctggtgtagggttttgggaggggaggggacatggaggccgccaggtttggcacccagagcagccacttgtacggcggtgggcttgacctcaacaggcgcgagaagagggtgtttggctgggacctcaacgactggagctgggacagtcagcgctttgttgcgacgccggtgcagcagcaggcggcgaatggctctggactgaacagctcaccatcgtcgtccgaggaagccgtggaagaggtggctaggaatggtggcttcagaggtgacactgacaagaggaaaagggtcatcgatgatgacgaaaccgaggatcagtgcacggtcttgcatggtggcaggtcgctcagcttgaaaattgggggtgctgctggtggtgttggagcgatggagaacagcgatgtaaacgaggataatgagagaaatggaaagaaggtcagggtacaaggaggcagctcaagtgggccggcgtgccaggttgaggactgcggagcggatctggctgcagaaaaggattaccaccgccgacacaaggtttgcgagaagcatgctaaggccagcaccgccgtggtcgggaacactgtccagaggttctgccagcaatgtagtaggtttcaccttcttcatgaattcgatgaagggaggcgaagttgccggcgacgcttagcaggccacaatagacgcaggaggaaaacccggcctgatactgcaattggtgggactgcttcaattgaggacaaagtcagcaattatttattgttgagtcttatcggaatctgtgctaatatgaactctgacaatgctcagaatgcaaacggccaggagttgctatccactcttttgaagaacctaggatctgttgccaaatcactggagccaaaagaactatgtaaattcctggaggcataccaaagcctgcaaaatggattgaatgctggaacctctggaatagctaatggtgcagaagaggctgcaggaccatctaactctaagttgccttctgtgaatgatagtcattatggacaggcatcatcatctgttgtgccagtacaatcgaaggctaccacggtggtaactccagagcctgcatcatgcaagcttaaagattttgatctgaatgacacttgcattgatatggaaggctttgaggatgggcaagaaggttcacctacacctgcctttaagacagctgactctcctaattgtgcatcatggatgcagcaagattctactcaaagcccaccacagactagtggcaactcagattcaacatcaacacaatcattgtcaagctcaaatggagacactcagtgccgaactgataagattgtcttcaagcttttcgataaagttcccagtgacttacctccagttttgcggtcgcagattcttggttggttgtcgagtagcccatctgatatagaaagccatattagtcctggctgtattattctaactgtatatgttcggttagttgagtctgcatggcaagagctttctgagaatatgagcctgctcctgggtaagcttttgaatagctccactgacgacttttgggcatctggcttggtatttgtgatggttcggcaccacttagcttttatgctcaatggtcaaattatgttggacaggcctctggcacccagttctcatcattactgcaagattttatgtgtcagacctgttgctgcaccttattctgcaacaataaatttcagggtagaaggttttaacctactcagtacttcctcaaggctaatttgttcttttgaaggacactgcatattccatgaagacacggattctggagcagagaatgttgagtacaaggatagggacatcgaatgcctcagtttttgttgttctgttcctggtccaagaggaagaggatttatagaggtcgaagatagtggttttagcaatggcttcttccccttcataattgctgagaaggatgtatgcgctgaggtttctgagctggagagcatatttgagtcatccagtaatgaacatgcaaatgccagggaccaagctctggagtttctaaatgagctgggttggcttcttcatagagcgaacagaatgtctaaagaggatgaaactgacacatctctagctccctttaacatgtggagattcagaaatctcggtgtatttgccatggagcgggagtggtgtgccgtgatcaaaatgctgttagatttcttatttattggccttgttgatgtgggatctcggtctgcagaagagatggtgctttcagaaaatctgttgcatgctgctgtacggaggaagtctgttaacatggttagatttctgctgagatacaaaccaaataaaaactcgaagggaactgcacaggcatacttatttagacctgatgctctgggcccttcaaagattacccccctccatatagcagctgccactagtgatgcagaggatgtgttggacgcgcttacccatgatcctggactgattggaattagtgcttggagcaatgcacgggacgaaacaggttttaccccagaagactatgctcggcagagaggcaatggcgcttacctgaatctggtccaaaagaagattgataagcatcttggcgaaggccacgttgtcctcggtgttccgagcagtatatgccctgtaataaccgatggcgttaagcctggcgatgttagcctcgagatatgcagggcaatgtctgcatcagtgccaggttgcctcctctgcagccgtcaggcacggatgcatccaagttctacggcaaggaccttcctttataggccagcaatgttaactgtgatgggagtcgctgtggtttgtgtctgcgtgggcatactcctccacacctttcccagggtttatgccgcgcccacattcagatgggagctgctggagcgtggacccatgtaaattttaggatgaaataaacctagcagttttgtaacttgagagctctagcgcaaaggaacataattaccgtgtgaagaagttcctttgcatttgcagcaagatccggttgctgttgtaagcttatatatcgtcaatatcaactatatttacagcctaacatgcttcgattccattcatcatttttattgtagaatttgtttcttccttgcggagattttgtgagccgtcagaataaaacatgtccttgtttatgtaatcgttgagacataacatatcttggaatgacactgaaaaactcaagattttattaaaaaaaaa

SEQ ID NO: 52121 - DNA, 3967 bp, Zea Mays
ccactcacacatgccatcccacctctacctttctctgctctttcccctccaccctgctgctcccagtcccccccacctcgagactccactgctgactgctgtgcatcccaaccaaagcttccccgccgaattccccaacctcccgccggattcgccaagctcgtggattacggagcccgattcgtccgcggagctgcggcctgggccgcctattcgctcggttcattgcctcgctgattcgctccggcaccctctttctgcatgagctcggattggaggtggcgtttctgattccctctggcaggaggcgcgaggggcatgtgggtttcgctggtgtgggtccggggctgcgtgggcgtcacattcgtcgatttccagaccgggagggaagcccactagatctctcggctcctgcgctcctcgggagagtcggggaggctagctagctgtgatcggagaaggctggtgtagggttttgggaggggaggggacatggaggccgccaggtttggcacccagagcagccacttgtacggcggtgggcttgacctcaacaggcgcgagaagagggtgtttggctgggacctcaacgactggagctgggacagtcagcgctttgttgcgacgccggtgcagcagcaggcggcgaatggctctggactgaacagctcaccatcgtcgtccgaggaagccgtggaagaggtggctaggaatggtggcttcagaggtgacactgacaagaggaaaagggtcatcgatgatgacgaaaccgaggatcagtgcacggtcttgcatggtggcaggtcgctcagcttgaaaattgggggtgctgctggtggtgttggagcgatggagaacagcgatgtaaacgaggataatgagagaaatggaaagaaggtcagggtacaaggaggcagctcaagtgggccggcgtgccaggttgaggactgcggagcggatctggctgcagaaaaggattaccaccgccgacacaaggtttgcgagaagcatgctaaggccagcaccgccgtggtcgggaacactgtccagaggttctgccagcaatgtagtaggtttcaccttcttcatgaattcgatgaagggaggcgaagttgccggcgacgcttagcaggccacaatagacgcaggaggaaaacccggcctgatactgcaattggtgggactgcttcaattgaggacaaagtcagcaattatttattgttgagtcttatcggaatctgtgctaatatgaactctgacaatgctcagaatgcaaacggccaggagttgctatccactcttttgaagaacctaggatctgttgccaaatcactggagccaaaagaactatgtaaattcctggaggcataccaaagcctgcaaaatggattgaatgctggaacctctggaatagctaatggtgcagaagaggctgcaggaccatctaactctaagttgccttctgtgaatgatagtcattatggacaggcatcatcatctgttgtgccagtacaatcgaaggctaccacggtggtaactccagagcctgcatcatgcaagcttaaagattttgatctgaatgacacttgcattgatatggaaggctttgaggatgggcaagaaggttcacctacacctgcctttaagacagctgactctcctaattgtgcatcatggatgcagcaagattctactcaaagcccaccacagactagtggcaactcagattcaacatcaacacaatcattgtcaagctcaaatggagacactcagtgccgaactgataagattgtcttcaagcttttcgataaagttcccagtgacttacctccagttttgcggtcgcagattcttggttggttgtcgagtagcccatctgatatagaaagccatattagtcctggctgtattattctaactgtatatgttcggttagttgagtctgcatggcaagagctttctgagaatatgagcctgctcctgggtaagcttttgaatagctccactgacgacttttgggcatctggcttggtatttgtgatggttcggcaccacttagcttttatgctcaatggtcaaattatgttggacaggcctctggcacccagttctcatcattactgcaagattttatgtgtcagacctgttgctgcaccttattctgcaacaataaatttcagggtagaaggttttaacctactcagtacttcctcaaggacactgcatattccatgaagacacggattctggagcagagaatgttgagtacaaggatagggacatcgaatgcctcagtttttgttgttctgttcctggtccaagaggaagaggatttatagaggtcgaagatagtggttttagcaatggcttcttccccttcataattgctgagaaggatgtatgcgctgaggtttctgagctggagagcatatttgagtcatccagtaatgaacatgcaaatgccagggaccaagctctggagtttctaaatgagctgggttggcttcttcatagagcgaacagaatgtctaaagaggatgaaactgacacatctctagctccctttaacatgtggagattcagaaatctcggtgtatttgccatggagcgggagtggtgtgccgtgatcaaaatgctgttagatttcttatttattggccttgttgatgtgggatctcggtctgcagaagagatggtgctttcagaaaatctgttgcatgctgctgtacggaggaagtctgttaacatggttagatttctgctgagatacaaaccaaataaaaactcgaagggaactgcacaggcatacttatttagacctgatgctctgggcccttcaaagattacccccctccatatagcagctgccactagtgatgcagaggatgtgttggacgcgcttacccatgatcctggactgattggaattagtgcttggagcaatgcacgggacgaaacaggttttaccccagaagactatgctcggcagagaggcaatggcgcttacctgaatctggtccaaaagaagattgataagcatcttggcgaaggccacgttgtcctcggtgttccgagcagtatatgccctgtaataaccgatggcgttaagcctggcgatgttagcctcgagatatgcagggcaatgtctgcatcagtgccaggttgcctcctctgcagccgtcaggcacggatgcatccaagttctacggcaaggaccttcctttataggccagcaatgttaactgtgatgggagtcgctgtggtttgtgtctgcgtgggcatactcctccacacctttcccagggtttatgccgcgcccacattcagatgggagctgctggagcgtggacccatgtaaattttaggatgaaataaacctagcagttttgtaacttgagagctctagcgcaaaggaacataattaccgtgtgaagaagttcctttgcatttgcagcaagatccggttgctgttgtaagcttatatatcgtcaatatcaactatatttacagcctaacatgcttcgattccattcatcatttttattgtagaatttgtttcttccttgcggagattttgtgagccgtcagaataaaacatgtccttgtttatgtaatcgttgagacataacatatcttggaatgacactgaaaaactcaagattttattagttgaaagtatcttatacaatccaagctcctgcaaatttgcagggctgaaatgcgtgcacttgcttttcagcctataatcaagatgtacattttgcgataagcagacggttttctggtgaaatgctggatggaacatagcttacaagatcagcaaccagacccttctgcccaagccatagtagcctccccgtatcaatgatatctttacacatggatcccagagtggccctctcccctgctggtatacttcggattactctctcaattccgacggcctcctgatcaagcttctctggtc

SEQ ID NO: 52122 - DNA, 2984 bp, Zea Mays
attttaatgtttggttagggggatggatccgtcctcaagcttgtgtttggctggaaaacatgaatgatcgttccagtttgctcctacatacaatgaatatgtgctctacaatcacaatgagggagacagtgcacaaacaaagtatccctcggggagcaccgccacaagtgggcagggtgtagagttggctggcatcaccgtggcggcctcaaacagtccagtgtcgtcaagtgtatcatccaaccaggcagatcaggaagaaacaatgacaaccccaatcaaggacaaagttgatcctcctggagggctctacgacctcacagaattgcttgatattgatctgtctagctacccagccaagcttcctggaaccaccgatgtaagaaaacaatgatcaagcttgatgagatgggctattggtagggttgttgcgattgggttgggggaaaatcgtgattattatttttttactgttgaagagtgccatagttaacattgtaaaaatgtgtgtattatttgttctgatttttccccccgttgaagggggtttattcattgtcagcagttgctgccacacggcctccctcaccctgctctttattaaccgtgtaaaatgttgtgagcttaaggtgaaccttagtgtcaaggggagtctataccagtacaatattctgcgtttctggtggcgtattttttgtctctctatccaaggggcttgtttggccctagccaaaatttcttcgtgcctacagctttgaaacatgagctcggcacgctgtcaccacaacaggaacgtgataaatccagcattccgttccattacgcttgactcaaaagccggatgcggacaaggatcaggagatgggcgtgccttcttcctgagtcctgaccctgaatccacctgataaggacgagccgcaatgcagctcatcgacggcaggatgaggtcgaggccggcatggcatgggtgcgggcggctaacgatgcatgcatgtacgcactggcgatctcttgggcagtgacacgtgtgcgtaataagtctcgacgcataggtgcgcgcgcgcacgagcgagagacacaatagctatcttctatagctctctctatatacgtatgcttttgcttgtccacaactctcccttatcactgccgatcagatcatctctctctctctctctatcacacacacacacacacagttcttcgtcctgcagctataggactataggagagtagtaggatcgtcctgcagctatatatagtagcgcgatgggatccctgatgtccggttggagctcctcagtgctgagtgacaaggaagctcgtttgatgaggaaccggtcgctgacaaaggaggaggtggcggcgttctggaggcagcacggcagcataccgaacgccggttctccccgcgcggtaccggtacaatactgctgcacgaggagcgacgacgatggcttcttcctccccgagaacgccgccgatagctccgccgcgaaccgcggcagctggtggactcggagcagctgggcgttcctgaacgagccgccgccgccgacgacgacgagagaggcggaggcggtgttgggcagcagggcgccgaggagcttcgtcgtcgtcgcgtgtgaccagcagctccacgccgccgcccggatcgtcaccggcaacgcctaatatgagtgacatacgtgtctgtggttgtcacgtacgtactgtacacgtgtgcttatactactcgtaactatatatatatatatatagctttggcttgaggtttacgtgagtcatccaaatatatgtcttcctcttcgtataatagtaaataacatccatacacgcgtcatgctagctgctatatatctgcagaccatcgccgtgcaaaaaagttttctgaatagttattatttgatagctgagagaaatgcatagaaaagatatgcacgcacgttttggatgcaactccatgcatcaaataactcctaagtagttattaacctttctctctcgattaaaactcctatggttattaatttggccaaattaactagctagagcggccactaataacgccaccgcatgcagtttcataaatagaatctttattattatatgaaatatttccacctataaaaaccagctaggtgttcctccctcgctcctcctagaccagcgcaagccgttccttccatccactacacctgcttacacaacgcacgcacgaccatcaccaagcaagccgtgaagaacgaaatggccaagctcgccagcctcacaaccctcctcctcctcattgttgttgtcatggccaccgtctcatccgtgcacggcgcccgcgctttcgagagagtggatcaagtagccatcctgcatgagccgtcgctggaggcgaatccaccctcagcaacgctgctggaagtcgaggccctggtccctttcgatgaagaagcggtggacgggcccgtcgggtacgaccttgcaactgattgcacccgtaagacgccggtgttcgggccctaagcgacacagttgggtggccaagtgtagtgaggcaccggcgtctagcattgttgagtttgcgccagctatatatgtaaacaaacgaccttcaattaacgataggccgacatgaataatgagatgtgtgtgatgctgctaagtttgtgtaccaagactatgtatcctcttgatgtatcgctcttgataatctttaatataaaactttctttatcgaaaaaagagagttacaattaatactccctccgtttctttttatttgtcgctggatagtgcaattttacactatccagcgacaaataaaaagaaacggagggagtagttaggaaagagacttatgtcgtttgcatatagtactacacagataaaaacagtccgttttgagtgctgattcctcctccacagcttcagttagttctcagttttgtactttcattgttcccaagttacttctgaaaacttaagctagg

SEQ ID NO: 52123 - DNA, 3661 bp, Zea Mays
gttctacttctatgatgcttgggtcatctacaattttctctcactctgcttggcatgggtgggaggtcctggtgctgtggtggtaagtttgagtggccgaacactgaaaccatcatggattctgatgacttgctgttatccagctattcctctagatgggtgcgtatgtgtccttggtgcattaccaagcgactactacaacttttaaaaaatttctgtgacattgctctatagcgttttatacgaagatgcaaacaaggttgcttgcagtttgtgattctcaagcctattttggttgtcatcaccttcatactttacgcaaaaggaaaatacaaagatggaaacttcagtgtcaaccaatcctatctctacataactatcatatatacaatctcatactcaatggctttatatgcccttgcattgttctacgcggcttgcagagatctacttcggccatataatcctgtcccaaaattcatcatgatcaaatcagtggtgtttctcacatattggcagggcgtcctggttttccttgctgcaaaatctcgatttatcaagaatgctgataaggctgctgatctccagaactttgtgttgtgtgttgagatgctaatagcagccgttgggcacttatttgccttcccctacaaggaatatacaggtcccaatgcccgcccttcacgtggtttcagagaaagccttcttcatgctttgaaattcaatgatttctaccatgacaccgttcatcagtttgctcctacatacaatgaatatgtgctctacaatcacaatgagggagacagtgcacaaacaaagtatccctcggggagcaccgccacaagtgggcagggtgtagagttggctggcatcaccgtggcggcctcaaacagtccagtgtcgtcaagtgtatcatccaaccaggcagatcaggaagaaacaatgacaaccccaatcaaggacaaagttgatcctcctggagggctctacgacctcacagaattgcttgatattgatctgtctagctacccagccaagcttcctggaaccaccgatgtaagaaaacaatgatcaagcttgatgagatgggctattggtagggttgttgcgattgggttgggggaaaatcgtgattattatttttttactgttgaagagtgccatagttaacattgtaaaaatgtgtgtattatttgttctgatttttccccccgttgaagggggtttattcattgtcagcagttgctgccacacggcctccctcaccctgctctttattaaccgtgtaaaatgttgtgagcttaaggtgaaccttagtgtcaaggggagtctataccagtacaatattctgcgtttctggtggcgtattttttgtctctctatccaaggggcttgtttggccctagccaaaatttcttcgtgcctacagctttgaaacatgagctcggcacgctgtcaccacaacaggaacgtgataaatccagcattccgttccattacgcttgactcaaaagccggatgcggacaaggatcaggagatgggcgtgccttcttcctgagtcctgaccctgaatccacctgataaggacgagccgcaatgcagctcatcgacggcaggatgaggtcgaggccggcatggcatgggtgcgggcggctaacgatgcatgcatgtacgcactggcgatctcttgggcagtgacacgtgtgcgtaataagtctcgacgcataggtgcgcgcgcgcacgagcgagagacacaatagctatcttctatagctctctctatatacgtatgcttttgcttgtccacaactctcccttatcactgccgatcagatcatctctctctctctctctatcacacacacacacacacagttcttcgtcctgcagctataggactataggagagtagtaggatcgtcctgcagctatatatagtagcgcgatgggatccctgatgtccggttggagctcctcagtgctgagtgacaaggaagctcgtttgatgaggaaccggtcgctgacaaaggaggaggtggcggcgttctggaggcagcacggcagcataccgaacgccggttctccccgcgcggtaccggtacaatactgctgcacgaggagcgacgacgatggcttcttcctccccgagaacgccgccgatagctccgccgcgaaccgcggcagctggtggactcggagcagctgggcgttcctgaacgagccgccgccgccgacgacgacgagagaggcggaggcggtgttgggcagcagggcgccgaggagcttcgtcgtcgtcgcgtgtgaccagcagctccacgccgccgcccggatcgtcaccggcaacgcctaatatgagtgacatacgtgtctgtggttgtcacgtacgtactgtacacgtgtgcttatactactcgtaactatatatatatatatatagctttggcttgaggtttacgtgagtcatccaaatatatgtcttcctcttcgtataatagtaaataacatccatacacgcgtcatgctagctgctatatatctgcagaccatcgccgtgcaaaaaagttttctgaatagttattatttgatagctgagagaaatgcatagaaaagatatgcacgcacgttttggatgcaactccatgcatcaaataactcctaagtagttattaacctttctctctcgattaaaactcctatggttattaatttggccaaattaactagctagagcggccactaataacgccaccgcatgcagtttcataaatagaatctttattattatatgaaatatttccacctataaaaaccagctaggtgttcctccctcgctcctcctagaccagcgcaagccgttccttccatccactacacctgcttacacaacgcacgcacgaccatcaccaagcaagccgtgaagaacgaaatggccaagctcgccagcctcacaaccctcctcctcctcattgttgttgtcatggccaccgtctcatccgtgcacggcgcccgcgctttcgagagagtggatcaagtagccatcctgcatgagccgtcgctggaggcgaatccaccctcagcaacgctgctggaagtcgaggccctggtccctttcgatgaagaagcggtggacgggcccgtcgggtacgaccttgcaactgattgcacccgtaagacgccggtgttcgggccctaagcgacacagttgggtggccaagtgtagtgaggcaccggcgtctagcattgttgagtttgcgccagctatatatgtaaacaaacgaccttcaattaacgataggccgacatgaataatgagatgtgtgtgatgctgctaagtttgtgtaccaagactatgtatcctcttgatgtatcgctcttgataatctttaatataaaactttctttatcgaaaaaagagagttacaattaatactccctccgtttctttttatttgtcgctggatagtgcaattttacactatccagcgacaaataaaaagaaacggagggagtagttaggaaagagacttatgtcgtttgcatatagtactacacagataaaaacagtccgttttgagtgctgattcctcctccacagcttcagttagttctcagttttgtactttcattgttcccaagttacttctgaaaacttaagctagg

SEQ ID NO: 52124 - DNA, 3907 bp, Zea Mays
cgcctgccttctttttctgtagactttcccgtgaaagttagcctctcgtggaattgaagtacttactggtaattttgctggtgcgtgtggttctcatcacaatgcgaatgctcaccatgtcatggagctttatgcaatatagctgtgacttacttcgatgcgtgcagttgagttcattgaggtatatgctgtgatgtcattcctttcccttatcctccctaacaacgcgatatactttaattctattcgggagatctatgatgcttgggtcatctacaattttctctcactctgcttggcatgggtgggaggtcctggtgctgtggtggtaagtttgagtggccgaacactgaaaccatcatggattctgatgacttgctgttatccagctattcctctagatgggtgcgtatgtgtccttggtgcattaccaagcgactactacaacttttaaaaaatttctgtgacattgctctatagcgttttatacgaagatgcaaacaaggttgcttgcagtttgtgattctcaagcctattttggttgtcatcaccttcatactttacgcaaaaggaaaatacaaagatggaaacttcagtgtcaaccaatcctatctctacataactatcatatatacaatctcatactcaatggctttatatgcccttgcattgttctacgcggcttgcagagatctacttcggccatataatcctgtcccaaaattcatcatgatcaaatcagtggtgtttctcacatattggcagggcgtcctggttttccttgctgcaaaatctcgatttatcaagaatgctgataaggctgctgatctccagaactttgtgttgtgtgttgagatgctaatagcagccgttgggcacttatttgccttcccctacaaggaatatacaggtcccaatgcccgcccttcacgtggtttcagagaaagccttcttcatgctttgaaattcaatgatttctaccatgacaccgttcatcagtttgctcctacatacaatgaatatgtgctctacaatcacaatgagggagacagtgcacaaacaaagtatccctcggggagcaccgccacaagtgggcagggtgtagagttggctggcatcaccgtggcggcctcaaacagtccagtgtcgtcaagtgtatcatccaaccaggcagatcaggaagaaacaatgacaaccccaatcaaggacaaagttgatcctcctggagggctctacgacctcacagaattgcttgatattgatctgtctagctacccagccaagcttcctggaaccaccgatgtaagaaaacaatgatcaagcttgatgagatgggctattggtagggttgttgcgattgggttgggggaaaatcgtgattattatttttttactgttgaagagtgccatagttaacattgtaaaaatgtgtgtattatttgttctgatttttccccccgttgaagggggtttattcattgtcagcagttgctgccacacggcctccctcaccctgctctttattaaccgtgtaaaatgttgtgagcttaaggtgaaccttagtgtcaaggggagtctataccagtacaatattctgcgtttctggtggcgtattttttgtctctctatccaaggggcttgtttggccctagccaaaatttcttcgtgcctacagctttgaaacatgagctcggcacgctgtcaccacaacaggaacgtgataaatccagcattccgttccattacgcttgactcaaaagccggatgcggacaaggatcaggagatgggcgtgccttcttcctgagtcctgaccctgaatccacctgataaggacgagccgcaatgcagctcatcgacggcaggatgaggtcgaggccggcatggcatgggtgcgggcggctaacgatgcatgcatgtacgcactggcgatctcttgggcagtgacacgtgtgcgtaataagtctcgacgcataggtgcgcgcgcgcacgagcgagagacacaatagctatcttctatagctctctctatatacgtatgcttttgcttgtccacaactctcccttatcactgccgatcagatcatctctctctctctctctatcacacacacacacacacagttcttcgtcctgcagctataggactataggagagtagtaggatcgtcctgcagctatatatagtagcgcgatgggatccctgatgtccggttggagctcctcagtgctgagtgacaaggaagctcgtttgatgaggaaccggtcgctgacaaaggaggaggtggcggcgttctggaggcagcacggcagcataccgaacgccggttctccccgcgcggtaccggtacaatactgctgcacgaggagcgacgacgatggcttcttcctccccgagaacgccgccgatagctccgccgcgaaccgcggcagctggtggactcggagcagctgggcgttcctgaacgagccgccgccgccgacgacgacgagagaggcggaggcggtgttgggcagcagggcgccgaggagcttcgtcgtcgtcgcgtgtgaccagcagctccacgccgccgcccggatcgtcaccggcaacgcctaatatgagtgacatacgtgtctgtggttgtcacgtacgtactgtacacgtgtgcttatactactcgtaactatatatatatatatatagctttggcttgaggtttacgtgagtcatccaaatatatgtcttcctcttcgtataatagtaaataacatccatacacgcgtcatgctagctgctatatatctgcagaccatcgccgtgcaaaaaagttttctgaatagttattatttgatagctgagagaaatgcatagaaaagatatgcacgcacgttttggatgcaactccatgcatcaaataactcctaagtagttattaacctttctctctcgattaaaactcctatggttattaatttggccaaattaactagctagagcggccactaataacgccaccgcatgcagtttcataaatagaatctttattattatatgaaatatttccacctataaaaaccagctaggtgttcctccctcgctcctcctagaccagcgcaagccgttccttccatccactacacctgcttacacaacgcacgcacgaccatcaccaagcaagccgtgaagaacgaaatggccaagctcgccagcctcacaaccctcctcctcctcattgttgttgtcatggccaccgtctcatccgtgcacggcgcccgcgctttcgagagagtggatcaagtagccatcctgcatgagccgtcgctggaggcgaatccaccctcagcaacgctgctggaagtcgaggccctggtccctttcgatgaagaagcggtggacgggcccgtcgggtacgaccttgcaactgattgcacccgtaagacgccggtgttcgggccctaagcgacacagttgggtggccaagtgtagtgaggcaccggcgtctagcattgttgagtttgcgccagctatatatgtaaacaaacgaccttcaattaacgataggccgacatgaataatgagatgtgtgtgatgctgctaagtttgtgtaccaagactatgtatcctcttgatgtatcgctcttgataatctttaatataaaactttctttatcgaaaaaagagagttacaattaatactccctccgtttctttttatttgtcgctggatagtgcaattttacactatccagcgacaaataaaaagaaacggagggagtagttaggaaagagacttatgtcgtttgcatatagtactacacagataaaaacagtccgttttgagtgctgattcctcctccacagcttcagttagttctcagttttgtactttcattgttcccaagttacttctgaaaacttaagctagg

SEQ ID NO: 52125 - DNA, 4542 bp, Zea Mays
aaagccgatgctatcaacgctaactgttaacccctctccgtttgcccaagtgcccaagcccaaccacccgcaccaagccaaaccaggacagagagagagagagagcacgcggcgcggccccgccgagccgagcgcctgcctgcaaggctcccctcctccctttcgcttcctccttcgatcggccccgcccagctgctgctgctcgcgccgccgcggtgagacccgggaggagggcctggtggtgggcggccccgatggagtgggcgtcggcggcgtacacggccgcggcgctggtgtgcgcggcggcggcgtgcgtggtcgcgctcgcgcacatctaccgccacctcctccactacgccgagccaatctaccagcggttcatcgtccgcatcatattcatggtcccggtaaatgctcaacgctcgccgctcatacctaaccctcgcggcggcagatctggcgccgagcttttccgtactgggtgagctcgagggcgcgtcgcggttgttagctggactagggccggtttgcgagagctagttgcttgcctgtgcgcgattgttaggtttcagtaggtatgtaaggcgcctgccttctttttctgtagactttcccgtgaaagttagcctctcgtggaattgaagtacttactggtaattttgctggtgcgtgtggttctcatcacaatgcgaatgctcaccatgtcatggagctttatgcaatatagctgtgacttacttcgatgcgtgcagttgagttcattgaggttctcatcagagtccatctggatcttcttcacccttgtgtccctttgcttttgtctacaagccctttttatgtgtattgcgcatttcattatattaaccccaaagtcatgtgcttttctgcaggtatatgctgtgatgtcattcctttcccttatcctccctaacaacgcgatatactttaattctattcgggagatctatgatgcttgggtcatctacaattttctctcactctgcttggcatgggtgggaggtcctggtgctgtggtggtaagtttgagtggccgaacactgaaaccatcatggattctgatgacttgctgttatccagctattcctctagatgggcgttttatacgaagatgcaaacaaggttgcttgcagtttgtgattctcaagcctattttggttgtcatcaccttcatactttacgcaaaaggaaaatacaaagatggaaacttcagtgtcaaccaatcctatctctacataactatcatatatacaatctcatactcaatggctttatatgcccttgcattgttctacgcggcttgcagagatctacttcggccatataatcctgtcccaaaattcatcatgatcaaatcagtggtgtttctcacatattggcagggcgtcctggttttccttgctgcaaaatctcgatttatcaagaatgctgataaggctgctgatctccagaactttgtgttgtgtgttgagatgctaatagcagccgttgggcacttatttgccttcccctacaaggaatatacaggtcccaatgcccgcccttcacgtggtttcagagaaagccttcttcatgctttgaaattcaatgatttctaccatgacaccgttcatcagtttgctcctacatacaatgaatatgtgctctacaatcacaatgagggagacagtgcacaaacaaagtatccctcggggagcaccgccacaagtgggcagggtgtagagttggctggcatcaccgtggcggcctcaaacagtccagtgtcgtcaagtgtatcatccaaccaggcagatcaggaagaaacaatgacaaccccaatcaaggacaaagttgatcctcctggagggctctacgacctcacagaattgcttgatattgatctgtctagctacccagccaagcttcctggaaccaccgatgtaagaaaacaatgatcaagcttgatgagatgggctattggtagggttgttgcgattgggttgggggaaaatcgtgattattatttttttactgttgaagagtgccatagttaacattgtaaaaatgtgtgtattatttgttctgatttttccccccgttgaagggggtttattcattgtcagcagttgctgccacacggcctccctcaccctgctctttattaaccgtgtaaaatgttgtgagcttaaggtgaaccttagtgtcaaggggagtctataccagtacaatattctgcgtttctggtggcgtattttttgtctctctatccaaggggcttgtttggccctagccaaaatttcttcgtgcctacagctttgaaacatgagctcggcacgctgtcaccacaacaggaacgtgataaatccagcattccgttccattacgcttgactcaaaagccggatgcggacaaggatcaggagatgggcgtgccttcttcctgagtcctgaccctgaatccacctgataaggacgagccgcaatgcagctcatcgacggcaggatgaggtcgaggccggcatggcatgggtgcgggcggctaacgatgcatgcatgtacgcactggcgatctcttgggcagtgacacgtgtgcgtaataagtctcgacgcataggtgcgcgcgcgcacgagcgagagacacaatagctatcttctatagctctctctatatacgtatgcttttgcttgtccacaactctcccttatcactgccgatcagatcatctctctctctctctctatcacacacacacacacacagttcttcgtcctgcagctataggactataggagagtagtaggatcgtcctgcagctatatatagtagcgcgatgggatccctgatgtccggttggagctcctcagtgctgagtgacaaggaagctcgtttgatgaggaaccggtcgctgacaaaggaggaggtggcggcgttctggaggcagcacggcagcataccgaacgccggttctccccgcgcggtaccggtacaatactgctgcacgaggagcgacgacgatggcttcttcctccccgagaacgccgccgatagctccgccgcgaaccgcggcagctggtggactcggagcagctgggcgttcctgaacgagccgccgccgccgacgacgacgagagaggcggaggcggtgttgggcagcagggcgccgaggagcttcgtcgtcgtcgcgtgtgaccagcagctccacgccgccgcccggatcgtcaccggcaacgcctaatatgagtgacatacgtgtctgtggttgtcacgtacgtactgtacacgtgtgcttatactactcgtaactatatatatatatatatagctttggcttgaggtttacgtgagtcatccaaatatatgtcttcctcttcgtataatagtaaataacatccatacacgcgtcatgctagctgctatatatctgcagaccatcgccgtgcaaaaaagttttctgaatagttattatttgatagctgagagaaatgcatagaaaagatatgcacgcacgttttggatgcaactccatgcatcaaataactcctaagtagttattaacctttctctctcgattaaaactcctatggttattaatttggccaaattaactagctagagcggccactaataacgccaccgcatgcagtttcataaatagaatctttattattatatgaaatatttccacctataaaaaccagctaggtgttcctccctcgctcctcctagaccagcgcaagccgttccttccatccactacacctgcttacacaacgcacgcacgaccatcaccaagcaagccgtgaagaacgaaatggccaagctcgccagcctcacaaccctcctcctcctcattgttgttgtcatggccaccgtctcatccgtgcacggcgcccgcgctttcgagagagtggatcaagtagccatcctgcatgagccgtcgctggaggcgaatccaccctcagcaacgctgctggaagtcgaggccctggtccctttcgatgaagaagcggtggacgggcccgtcgggtacgaccttgcaactgattgcacccgtaagacgccggtgttcgggccctaagcgacacagttgggtggccaagtgtagtgaggcaccggcgtctagcattgttgagtttgcgccagctatatatgtaaacaaacgaccttcaattaacgataggccgacatgaataatgagatgtgtgtgatgctgctaagtttgtgtaccaagactatgtatcctcttgatgtatcgctcttgataatctttaatataaaactttctttatcgaaaaaagagagttacaattaatactccctccgtttctttttatttgtcgctggatagtgcaattttacactatccagcgacaaataaaaagaaacggagggagtagttaggaaagagacttatgtcgtttgcatatagtactacacagataaaaacagtccgttttgagtgctgattcctcctccacagcttcagttagttctcagttttgtactttcattgttcccaagttacttctgaaaacttaagctagg

SEQ ID NO: 52126 - DNA, 4059 bp, Zea Mays
aaagccgatgctatcaacgctaactgttaacccctctccgtttgcccaagtgcccaagcccaaccacccgcaccaagccaaaccaggacagagagagagagagagcacgcggcgcggccccgccgagccgagcgcctgcctgcaaggctcccctcctccctttcgcttcctccttcgatcggccccgcccagctgctgctgctcgcgccgccgcggtgagacccgggaggagggcctggtggtgggcggccccgatggagtgggcgtcggcggcgtacacggccgcggcgctggtgtgcgcggcggcggcgtgcgtggtcgcgctcgcgcacatctaccgccacctcctccactacgccgagccaatctaccagcggttcatcgtccgcatcatattcatggtcccggtatatgctgtgatgtcattcctttcccttatcctccctaacaacgcgatatactttaattctattcgggagatctatgatgcttgggtcatctacaattttctctcactctgcttggcatgggtgggaggtcctggtgctgtggtggtaagtttgagtggccgaacactgaaaccatcatggattctgatgacttgctgttatccagctattcctctagatgggcgttttatacgaagatgcaaacaaggttgcttgcagtttgtgattctcaagcctattttggttgtcatcaccttcatactttacgcaaaaggaaaatacaaagatggaaacttcagtgtcaaccaatcctatctctacataactatcatatatacaatctcatactcaatggctttatatgcccttgcattgttctacgcggcttgcagagatctacttcggccatataatcctgtcccaaaattcatcatgatcaaatcagtggtgtttctcacatattggcagggcgtcctggttttccttgctgcaaaatctcgatttatcaagaatgctgataaggctgctgatctccagaactttgtgttgtgtgttgagatgctaatagcagccgttgggcacttatttgccttcccctacaaggaatatacaggtcccaatgcccgcccttcacgtggtttcagagaaagccttcttcatgctttgaaattcaatgatttctaccatgacaccgttcatcagtttgctcctacatacaatgaatatgtgctctacaatcacaatgagggagacagtgcacaaacaaagtatccctcggggagcaccgccacaagtgggcagggtgtagagttggctggcatcaccgtggcggcctcaaacagtccagtgtcgtcaagtgtatcatccaaccaggcagatcaggaagaaacaatgacaaccccaatcaaggacaaagttgatcctcctggagggctctacgacctcacagaattgcttgatattgatctgtctagctacccagccaagcttcctggaaccaccgatgtaagaaaacaatgatcaagcttgatgagatgggctattggtagggttgttgcgattgggttgggggaaaatcgtgattattatttttttactgttgaagagtgccatagttaacattgtaaaaatgtgtgtattatttgttctgatttttccccccgttgaagggggtttattcattgtcagcagttgctgccacacggcctccctcaccctgctctttattaaccgtgtaaaatgttgtgagcttaaggtgaaccttagtgtcaaggggagtctataccagtacaatattctgcgtttctggtggcgtattttttgtctctctatccaaggggcttgtttggccctagccaaaatttcttcgtgcctacagctttgaaacatgagctcggcacgctgtcaccacaacaggaacgtgataaatccagcattccgttccattacgcttgactcaaaagccggatgcggacaaggatcaggagatgggcgtgccttcttcctgagtcctgaccctgaatccacctgataaggacgagccgcaatgcagctcatcgacggcaggatgaggtcgaggccggcatggcatgggtgcgggcggctaacgatgcatgcatgtacgcactggcgatctcttgggcagtgacacgtgtgcgtaataagtctcgacgcataggtgcgcgcgcgcacgagcgagagacacaatagctatcttctatagctctctctatatacgtatgcttttgcttgtccacaactctcccttatcactgccgatcagatcatctctctctctctctctatcacacacacacacacacagttcttcgtcctgcagctataggactataggagagtagtaggatcgtcctgcagctatatatagtagcgcgatgggatccctgatgtccggttggagctcctcagtgctgagtgacaaggaagctcgtttgatgaggaaccggtcgctgacaaaggaggaggtggcggcgttctggaggcagcacggcagcataccgaacgccggttctccccgcgcggtaccggtacaatactgctgcacgaggagcgacgacgatggcttcttcctccccgagaacgccgccgatagctccgccgcgaaccgcggcagctggtggactcggagcagctgggcgttcctgaacgagccgccgccgccgacgacgacgagagaggcggaggcggtgttgggcagcagggcgccgaggagcttcgtcgtcgtcgcgtgtgaccagcagctccacgccgccgcccggatcgtcaccggcaacgcctaatatgagtgacatacgtgtctgtggttgtcacgtacgtactgtacacgtgtgcttatactactcgtaactatatatatatatatatagctttggcttgaggtttacgtgagtcatccaaatatatgtcttcctcttcgtataatagtaaataacatccatacacgcgtcatgctagctgctatatatctgcagaccatcgccgtgcaaaaaagttttctgaatagttattatttgatagctgagagaaatgcatagaaaagatatgcacgcacgttttggatgcaactccatgcatcaaataactcctaagtagttattaacctttctctctcgattaaaactcctatggttattaatttggccaaattaactagctagagcggccactaataacgccaccgcatgcagtttcataaatagaatctttattattatatgaaatatttccacctataaaaaccagctaggtgttcctccctcgctcctcctagaccagcgcaagccgttccttccatccactacacctgcttacacaacgcacgcacgaccatcaccaagcaagccgtgaagaacgaaatggccaagctcgccagcctcacaaccctcctcctcctcattgttgttgtcatggccaccgtctcatccgtgcacggcgcccgcgctttcgagagagtggatcaagtagccatcctgcatgagccgtcgctggaggcgaatccaccctcagcaacgctgctggaagtcgaggccctggtccctttcgatgaagaagcggtggacgggcccgtcgggtacgaccttgcaactgattgcacccgtaagacgccggtgttcgggccctaagcgacacagttgggtggccaagtgtagtgaggcaccggcgtctagcattgttgagtttgcgccagctatatatgtaaacaaacgaccttcaattaacgataggccgacatgaataatgagatgtgtgtgatgctgctaagtttgtgtaccaagactatgtatcctcttgatgtatcgctcttgataatctttaatataaaactttctttatcgaaaaaagagagttacaattaatactccctccgtttctttttatttgtcgctggatagtgcaattttacactatccagcgacaaataaaaagaaacggagggagtagttaggaaagagacttatgtcgtttgcatatagtactacacagataaaaacagtccgttttgagtgctgattcctcctccacagcttcagttagttctcagttttgtactttcattgttcccaagttacttctgaaaacttaagctagg

SEQ ID NO: 52127 - DNA, 4163 bp, Zea Mays
ttccgacccaccaatccgacagaaacgaacaaggctaatttactacccgattttttttaaaaaaacaagttaagccaaaaaccagacgcgaaaagccgatgctatcaacgctaactgttaacccctctccgtttgcccaagtgcccaagcccaaccacccgcaccaagccaaaccaggacagagagagagagagagcacgcggcgcggccccgccgagccgagcgcctgcctgcaaggctcccctcctccctttcgcttcctccttcgatcggccccgcccagctgctgctgctcgcgccgccgcggtgagacccgggaggagggcctggtggtgggcggccccgatggagtgggcgtcggcggcgtacacggccgcggcgctggtgtgcgcggcggcggcgtgcgtggtcgcgctcgcgcacatctaccgccacctcctccactacgccgagccaatctaccagcggttcatcgtccgcatcatattcatggtcccggtatatgctgtgatgtcattcctttcccttatcctccctaacaacgcgatatactttaattctattcgggagatgtaagttctacttctatgatgcttgggtcatctacaattttctctcactctgcttggcatgggtgggaggtcctggtgctgtggtggtaagtttgagtggccgaacactgaaaccatcatggattctgatgacttgctgttatccagctattcctctagatgggcgttttatacgaagatgcaaacaaggttgcttgcagtttgtgattctcaagcctattttggttgtcatcaccttcatactttacgcaaaaggaaaatacaaagatggaaacttcagtgtcaaccaatcctatctctacataactatcatatatacaatctcatactcaatggctttatatgcccttgcattgttctacgcggcttgcagagatctacttcggccatataatcctgtcccaaaattcatcatgatcaaatcagtggtgtttctcacatattggcagggcgtcctggttttccttgctgcaaaatctcgatttatcaagaatgctgataaggctgctgatctccagaactttgtgttgtgtgttgagatgctaatagcagccgttgggcacttatttgccttcccctacaaggaatatacaggtcccaatgcccgcccttcacgtggtttcagagaaagccttcttcatgctttgaaattcaatgatttctaccatgacaccgttcatcagtttgctcctacatacaatgaatatgtgctctacaatcacaatgagggagacagtgcacaaacaaagtatccctcggggagcaccgccacaagtgggcagggtgtagagttggctggcatcaccgtggcggcctcaaacagtccagtgtcgtcaagtgtatcatccaaccaggcagatcaggaagaaacaatgacaaccccaatcaaggacaaagttgatcctcctggagggctctacgacctcacagaattgcttgatattgatctgtctagctacccagccaagcttcctggaaccaccgatgtaagaaaacaatgatcaagcttgatgagatgggctattggtagggttgttgcgattgggttgggggaaaatcgtgattattatttttttactgttgaagagtgccatagttaacattgtaaaaatgtgtgtattatttgttctgatttttccccccgttgaagggggtttattcattgtcagcagttgctgccacacggcctccctcaccctgctctttattaaccgtgtaaaatgttgtgagcttaaggtgaaccttagtgtcaaggggagtctataccagtacaatattctgcgtttctggtggcgtattttttgtctctctatccaaggggcttgtttggccctagccaaaatttcttcgtgcctacagctttgaaacatgagctcggcacgctgtcaccacaacaggaacgtgataaatccagcattccgttccattacgcttgactcaaaagccggatgcggacaaggatcaggagatgggcgtgccttcttcctgagtcctgaccctgaatccacctgataaggacgagccgcaatgcagctcatcgacggcaggatgaggtcgaggccggcatggcatgggtgcgggcggctaacgatgcatgcatgtacgcactggcgatctcttgggcagtgacacgtgtgcgtaataagtctcgacgcataggtgcgcgcgcgcacgagcgagagacacaatagctatcttctatagctctctctatatacgtatgcttttgcttgtccacaactctcccttatcactgccgatcagatcatctctctctctctctctatcacacacacacacacacagttcttcgtcctgcagctataggactataggagagtagtaggatcgtcctgcagctatatatagtagcgcgatgggatccctgatgtccggttggagctcctcagtgctgagtgacaaggaagctcgtttgatgaggaaccggtcgctgacaaaggaggaggtggcggcgttctggaggcagcacggcagcataccgaacgccggttctccccgcgcggtaccggtacaatactgctgcacgaggagcgacgacgatggcttcttcctccccgagaacgccgccgatagctccgccgcgaaccgcggcagctggtggactcggagcagctgggcgttcctgaacgagccgccgccgccgacgacgacgagagaggcggaggcggtgttgggcagcagggcgccgaggagcttcgtcgtcgtcgcgtgtgaccagcagctccacgccgccgcccggatcgtcaccggcaacgcctaatatgagtgacatacgtgtctgtggttgtcacgtacgtactgtacacgtgtgcttatactactcgtaactatatatatatatatatagctttggcttgaggtttacgtgagtcatccaaatatatgtcttcctcttcgtataatagtaaataacatccatacacgcgtcatgctagctgctatatatctgcagaccatcgccgtgcaaaaaagttttctgaatagttattatttgatagctgagagaaatgcatagaaaagatatgcacgcacgttttggatgcaactccatgcatcaaataactcctaagtagttattaacctttctctctcgattaaaactcctatggttattaatttggccaaattaactagctagagcggccactaataacgccaccgcatgcagtttcataaatagaatctttattattatatgaaatatttccacctataaaaaccagctaggtgttcctccctcgctcctcctagaccagcgcaagccgttccttccatccactacacctgcttacacaacgcacgcacgaccatcaccaagcaagccgtgaagaacgaaatggccaagctcgccagcctcacaaccctcctcctcctcattgttgttgtcatggccaccgtctcatccgtgcacggcgcccgcgctttcgagagagtggatcaagtagccatcctgcatgagccgtcgctggaggcgaatccaccctcagcaacgctgctggaagtcgaggccctggtccctttcgatgaagaagcggtggacgggcccgtcgggtacgaccttgcaactgattgcacccgtaagacgccggtgttcgggccctaagcgacacagttgggtggccaagtgtagtgaggcaccggcgtctagcattgttgagtttgcgccagctatatatgtaaacaaacgaccttcaattaacgataggccgacatgaataatgagatgtgtgtgatgctgctaagtttgtgtaccaagactatgtatcctcttgatgtatcgctcttgataatctttaatataaaactttctttatcgaaaaaagagagttacaattaatactccctccgtttctttttatttgtcgctggatagtgcaattttacactatccagcgacaaataaaaagaaacggagggagtagttaggaaagagacttatgtcgtttgcatatagtactacacagataaaaacagtccgttttgagtgctgattcctcctccacagcttcagttagttctcagttttgtactttcattgttcccaagttacttctgaaaacttaagctagg

SEQ ID NO: 52128 - DNA, 1768 bp, Zea Mays
atggagtcatcgctggcttggcctctctgttcttcttcctcccccaaccccgctgctctccattctagccgagttgttgctcttcttccaccgacctcgctgctcacctccgcagcattgtctagatccccaccgtcgctggccttcttcgaggcccagatccccattgtaggccccttgcttcttctcctcaaccggagcttccaaaactcccttgcagagcttgtagaggttatggaaggtatgggtgtgccttcaccaccgacagttgggactccgtcggcctcgccctgccgcattacgtcccccgttgatgataccaatgcgtcgcttggccaagaaccagagtgcgcattgacatatatcagacaggacgatcctgacacattcattatctcgggaaattttcatccaaggcatcaaatcgattgggattcaattgaagtagaagaaaggtggaatgaggaaggaagacaggatgttactagtgaacgaggattgtatattcaactcggtttgcataatgaagatgagagggtatttaagcaaagggaagatgattcaagtgctcattgtgctggaaataatagggaagaatttcacgatgaagcttcaactgccatgccttgttctgattttgtattagatgggacaaggactatctatgatatgaacaatcctgtaatggagcctggtagctttctggatctgcccttggtcaagattcaaatatggcttctgcagggttggctcgggtgggtgagtggtgcgactcgtcctctcatgaggctcgtcaccttgagcaacatgccgatcctgcagcagctgcacctggaggagcagctcctgcgccgcacatcggacaactggtgtgtcatcaacgatggcatggcccctgctaccattctcatgggaaggaagattcaatcatgtattggtctccttgtgccccatgttgagttgctaatttggttttgcgtgatggcaggactgcaggagagtctcggagcttgtcgacatacagccggtcctctgggaccaagtgccgattgtgaggaggttcagtggaggtggcacgtcattgttgattggggaacggtggttgtgactttcatttgcaacaagaatgccgttgccgggctgcagatttatggcaaaaaatttgacagatttggtgaatttcatctgcgtgagaatggcaagaaaccacagatttcttgtgccgcatgaaggagtacataccttcgcggtcagttttcaccgatgaggtcactgcggccctgggagaacacttctcagttcagcccgtggatctacaagcagttctttccggtgatgaaggatccgtgccttctacaaagctgctgtcacaacaggacctagaaagaaattgtttcgtccaaagaatcccttaacaatatagaaagttgaagcgtgaccatgcttgtcgtttttgttgtgaaatatgagcagttttgtcgagctgtgaattcattcaaacattatggtcaacccagtacgtacatacgaatgcccaccaccatctttagtaacaaatggttatgttttggattgtaggtctaccgttccaagcttgggttacacgttatttgcctatgggctctagaccgagtgctaaaactatgagagactggctccaacatactctgtaaatggttatgtactctaaattataaagaaattttttgtcttcttatttcagcagcgtcttttaaactacttatttcagcagcagcgtcttttaaac

SEQ ID NO: 52129 - DNA, 5501 bp, Zea Mays
aggaaacagagtaacaaccatatccctgattattagctacagttgttacgtgctcctttcttccttctgcgattgatacctccttccttagctacttcggtcggcatctagtacagcaggtattcgtcatgtttattgccgcccaacaaaagtatctataacaccaccgagcactatcatggagtcatcgctggcttggcctctctgttcttcttcctcccccaaccccgctgctctccattctagccgagttgttgctcttcttccaccgacctcgctgctcacctccgcagcattgtctagatccccaccgtcgctggccttcttcgaggcccagatccccattgtaggccccttgcttcttctcctcaaccggagcttccaaaactcccttgcagagcttgtagaggttatggaaggtatgggtgtgccttcaccaccgacagttgggactccgtcggcctcgccctgccgcattacgtcccccgttgatgataccaatgcgtcgcttggccaagaaccagagtgcgcattgacatatatcagacaggacgatcctgacacattcattatctcgggaaattttcatccaaggcatcaaatcgattgggattcaattgaagtagaagaaaggtggaatgaggaaggaagacaggatgttactagtgaacgaggattgtatattcaactcggtttgcataatgaagatgagagggtatttaagcaaagggaagatgattcaagtgctcattgtgctggaaataatagggaagaatttcacgatgaagcttcaactgccatgccttgttctgattttgtattagatgggacaaggactatctatgatatgaacaatcctgtaatggagcctggtagcttgtacgcatcaatggagcagtttagacttgcaattagacagtacgccataaataaagaatttgagttgggcattgaggctaccaacaagactagattcagagggtactgtaaagggcctgattgtccttggagcattcatgcgaggtctgagatgaaaggatcacccactattcaagttattgtcttaaacgatgagcacacatgtacatcgagcgggagacgcaagacaacgacaccaacaggtgcttgggttgcggcaagggctcttccactacttatgaaaaaaccacatatgggtgctaaggagttacaaagtatgttgcaagatacatttggatgcactattacatatgatacaatttggcatgggaaagagaaagctctgaagcaattgtttgggagttgggaagagagtttccaacttctatggtcttggagagaagcagttatacagaagtcaccggatagtattatcgagttggatgttaaaatggatgagggccggccattttttagcagatttttttgtgcacttggtccttgcattactggtttcaaagagggatgtagaccttatcttagtgttgactcaactgctcttaatggaagatggaatggtcacctgtgttgtgccataggggttgatggacagaattggatgtaccctgttgcttatggattctttgaggcagaaacaacagaaaactggacatggttctttcagcagttgcgcaaggctgtgggagatcttcctctactagcattgtgttcagatgcttgcaaaggtctaaaaaatgccatgaacactgttttccctcaagctgaaaaaagggagtgtttcagacacctaatgcagaactacgtgaagcaatttgttggatccgagtacatgtatcctgcagctagagcatataggagggaggtgttcgaccattacttttccaatgtccaagaaattcccaaggtgtctagttggttatatgagcatcatgatagtttgtggtatcgtagtgggtttaatccagccatcaagtgcgactatgttaccaacaacatagcagaagtgttcaacaattggattaaggattggaaagatctgcctgtctgtgacttggctgacaagataaggaaggaaatcatggagttgtttcataggaggagggaaataggacagaggttgcaaggtcgaatactaccctccgtggtccatatcctccatgtaaggactagaggtttaggtcacttaacagttaagaaagctgacaattacattgcggaggtgagggataataataatgtgcactctaagcacattgtgaatgctcaattgagacaatgttcatgcaacgagtggcagcatacggggaagccatgtcaccatgcccttcgcttaataacaacacaacaatttagagatgttcggatggaagattttgtggatgactactactcagttgataagttcatgaaggcttactcgagggtagtggagccaattggtgacaaatctttctggcctacagtgccatttgcaaaagaggtgtgtgcttctattgggaagcgtggagttggccgtcaaaggaaaaacatgattaaagggtgcctagagggaggaagtggtaagaagccaaacgaaaatgaaaatgtcaaaactaagaagatgattcgtgggaagttcaagtgtccaaactgtggtgaattgggacacaggaaagccagctacaaatgtcctttgaatggaacaaaaaaacggaaaaggagagcaaggaaaaatgttactaaaggttggttcccaaaagatgttgaggcatgatgatggtgcatgcactagccacacaaccacccccatgtgatgattgtgatgccagtattgcgaaaatctctccactttcatctcccagacctatctagaggctagtgctggaccagtgtaccctaggagctgggtgccaggtgcggtggcgggcggggcctagcaaagcatgacgctgtaggagggatccagtcatccgatacgtcagcactccggcacagcagtaggcatctcggaagctggcagggccacagggcaccacgcccaaggcttagccgcgcaggcactgagcagccaagtagtcaggcagtcagtgagcagcagcagacggcagcaaggctggaagcgcgaagtacctatataggcatataagtttagttcgaccgggagtttacttctctgttatctgtgacttgcccgaccccgacttgatgtgcattgtagattatcagaaattgattaatgatttaatcacagattttaatcaactcaacacgtcgagaagaatatttttgtgctcatagttttttagttcaagcaatgttaatactagtggtacttccctgagttcatatcaatgcttagtcttgggctcctcagaaatgcaaattctttctttggcttgcaattagaaacaagtgttggactgctgataatctggagaagaggggttgcagcacccaagcagctgccctttgtgtgaccaagaaagggaaacgatacaacacatcatcactacctgtgtttttgcccggcaattctggtttcttatctttgacactcgggatgagtcacctcgctcttagggctgatgagcggtcgtttgaggactggtggaggaaggccagcaacagtacaaggataagagaaaagggatcaactgtgtcattattttgggggcttggtgcctctggctgcatagaaatagaacgttttttatgggaatcatccattcagagggtgcagcaacatttcagtgacgagttctcctgttggctcttggtgcgcgccaggagtttgggtcagcttggtctccctagttccatgagtaatatcggatctaatccttttactcctctataacctttttgcttttcttttgtttcttttttctgttttagctatggatgtaagtcatgttttctctctctctaatataaagatgtgcagctctcctgcgcgttctagaaaaaatgaatgtaaaatttgatcttcaattgtttattggcccattataaaattgtacaaagcttctccaaatatgccaattgatccattacaattgtttcataactactgtttatggattttgggactgcagaactgatggattctaacagatgtaacagacctacagtagggatgctaggccaaggagttaaaatatatccacatgttagaatatttcgtaactgtagtaacttcaacattatatagattaatcatgaacttttagttgtattaaacaaataagctctgtatgttcattgttgtagaactaagtttattgtgaatttgtgaacacatatatttgttcatgaaactgcattggatttggactaacaaagtttgtgtatgtgatatgtttttagtctggatctgcccttggtcaagattcaaatatggcttctgcagggttggctcgggtgggtgagtggtgcgactcgtcctctcatgaggctcgtcaccttgagcaacatgccgatcctgcagcagctgcacctggaggagcagctcctgcgccgcacatcggacaactggtgtgtcatcaacgatggcatggcccctgctaccattctcatgggaaggaagattcaatcatgtattggtctccttgtgccccatgttgagttgctaatttggttttgcgtgatggcaggactgcaggagagtctcggagcttgtcgacatacagccggtcctctgggaccaagtgccgattgtgaggaggttcagtggaggtggcacgtcattgttgattggggaacggtggttgtgactttcatttgcaacaagaatgccgttgccgggctgcagatttatggcaaaaaatttgacagatttggtgaatttcatctgcgtgagaatgactatgcatttagtcactcgaaagtttggcggaaatgctcaatcaataacaaaaaatcgttgggttcatcacacgtcgttcttgtgggattatgatgtaaaaaatatggattatctcaaaatcccaaagcgtgcacctgaatatcgactggcaagaaaccacagatttcttgtgccgcatgaaggagtacataccttcgcggtcagttttcaccgatgaggtcactgcggccctgggagaacacttctcagttcagcccgtggatctacaagcagttctttccggtgatgaaggatccgtgccttctacaaagctgctgtcacaacaggacctagaaagaaattgtttcgtccaaagaatcccttaacaatatagaaagttgaagcgtgaccatgcttgtcgtttttgttgtgaaatatgagcagttttgtcgagctgtgaattcattcaaacattatggtcaacccagtacgtacatacgaatgcccaccaccatctttagtaacaaatggttatgttttggattgtaggtctaccgttccaagcttgggttacacgttatttgcctatgggctctagaccgagtgctaaaactatgagagactggctccaacatactctgtaaatggttatgtactctaaattataaagaaattttttgtcttcttatttcagcagcgtcttttaaactacttatttcagcagcagcgtcttttaaac

SEQ ID NO: 52130 - DNA, 6716 bp, Zea Mays
cttctatctaatgttggatacatgtagttcacataaactacaaaaatatcttgaaaacataattgagaatgtaccgaggacaaaggcattgaaagtttaagacatggatataatgttccaacgacaaggacattaaaccataaatataatgctccaagaacatcgacattcaaacatcaatgtctaagtctaaaccatcttgacgattatcatcacttggtccactatcacgagaagtaggtggtgtttggccataatcatcattgatgtctagatcatcggccaccaaaggttcatagactttatcctcgtctgatccttgctcttgtacagctggtgaactcaaatttacaccatgtcgagagtacgtcctaggcagattacgatcttgaagcattagtgatgcactggtggctttatcaacatgagcccatgaaagattttattagtgctggactttttctgtactcatttcaactcattccttgtcccattggaactcttctaagatcaaagggttgaaatttgtcccttccacatgcctcttttgaaaacgtttagcaatctttcggttgtattaaatagaccaaatcgttcgattgttggtgctccaaccggtttcttttttacatggatctgaaatttaagcactaattaacaacagaaagtacatgaaatttattaatagttttgaaataaatacaagttagttgcttacaaattcgacaatgctccaattgtgctcacaactagagtcgaacaacaaagaccgaggatgcgtcttgcaaacttttgaagctctctagcaaggcgaccaaaagcattccaccaaacaactaaaacaaaaaacattatatctatcttacaaatttggaatgcttaaaatttaatcaacataaaatagaagtttaatacttatgagggctctttgttttttgttgcatcacaactgtttgctttccaaagctctccccgcccattaccaactctcctcttacaatcttgatgtctgggtttcctggtgtctctcaagggggagtgtagtggaagatgggaatgacacaaggtgtaggggggaagagggcgctgatcaccctgatcaccggcgctggtgctgtgcccgaccaggatggtcaaagatgatcccgccctattgggacatctttcttcctttgatgcctaataccaactatggcttgcacctttatagatgtaggtgacttatagcttaagaaaccagcagatacttttgggaaactagtatgctatttttaggaactaaaccaaccaaggaaacagagtaacaaccatatccctgattattagctacagttgttacgtgctcctttcttccttctgcgattgatacctccttccttagctacttcggtcggcatctagtacagcaggtattcgtcatgtttattgccgcccaacaaaagtatctataacaccaccgagcactatcatggagtcatcgctggcttggcctctctgttcttcttcctcccccaaccccgctgctctccattctagccgagttgttgctcttcttccaccgacctcgctgctcacctccgcagcattgtctagatccccaccgtcgctggccttcttcgaggcccagatccccattgtaggccccttgcttcttctcctcaaccggagcttccaaaactcccttgcagagcttgtagaggttatggaaggtatgggtgtgccttcaccaccgacagttgggactccgtcggcctcgccctgccgcattacgtcccccgttgatgataccaatgcgtcgcttggccaagaaccagagtgcgcattgacatatatcagacaggacgatcctgacacattcattatctcgggaaattttcatccaaggcatcaaatcgattgggattcaattgaagtagaagaaaggtggaatgaggaaggaagacaggatgttactagtgaacgaggattgtatattcaactcggtttgcataatgaagatgagagggtatttaagcaaagggaagatgattcaagtgctcattgtgctggaaataatagggaagaatttcacgatgaagcttcaactgccatgccttgttctgattttgtattagatgggacaaggactatctatgatatgaacaatcctgtaatggagcctggtagcttgtacgcatcaatggagcagtttagacttgcaattagacagtacgccataaataaagaatttgagttgggcattgaggctaccaacaagactagattcagagggtactgtaaagggcctgattgtccttggagcattcatgcgaggtctgagatgaaaggatcacccactattcaagttattgtcttaaacgatgagcacacatgtacatcgagcgggagacgcaagacaacgacaccaacaggtgcttgggttgcggcaagggctcttccactacttatgaaaaaaccacatatgggtgctaaggagttacaaagtatgttgcaagatacatttggatgcactattacatatgatacaatttggcatgggaaagagaaagctctgaagcaattgtttgggagttgggaagagagtttccaacttctatggtcttggagagaagcagttatacagaagtcaccggatagtattatcgagttggatgttaaaatggatgagggccggccattttttagcagatttttttgtgcacttggtccttgcattactggtttcaaagagggatgtagaccttatcttagtgttgactcaactgctcttaatggaagatggaatggtcacctgtgttgtgccataggggttgatggacagaattggatgtaccctgttgcttatggattctttgaggcagaaacaacagaaaactggacatggttctttcagcagttgcgcaaggctgtgggagatcttcctctactagcattgtgttcagatgcttgcaaaggtctaaaaaatgccatgaacactgttttccctcaagctgaaaaaagggagtgtttcagacacctaatgcagaactacgtgaagcaatttgttggatccgagtacatgtatcctgcagctagagcatataggagggaggtgttcgaccattacttttccaatgtccaagaaattcccaaggtgtctagttggttatatgagcatcatgatagtttgtggtatcgtagtgggtttaatccagccatcaagtgcgactatgttaccaacaacatagcagaagtgttcaacaattggattaaggattggaaagatctgcctgtctgtgacttggctgacaagataaggaaggaaatcatggagttgtttcataggaggagggaaataggacagaggttgcaaggtcgaatactaccctccgtggtccatatcctccatgtaaggactagaggtttaggtcacttaacagttaagaaagctgacaattacattgcggaggtgagggataataataatgtgcactctaagcacattgtgaatgctcaattgagacaatgttcatgcaacgagtggcagcatacggggaagccatgtcaccatgcccttcgcttaataacaacacaacaatttagagatgttcggatggaagattttgtggatgactactactcagttgataagttcatgaaggcttactcgagggtagtggagccaattggtgacaaatctttctggcctacagtgccatttgcaaaagaggtgtgtgcttctattgggaagcgtggagttggccgtcaaaggaaaaacatgattaaagggtgcctagagggaggaagtggtaagaagccaaacgaaaatgaaaatgtcaaaactaagaagatgattcgtgggaagttcaagtgtccaaactgtggtgaattgggacacaggaaagccagctacaaatgtcctttgaatggaacaaaaaaacggaaaaggagagcaaggaaaaatgttactaaaggttggttcccaaaagatgttgaggcatgatgatggtgcatgcactagccacacaaccacccccatgtgatgattgtgatgccagtattgcgaaaatctctccactttcatctcccagacctatctagaggctagtgctggaccagtgtaccctaggagctgggtgccaggtgcggtggcgggcggggcctagcaaagcatgacgctgtaggagggatccagtcatccgatacgtcagcactccggcacagcagtaggcatctcggaagctggcagggccacagggcaccacgcccaaggcttagccgcgcaggcactgagcagccaagtagtcaggcagtcagtgagcagcagcagacggcagcaaggctggaagcgcgaagtacctatataggcatataagtttagttcgaccgggagtttacttctctgttatctgtgacttgcccgaccccgacttgatgtgcattgtagattatcagaaattgattaatgatttaatcacagattttaatcaactcaacacgtcgagaagaatatttttgtgctcatagttttttagttcaagcaatgttaatactagtggtacttccctgagttcatatcaatgcttagtcttgggctcctcagaaatgcaaattctttctttggcttgcaattagaaacaagtgttggactgctgataatctggagaagaggggttgcagcacccaagcagctgccctttgtgtgaccaagaaagggaaacgatacaacacatcatcactacctgtgtttttgcccggcaattctggtttcttatctttgacactcgggatgagtcacctcgctcttagggctgatgagcggtcgtttgaggactggtggaggaaggccagcaacagtacaaggataagagaaaagggatcaactgtgtcattattttgggggcttggtgcctctggctgcatagaaatagaacgttttttatgggaatcatccattcagagggtgcagcaacatttcagtgacgagttctcctgttggctcttggtgcgcgccaggagtttgggtcagcttggtctccctagttccatgagtaatatcggatctaatccttttactcctctataacctttttgcttttcttttgtttcttttttctgttttagctatggatgtaagtcatgttttctctctctctaatataaagatgtgcagctctcctgcgcgttctagaaaaaatgaatgtaaaatttgatcttcaattgtttattggcccattataaaattgtacaaagcttctccaaatatgccaattgatccattacaattgtttcataactactgtttatggattttgggactgcagaactgatggattctaacagatgtaacagacctacagtagggatgctaggccaaggagttaaaatatatccacatgttagaatatttcgtaactgtagtaacttcaacattatatagattaatcatgaacttttagttgtattaaacaaataagctctgtatgttcattgttgtagaactaagtttattgtgaatttgtgaacacatatatttgttcatgaaactgcattggatttggactaacaaagtttgtgtatgtgatatgtttttagtctggatctgcccttggtcaagattcaaatatggcttctgcagggttggctcgggtgggtgagtggtgcgactcgtcctctcatgaggctcgtcaccttgagcaacatgccgatcctgcagcagctgcacctggaggagcagctcctgcgccgcacatcggacaactggtgtgtcatcaacgatggcatggcccctgctaccattctcatgggactgcaggagagtctcggagcttgtcgacatacagccggtcctctgggaccaagtgccgattgtgaggaggttcagtggaggtggcacgtcattgttgattggggaacggtggttgtgactttcatttgcaacaagaatgccgttgccgggctgcagatttatggcaaaaaatttgacagatttggtgaatttcatctgcgtgagaatgactatgcatttagtcactcgaaagtttggcggaaatgctcaatcaataacaaaaaatcgttgggttcatcacacgtcgttcttgtgggattatgatgtaaaaaatatggattatctcaaaatcccaaagcgtgcacctgaatatcgactggcaagaaaccacagatttcttgtgccgcatgaaggagtacataccttcgcggtcagttttcaccgatgaggtcactgcggccctgggagaacacttctcagttcagcccgtggatctacaagcagttctttccggtgatgaaggatccgtgccttctacaaagctgctgtcacaacaggacctagaaagaaattgtttcgtccaaagaatcccttaacaatatagaaagttgaagcgtgaccatgcttgtcgtttttgttgtgaaatatgagcagttttgtcgagctgtgaattcattcaaacattatggtcaacccagtacgtacatacgaatgcccaccaccatctttagtaacaaatggttatgttttggattgtaggtctaccgttccaagcttgggttacacgttatttgcctatgggctctagaccgagtgctaaaactatgagagactggctccaacatactctgtaaatggttatgtactctaaattataaagaaattttttgtcttcttatttcagcagcgtcttttaaactacttatttcagcagcagcgtcttttaaac

SEQ ID NO: 52131 - DNA, 6129 bp, Zea Mays
cttctatctaatgttggatacatgtagttcacataaactacaaaaatatcttgaaaacataattgagaatgtaccgaggacaaaggcattgaaagtttaagacatggatataatgttccaacgacaaggacattaaaccataaatataatgctccaagaacatcgacattcaaacatcaatgtctaagtctaaaccatcttgacgattatcatcacttggtccactatcacgagaagtaggtggtgtttggccataatcatcattgatgtctagatcatcggccaccaaaggttcatagactttatcctcgtctgatccttgctcttgtacagctggtgaactcaaatttacaccatgtcgagagtacgtcctaggcagattacgatcttgaagcattagtgatgcactggtggctttatcaacatgagcccatgaaagattttattagtgctggactttttctgtactcatttcaactcattccttgtcccattggaactcttctaagatcaaagggttgaaatttgtcccttccacatgcctcttttgaaaacgtttagcaatctttcggttgtattaaatagaccaaatcgttcgattgttggtgctccaaccggtttcttttttacatggatctgaaatttaagcactaattaacaacagaaagtacatgaaatttattaatagttttgaaataaatacaagttagttgcttacaaattcgacaatgctccaattgtgctcacaactagagtcgaacaacaaagaccgaggatgcgtcttgcaaacttttgaagctctctagcaaggcgaccaaaagcattccaccaaacaactaaaacaaaaaacattatatctatcttacaaatttggaatgcttaaaatttaatcaacataaaatagaagtttaatacttatgagggctctttgttttttgttgcatcacaactgtttgctttccaaagctctccccgcccattaccaactctcctcttacaatcttgatgtctgggtttcctggtgtctctcaagggggagtgtagtggaagatgggaatgacacaaggtgtaggggggaagagggcgctgatcaccctgatcaccggcgctggtgctgtgcccgaccaggatggtcaaagatgatcccgccctattgggacatctttcttcctttgatgcctaataccaactatggcttgcacctttatagatgtaggtgacttatagcttaagaaaccagcagatacttttgggaaactagtatgctatttttaggaactaaaccaaccaaggaaacagagtaacaaccatatccctgattattagctacagttgttacgtgctcctttcttccttctgcgattgatacctccttccttagctacttcggtcggcatctagtacagcaggtattcgtcatgtttattgccgcccaacaaaagtatctataacaccaccgagcactatcatggagtcatcgctggcttggcctctctgttcttcttcctcccccaaccccgctgctctccattctagccgagttgttgctcttcttccaccgacctcgctgctcacctccgcagcattgtctagatccccaccgtcgctggccttcttcgaggcccagatccccattgtaggccccttgcttcttctcctcaaccggagcttccaaaactcccttgcagagcttgtagaggttatggaaggtatgggtgtgccttcaccaccgacagttgggactccgtcggcctcgccctgccgcattacgtcccccgttgatgataccaatgcgtcgcttggccaagaaccagagtgcgcattgacatatatcagacaggacgatcctgacacattcattatctcgggaaattttcatccaaggcatcaaatcgattgggattcaattgaagtagaagaaaggtggaatgaggaaggaagacaggatgttactagtgaacgaggattgtatattcaactcggtttgcataatgaagatgagagggtatttaagcaaagggaagatgattcaagtgctcattgtgctggaaataatagggaagaatttcacgatgaagcttcaactgccatgccttgttctgattttgtattagatgggacaaggactatctatgatatgaacaatcctgtaatggagcctggtagcttgtacgcatcaatggagcagtttagacttgcaattagacagtacgccataaataaagaatttgagttgggcattgaggctaccaacaagactagattcagagggtactgtaaagggcctgattgtccttggagcattcatgcgaggtctgagatgaaaggatcacccactattcaagttattgtcttaaacgatgagcacacatgtacatcgagcgggagacgcaagacaacgacaccaacaggtgcttgggttgcggcaagggctcttccactacttatgaaaaaaccacatatgggtgctaaggagttacaaagtatgttgcaagatacatttggatgcactattacatatgatacaatttggcatgggaaagagaaagctctgaagcaattgtttgggagttgggaagagagtttccaacttctatggtcttggagagaagcagttatacagaagtcaccggatagtattatcgagttggatgttaaaatggatgagggccggccattttttagcagatttttttgtgcacttggtccttgcattactggtttcaaagagggatgtagaccttatcttagtgttgactcaactgctcttaatggaagatggaatggtcacctgtgttgtgccataggggttgatggacagaattggatgtaccctgttgcttatggattctttgaggcagaaacaacagaaaactggacatggttctttcagcagttgcgcaaggctgtgggagatcttcctctactagcattgtgttcagatgcttgcaaaggtctaaaaaatgccatgaacactgttttccctcaagctgaaaaaagggagtgtttcagacacctaatgcagaactacgtgaagcaatttgttggatccgagtacatgtatcctgcagctagagcatataggagggaggtgttcgaccattacttttccaatgtccaagaaattcccaaggtgtctagttggttatatgagcatcatgatagtttgtggtatcgtagtgggtttaatccagccatcaagtgcgactatgttaccaacaacatagcagaagtgttcaacaattggattaaggattggaaagatctgcctgtctgtgacttggctgacaagataaggaaggaaatcatggagttgtttcataggaggagggaaataggacagaggttgcaaggtcgaatactaccctccgtggtccatatcctccatgtaaggactagaggtttaggtcacttaacagttaagaaagctgacaattacattgcggaggtgagggataataataatgtgcactctaagcacattgtgaatgctcaattgagacaatgttcatgcaacgagtggcagcatacggggaagccatgtcaccatgcccttcgcttaataacaacacaacaatttagagatgttcggatggaagattttgtggatgactactactcagttgataagttcatgaaggcttactcgagggtagtggagccaattggtgacaaatctttctggcctacagtgccatttgcaaaagaggtgtgtgcttctattgggaagcgtggagttggccgtcaaaggaaaaacatgattaaagggtgcctagagggaggaagtggtaagaagccaaacgaaaatgaaaatgtcaaaactaagaagatgattcgtgggaagttcaagtgtccaaactgtggtgaattgggacacaggaaagccagctacaaatgtcctttgaatggaacaaaaaaacggaaaaggagagcaaggaaaaatgttactaaaggttggttcccaaaagatgttgaggcatgatgatggtgcatgcactagccacacaaccacccccatgtgatgattgtgatgccagtattgcgaaaatctctccactttcatctcccagacctatctagaggctagtgctggaccagtgtaccctaggagctgggtgccaggtgcggtggcgggcggggcctagcaaagcatgacgctgtaggagggatccagtcatccgatacgtcagcactccggcacagcagtaggcatctcggaagctggcagggccacagggcaccacgcccaaggcttagccgcgcaggcactgagcagccaagtagtcaggcagtcagtgagcagcagcagacggcagcaaggctggaagcgcgaagtacctatataggcatataagtttagttcgaccgggagtttacttctctgttatctgtgacttgcccgaccccgacttgatgtgcattgtagattatcagaaattgattaatgatttaatcacagattttaatcaactcaacacgtcgagaagaatatttttgtgctcatagttttttagttcaagcaatgttaatactagtggtacttccctgagttcatatcaatgcttagtcttgggctcctcagaaatgcaaattctttctttggcttgcaattagaaacaagtgttggactgctgataatctggagaagaggggttgcagcacccaagcagctgccctttgtgtgaccaagaaagggaaacgatacaacacatcatcactacctgtgtttttgcccggcaattctggtttcttatctttgacactcgggatgagtcacctcgctcttagggctgatgagcggtcgtttgaggactggtggaggaaggccagcaacagtacaaggataagagaaaagggatcaactgtgtcattattttgggggcttggtgcctctggctgcatagaaatagaacgttttttatgggaatcatccattcagagggtgcagcaacatttcagtgacgagttctcctgttggctcttggtgcgcgccaggagtttgggtcagcttggtctccctagttccatgaggttggctcgggtgggtgagtggtgcgactcgtcctctcatgaggctcgtcaccttgagcaacatgccgatcctgcagcagctgcacctggaggagcagctcctgcgccgcacatcggacaactggtgtgtcatcaacgatggcatggcccctgctaccattctcatgggactgcaggagagtctcggagcttgtcgacatacagccggtcctctgggaccaagtgccgattgtgaggaggttcagtggaggtggcacgtcattgttgattggggaacggtggttgtgactttcatttgcaacaagaatgccgttgccgggctgcagatttatggcaaaaaatttgacagatttggtgaatttcatctgcgtgagaatgactatgcatttagtcactcgaaagtttggcggaaatgctcaatcaataacaaaaaatcgttgggttcatcacacgtcgttcttgtgggattatgatgtaaaaaatatggattatctcaaaatcccaaagcgtgcacctgaatatcgactggcaagaaaccacagatttcttgtgccgcatgaaggagtacataccttcgcggtcagttttcaccgatgaggtcactgcggccctgggagaacacttctcagttcagcccgtggatctacaagcagttctttccggtgatgaaggatccgtgccttctacaaagctgctgtcacaacaggacctagaaagaaattgtttcgtccaaagaatcccttaacaatatagaaagttgaagcgtgaccatgcttgtcgtttttgttgtgaaatatgagcagttttgtcgagctgtgaattcattcaaacattatggtcaacccagtacgtacatacgaatgcccaccaccatctttagtaacaaatggttatgttttggattgtaggtctaccgttccaagcttgggttacacgttatttgcctatgggctctagaccgagtgctaaaactatgagagactggctccaacatactctgtaaatggttatgtactctaaattataaagaaattttttgtcttcttatttcagcagcgtcttttaaactacttatttcagcagcagcgtcttttaaac

SEQ ID NO: 52132 - DNA, 6708 bp, Zea Mays
cttctatctaatgttggatacatgtagttcacataaactacaaaaatatcttgaaaacataattgagaatgtaccgaggacaaaggcattgaaagtttaagacatggatataatgttccaacgacaaggacattaaaccataaatataatgctccaagaacatcgacattcaaacatcaatgtctaagtctaaaccatcttgacgattatcatcacttggtccactatcacgagaagtaggtggtgtttggccataatcatcattgatgtctagatcatcggccaccaaaggttcatagactttatcctcgtctgatccttgctcttgtacagctggtgaactcaaatttacaccatgtcgagagtacgtcctaggcagattacgatcttgaagcattagtgatgcactggtggctttatcaacatgagcccatgaaagattttattagtgctggactttttctgtactcatttcaactcattccttgtcccattggaactcttctaagatcaaagggttgaaatttgtcccttccacatgcctcttttgaaaacgtttagcaatctttcggttgtattaaatagaccaaatcgttcgattgttggtgctccaaccggtttcttttttacatggatctgaaatttaagcactaattaacaacagaaagtacatgaaatttattaatagttttgaaataaatacaagttagttgcttacaaattcgacaatgctccaattgtgctcacaactagagtcgaacaacaaagaccgaggatgcgtcttgcaaacttttgaagctctctagcaaggcgaccaaaagcattccaccaaacaactaaaacaaaaaacattatatctatcttacaaatttggaatgcttaaaatttaatcaacataaaatagaagtttaatacttatgagggctctttgttttttgttgcatcacaactgtttgctttccaaagctctccccgcccattaccaactctcctcttacaatcttgatgtctgggtttcctggtgtctctcaagggggagtgtagtggaagatgggaatgacacaaggtgtaggggggaagagggcgctgatcaccctgatcaccggcgctggtgctgtgcccgaccaggatggtcaaagatgatcccgccctattgggacatctttcttcctttgatgcctaataccaactatggcttgcacctttatagatgtaggtgacttatagcttaagaaaccagcagatacttttgggaaactagtatgctatttttaggaactaaaccaaccaaggaaacagagtaacaaccatatccctgattattagctacagttgttacgtgctcctttcttccttctgcgattgatacctccttccttagctacttcggtcggcatctagtacagcaggtattcgtcatgtttattgccgcccaacaaaagtatctataacaccaccgagcactatcatggagtcatcgctggcttggcctctctgttcttcttcctcccccaaccccgctgctctccattctagccgagttgttgctcttcttccaccgacctcgctgctcacctccgcagcattgtctagatccccaccgtcgctggccttcttcgaggcccagatccccattgtaggccccttgcttcttctcctcaaccggagcttccaaaactcccttgcagagcttgtagaggttatggaaggtatgggtgtgccttcaccaccgacagttgggactccgtcggcctcgccctgccgcattacgtcccccgttgatgataccaatgcgtcgcttggccaagaaccagagtgcgcattgacatatatcagacaggacgatcctgacacattcattatctcgggaaattttcatccaaggcatcaaatcgattgggattcaattgaagtagaagaaaggtggaatgaggaaggaagacaggatgttactagtgaacgaggattgtatattcaactcggtttgcataatgaagatgagagggtatttaagcaaagggaagatgattcaagtgctcattgtgctggaaataatagggaagaatttcacgatgaagcttcaactgccatgccttgttctgattttgtattagatgggacaaggactatctatgatatgaacaatcctgtaatggagcctggtagcttgtacgcatcaatggagcagtttagacttgcaattagacagtacgccataaataaagaatttgagttgggcattgaggctaccaacaagactagattcagagggtactgtaaagggcctgattgtccttggagcattcatgcgaggtctgagatgaaaggatcacccactattcaagttattgtcttaaacgatgagcacacatgtacatcgagcgggagacgcaagacaacgacaccaacaggtgcttgggttgcggcaagggctcttccactacttatgaaaaaaccacatatgggtgctaaggagttacaaagtatgttgcaagatacatttggatgcactattacatatgatacaatttggcatgggaaagagaaagctctgaagcaattgtttgggagttgggaagagagtttccaacttctatggtcttggagagaagcagttatacagaagtcaccggatagtattatcgagttggatgttaaaatggatgagggccggccattttttagcagatttttttgtgcacttggtccttgcattactggtttcaaagagggatgtagaccttatcttagtgttgactcaactgctcttaatggaagatggaatggtcacctgtgttgtgccataggggttgatggacagaattggatgtaccctgttgcttatggattctttgaggcagaaacaacagaaaactggacatggttctttcagcagttgcgcaaggctgtgggagatcttcctctactagcattgtgttcagatgcttgcaaaggtctaaaaaatgccatgaacactgttttccctcaagctgaaaaaagggagtgtttcagacacctaatgcagaactacgtgaagcaatttgttggatccgagtacatgtatcctgcagctagagcatataggagggaggtgttcgaccattacttttccaatgtccaagaaattcccaaggtgtctagttggttatatgagcatcatgatagtttgtggtatcgtagtgggtttaatccagccatcaagtgcgactatgttaccaacaacatagcagaagtgttcaacaattggattaaggattggaaagatctgcctgtctgtgacttggctgacaagataaggaaggaaatcatggagttgtttcataggaggagggaaataggacagaggttgcaaggtcgaatactaccctccgtggtccatatcctccatgtaaggactagaggtttaggtcacttaacagttaagaaagctgacaattacattgcggaggtgagggataataataatgtgcactctaagcacattgtgaatgctcaattgagacaatgttcatgcaacgagtggcagcatacggggaagccatgtcaccatgcccttcgcttaataacaacacaacaatttagagatgttcggatggaagattttgtggatgactactactcagttgataagttcatgaaggcttactcgagggtagtggagccaattggtgacaaatctttctggcctacagtgccatttgcaaaagaggtgtgtgcttctattgggaagcgtggagttggccgtcaaaggaaaaacatgattaaagggtgcctagagggaggaagtggtaagaagccaaacgaaaatgaaaatgtcaaaactaagaagatgattcgtgggaagttcaagtgtccaaactgtggtgaattgggacacaggaaagccagctacaaatgtcctttgaatggaacaaaaaaacggaaaaggagagcaaggaaaaatgttactaaaggttggttcccaaaagatgttgaggcatgatgatggtgcatgcactagccacacaaccacccccatgtgatgattgtgatgccagtattgcgaaaatctctccactttcatctcccagacctatctagaggctagtgctggaccagtgtaccctaggagctgggtgccaggtgcggtggcgggcggggcctagcaaagcatgacgctgtaggagggatccagtcatccgatacgtcagcactccggcacagcagtaggcatctcggaagctggcagggccacagggcaccacgcccaaggcttagccgcgcaggcactgagcagccaagtagtcaggcagtcagtgagcagcagcagacggcagcaaggctggaagcgcgaagtacctatataggcatataagtttagttcgaccgggagtttacttctctgttatctgtgacttgcccgaccccgacttgatgtgcattgtagattatcagaaattgattaatgatttaatcacagattttaatcaactcaacacgtcgagaagaatatttttgtgctcatagttttttagttcaagcaatgttaatactagtggtacttccctgagttcatatcaatgcttagtcttgggctcctcagaaatgcaaattctttctttggcttgcaattagaaacaagtgttggactgctgataatctggagaagaggggttgcagcacccaagcagctgccctttgtgtgaccaagaaagggaaacgatacaacacatcatcactacctgtgtttttgcccggcaattctggtttcttatctttgacactcgggatgagtcacctcgctcttagggctgatgagcggtcgtttgaggactggtggaggaaggccagcaacagtacaaggataagagaaaagggatcaactgtgtcattattttgggggcttggtgcctctggctgcatagaaatagaacgttttttatgggaatcatccattcagagggtgcagcaacatttcagtgacgagttctcctgttggctcttggtgcgcgccaggagtttgggtcagcttggtctccctagttccatgagtaatatcggatctaatccttttactcctctataacctttttgcttttcttttgtttcttttttctgttttagctatggatgtaagtcatgttttctctctctctaatataaagatgtgcagctctcctgcgcgttctagaaaaaatgaatgtaaaatttgatcttcaattgtttattggcccattataaaattgtacaaagcttctccaaatatgccaattgatccattacaattgtttcataactactgtttatggattttgggactgcagaactgatggattctaacagatgtaacagacctacagtagggatgctaggccaaggagttaaaatatatccacatgttagaatatttcgtaactgtagtaacttcaacattatatagattaatcatgaacttttagttgtattaaacaaataagctctgtatgttcattgttgtagaactaagtttattgtgaatttgtgaacacatatatttgttcatgaaactgcattggatttggactaacaaagtttgtgtatgtgatatgtttttagtctggatctgcccttggtcaagattcaaatatggcttctgcagggttggctcgggtgggtgagtggtgcgactcgtcctctcatgaggctcgtcaccttgagcaacatgccgatcctgcagcagctgcacctggaggagcagctcctgcgccgcacatcggacaactggtgtgtcatcaacgatggcatggcccctgctaccattctcatgggagagtctcggagcttgtcgacatacagccggtcctctgggaccaagtgccgattgtgaggaggttcagtggaggtggcacgtcattgttgattggggaacggtggttgtgactttcatttgcaacaagaatgccgttgccgggctgcagatttatggcaaaaaatttgacagatttggtgaatttcatctgcgtgagaatgactatgcatttagtcactcgaaagtttggcggaaatgctcaatcaataacaaaaaatcgttgggttcatcacacgtcgttcttgtgggattatgatgtaaaaaatatggattatctcaaaatcccaaagcgtgcacctgaatatcgactggcaagaaaccacagatttcttgtgccgcatgaaggagtacataccttcgcggtcagttttcaccgatgaggtcactgcggccctgggagaacacttctcagttcagcccgtggatctacaagcagttctttccggtgatgaaggatccgtgccttctacaaagctgctgtcacaacaggacctagaaagaaattgtttcgtccaaagaatcccttaacaatatagaaagttgaagcgtgaccatgcttgtcgtttttgttgtgaaatatgagcagttttgtcgagctgtgaattcattcaaacattatggtcaacccagtacgtacatacgaatgcccaccaccatctttagtaacaaatggttatgttttggattgtaggtctaccgttccaagcttgggttacacgttatttgcctatgggctctagaccgagtgctaaaactatgagagactggctccaacatactctgtaaatggttatgtactctaaattataaagaaattttttgtcttcttatttcagcagcgtcttttaaactacttatttcagcagcagcgtcttttaaac

SEQ ID NO: 52133 - DNA, 1734 bp, Zea Mays
gctaggttctctctcgtcgtctctcgtggcggctggcgacgactggggaccgccggtaggcgcccaggccttcgtcgcgctggtctttctagggcccttcgccggcgacgatcaccctccgcgaccagagcttgtagaggttatggaaggtatgggtgtgccttcaccaccgacagttgggactccgtcggcctcgccctgccgcattacgtcccccgttgatgataccaatgcgtcgcttggccaagaaccagagtgcgcattgacatatatcagacaggacgatcctgacacattcattatctcggcatcaaatcgattgggattcaattgaagtagaagaaaggtggaatgaggaaggaagacaggatgttactagtgaacgaggattgtatattcaactcggtttgcataatgaagatgagagggtatttaagcaaagggaagatgattcaagtgctcattgtgctggaaataatagggaagaatttcacgatgaagcttcaactgccatgccttgttctgattttgtattagatgggacaaggactatctatgatatgaacaatcctgtaatggagcctggtagctttctggatctgcccttggtcaagattcaaatatggcttctgcagggttggctcgggtgggtgagtggtgcgactcgtcctctcatgaggctcgtcaccttgagcaacatgccgatcctgcagcagctgcacctggaggagcagctcctgcgccgcacatcggacaactggtgtgtcatcaacgatggcatggcccctgctaccattctcatgggactgcaggagagtctcggagcttgtcgacatacagccggtcctctgggaccaagtgccgattgtgaggaggttcagtggaggtggcacgtcattgttgattggggaacggtggttgtgactttcatttgcaacaagaatgccgttgccgggctgcagatttatggcaaaaaatttgacagatttggtgaatttcatctgcgtgagaatgactatgcatttagtcactcgaaagtttggcggaaatgctcaatcaataacaaaaaatcgttgggttcatcacacgtcgttcttgtgggattatgatgtaaaaaatatggattatctcaaaatcccaaagcgtgcacctgaatatcgactggcaagaaaccacagatttcttgtgccgcatgaaggagtacataccttcgcggtcagttttcaccgatgaggtcactgcggccctgggagaacacttctcagttcagcccgtggatctacaagcagttctttccggtgatgaaggatccgtgccttctacaaagctgctgtcacaacaggacctagaaagaaattgtttcgtccaaagaatcccttaacaatatagaaagttgaagcgtgaccatgcttgtcgtttttgttgtgaaatatgagcagttttgtcgagctgtgaattcattcaaacattatggtcaacccagtacgtacatacgaatgcccaccaccatctttagtaacaaatggttatgttttggattgtaggtctaccgttccaagcttgggttacacgttatttgcctatgggctctagaccgagtgctaaaactatgagagactggctccaacatactctgtaaatggttatgtactctaaattataaagaaattttttgtcttcttatttcagcagcgtcttttaaactacttatttcagcagcagcgtcttttaaac

SEQ ID NO: 52134 - DNA, 5261 bp, Zea Mays
gctaggttctctctcgtcgtctctcgtggcggctggcgacgactggggaccgccggtaggcgcccaggccttcgtcgcgctggtctttctagggcccttcgccggcgacgatcaccctccgcgaccagcattgtctagatccccaccgtcgctggccttcttcgaggcccagatccccattgtaggccccttgcttcttctcctcaaccggagcttccaaaactcccttgcagagcttgtagaggttatggaaggtatgggtgtgccttcaccaccgacagttgggactccgtcggcctcgccctgccgcattacgtcccccgttgatgataccaatgcgtcgcttggccaagaaccagagtgcgcattgacatatatcagacaggacgatcctgacacattcattatctcgggaaattttcatccaaggcatcaaatcgattgggattcaattgaagtagaagaaaggtggaatgaggaaggaagacaggatgttactagtgaacgaggattgtatattcaactcggtttgcataatgaagatgagagggtatttaagcaaagggaagatgattcaagtgctcattgtgctggaaataatagggaagaatttcacgatgaagcttcaactgccatgccttgttctgattttgtattagatgggacaaggactatctatgatatgaacaatcctgtaatggagcctggtagcttgtacgcatcaatggagcagtttagacttgcaattagacagtacgccataaataaagaatttgagttgggcattgaggctaccaacaagactagattcagagggtactgtaaagggcctgattgtccttggagcattcatgcgaggtctgagatgaaaggatcacccactattcaagttattgtcttaaacgatgagcacacatgtacatcgagcgggagacgcaagacaacgacaccaacaggtgcttgggttgcggcaagggctcttccactacttatgaaaaaaccacatatgggtgctaaggagttacaaagtatgttgcaagatacatttggatgcactattacatatgatacaatttggcatgggaaagagaaagctctgaagcaattgtttgggagttgggaagagagtttccaacttctatggtcttggagagaagcagttatacagaagtcaccggatagtattatcgagttggatgttaaaatggatgagggccggccattttttagcagatttttttgtgcacttggtccttgcattactggtttcaaagagggatgtagaccttatcttagtgttgactcaactgctcttaatggaagatggaatggtcacctgtgttgtgccataggggttgatggacagaattggatgtaccctgttgcttatggattctttgaggcagaaacaacagaaaactggacatggttctttcagcagttgcgcaaggctgtgggagatcttcctctactagcattgtgttcagatgcttgcaaaggtctaaaaaatgccatgaacactgttttccctcaagctgaaaaaagggagtgtttcagacacctaatgcagaactacgtgaagcaatttgttggatccgagtacatgtatcctgcagctagagcatataggagggaggtgttcgaccattacttttccaatgtccaagaaattcccaaggtgtctagttggttatatgagcatcatgatagtttgtggtatcgtagtgggtttaatccagccatcaagtgcgactatgttaccaacaacatagcagaagtgttcaacaattggattaaggattggaaagatctgcctgtctgtgacttggctgacaagataaggaaggaaatcatggagttgtttcataggaggagggaaataggacagaggttgcaaggtcgaatactaccctccgtggtccatatcctccatgtaaggactagaggtttaggtcacttaacagttaagaaagctgacaattacattgcggaggtgagggataataataatgtgcactctaagcacattgtgaatgctcaattgagacaatgttcatgcaacgagtggcagcatacggggaagccatgtcaccatgcccttcgcttaataacaacacaacaatttagagatgttcggatggaagattttgtggatgactactactcagttgataagttcatgaaggcttactcgagggtagtggagccaattggtgacaaatctttctggcctacagtgccatttgcaaaagaggtgtgtgcttctattgggaagcgtggagttggccgtcaaaggaaaaacatgattaaagggtgcctagagggaggaagtggtaagaagccaaacgaaaatgaaaatgtcaaaactaagaagatgattcgtgggaagttcaagtgtccaaactgtggtgaattgggacacaggaaagccagctacaaatgtcctttgaatggaacaaaaaaacggaaaaggagagcaaggaaaaatgttactaaaggttggttcccaaaagatgttgaggcatgatgatggtgcatgcactagccacacaaccacccccatgtgatgattgtgatgccagtattgcgaaaatctctccactttcatctcccagacctatctagaggctagtgctggaccagtgtaccctaggagctgggtgccaggtgcggtggcgggcggggcctagcaaagcatgacgctgtaggagggatccagtcatccgatacgtcagcactccggcacagcagtaggcatctcggaagctggcagggccacagggcaccacgcccaaggcttagccgcgcaggcactgagcagccaagtagtcaggcagtcagtgagcagcagcagacggcagcaaggctggaagcgcgaagtacctatataggcatataagtttagttcgaccgggagtttacttctctgttatctgtgacttgcccgaccccgacttgatgtgcattgtagattatcagaaattgattaatgatttaatcacagattttaatcaactcaacacgtcgagaagaatatttttgtgctcatagttttttagttcaagcaatgttaatactagtggtacttccctgagttcatatcaatgcttagtcttgggctcctcagaaatgcaaattctttctttggcttgcaattagaaacaagtgttggactgctgataatctggagaagaggggttgcagcacccaagcagctgccctttgtgtgaccaagaaagggaaacgatacaacacatcatcactacctgtgtttttgcccggcaattctggtttcttatctttgacactcgggatgagtcacctcgctcttagggctgatgagcggtcgtttgaggactggtggaggaaggccagcaacagtacaaggataagagaaaagggatcaactgtgtcattattttgggggcttggtgcctctggctgcatagaaatagaacgttttttatgggaatcatccattcagagggtgcagcaacatttcagtgacgagttctcctgttggctcttggtgcgcgccaggagtttgggtcagcttggtctccctagttccatgagtaatatcggatctaatccttttactcctctataacctttttgcttttcttttgtttcttttttctgttttagctatggatgtaagtcatgttttctctctctctaatataaagatgtgcagctctcctgcgcgttctagaaaaaatgaatgtaaaatttgatcttcaattgtttattggcccattataaaattgtacaaagcttctccaaatatgccaattgatccattacaattgtttcataactactgtttatggattttgggactgcagaactgatggattctaacagatgtaacagacctacagtagggatgctaggccaaggagttaaaatatatccacatgttagaatatttcgtaactgtagtaacttcaacattatatagattaatcatgaacttttagttgtattaaacaaataagctctgtatgttcattgttgtagaactaagtttattgtgaatttgtgaacacatatatttgttcatgaaactgcattggatttggactaacaaagtttgtgtatgtgatatgtttttagtctggatctgcccttggtcaagattcaaatatggcttctgcagggttggctcgggtgggtgagtggtgcgactcgtcctctcatgaggctcgtcaccttgagcaacatgccgatcctgcagcagctgcacctggaggagcagctcctgcgccgcacatcggacaactggtgtgtcatcaacgatggcatggcccctgctaccattctcatgggactgcaggagagtctcggagcttgtcgacatacagccggtcctctgggaccaagtgccgattgtgaggaggttcagtggaggtggcacgtcattgttgattggggaacggtggttgtgactttcatttgcaacaagaatgccgttgccgggctgcagatttatggcaaaaaatttgacagatttggtgaatttcatctgcgtgagaatgactatgcatttagtcactcgaaagtttggcggaaatgctcaatcaataacaaaaaatcgttgggttcatcacacgtcgttcttgtgggattatgatgtaaaaaatatggattatctcaaaatcccaaagcgtgcacctgaatatcgactggcaagaaaccacagatttcttgtgccgcatgaaggagtacataccttcgcggtcagttttcaccgatgaggtcactgcggccctgggagaacacttctcagttcagcccgtggatctacaagcagttctttccggtgatgaaggatccgtgccttctacaaagctgctgtcacaacaggacctagaaagaaattgtttcgtccaaagaatcccttaacaatatagaaagttgaagcgtgaccatgcttgtcgtttttgttgtgaaatatgagcagttttgtcgagctgtgaattcattcaaacattatggtcaacccagtacgtacatacgaatgcccaccaccatctttagtaacaaatggttatgttttggattgtaggtctaccgttccaagcttgggttacacgttatttgcctatgggctctagaccgagtgctaaaactatgagagactggctccaacatactctgtaaatggttatgtactctaaattataaagaaattttttgtcttcttatttcagcagcgtcttttaaactacttatttcagcagcagcgtcttttaaac

SEQ ID NO: 52135 - DNA, 5326 bp, Zea Mays
gctaggttctctctcgtcgtctctcgtggcggctggcgacgactggggaccgccggtaggcgcccaggccttcgtcgcgctggtctttctagggcccttcgccggcgacgatcaccctccgcgaccagatccccaccgtcgctggccttcttcgaggcccagatccccattgtaggccccttgcttcttctcctcaaccggagcttccaaaactcccttgcagagcttgtagaggttatggaaggtatgggtgtgccttcaccaccgacagttgggactccgtcggcctcgccctgccgcattacgtcccccgttgatgataccaatgcgtcgcttggccaagaaccagagtgcgcattgacatatatcagacaggacgatcctgacacattcattatctcgggaaattttcatccaaggcatcaaatcgattgggattcaattgaagtagaagaaaggtggaatgaggaaggaagacaggatgttactagtgaacgaggattgtatattcaactcggtttgcataatgaagatgagagggtatttaagcaaagggaagatgattcaagtgctcattgtgctggaaataatagggaagaatttcacgatgaagcttcaactgccatgccttgttctgattttgtattagatgggacaaggactatctatgatatgaacaatcctgtaatggagcctggtagcttgtacgcatcaatggagcagtttagacttgcaattagacagtacgccataaataaagaatttgagttgggcattgaggctaccaacaagactagattcagagggtactgtaaagggcctgattgtccttggagcattcatgcgaggtctgagatgaaaggatcacccactattcaagttattgtcttaaacgatgagcacacatgtacatcgagcgggagacgcaagacaacgacaccaacaggtgcttgggttgcggcaagggctcttccactacttatgaaaaaaccacatatgggtgctaaggagttacaaagtatgttgcaagatacatttggatgcactattacatatgatacaatttggcatgggaaagagaaagctctgaagcaattgtttgggagttgggaagagagtttccaacttctatggtcttggagagaagcagttatacagaagtcaccggatagtattatcgagttggatgttaaaatggatgagggccggccattttttagcagatttttttgtgcacttggtccttgcattactggtttcaaagagggatgtagaccttatcttagtgttgactcaactgctcttaatggaagatggaatggtcacctgtgttgtgccataggggttgatggacagaattggatgtaccctgttgcttatggattctttgaggcagaaacaacagaaaactggacatggttctttcagcagttgcgcaaggctgtgggagatcttcctctactagcattgtgttcagatgcttgcaaaggtctaaaaaatgccatgaacactgttttccctcaagctgaaaaaagggagtgtttcagacacctaatgcagaactacgtgaagcaatttgttggatccgagtacatgtatcctgcagctagagcatataggagggaggtgttcgaccattacttttccaatgtccaagaaattcccaaggtgtctagttggttatatgagcatcatgatagtttgtggtatcgtagtgggtttaatccagccatcaagtgcgactatgttaccaacaacatagcagaagtgttcaacaattggattaaggattggaaagatctgcctgtctgtgacttggctgacaagataaggaaggaaatcatggagttgtttcataggaggagggaaataggacagaggttgcaaggtcgaatactaccctccgtggtccatatcctccatgtaaggactagaggtttaggtcacttaacagttaagaaagctgacaattacattgcggaggtgagggataataataatgtgcactctaagcacattgtgaatgctcaattgagacaatgttcatgcaacgagtggcagcatacggggaagccatgtcaccatgcccttcgcttaataacaacacaacaatttagagatgttcggatggaagattttgtggatgactactactcagttgataagttcatgaaggcttactcgagggtagtggagccaattggtgacaaatctttctggcctacagtgccatttgcaaaagaggtgtgtgcttctattgggaagcgtggagttggccgtcaaaggaaaaacatgattaaagggtgcctagagggaggaagtggtaagaagccaaacgaaaatgaaaatgtcaaaactaagaagatgattcgtgggaagttcaagtgtccaaactgtggtgaattgggacacaggaaagccagctacaaatgtcctttgaatggaacaaaaaaacggaaaaggagagcaaggaaaaatgttactaaaggttggttcccaaaagatgttgaggcatgatgatggtgcatgcactagccacacaaccacccccatgtgatgattgtgatgccagtattgcgaaaatctctccactttcatctcccagacctatctagaggctagtgctggaccagtgtaccctaggagctgggtgccaggtgcggtggcgggcggggcctagcaaagcatgacgctgtaggagggatccagtcatccgatacgtcagcactccggcacagcagtaggcatctcggaagctggcagggccacagggcaccacgcccaaggcttagccgcgcaggcactgagcagccaagtagtcaggcagtcagtgagcagcagcagacggcagcaaggctggaagcgcgaagtacctatataggcatataagtttagttcgaccgggagtttacttctctgttatctgtgacttgcccgaccccgacttgatgtgcattgtagattatcagaaattgattaatgatttaatcacagattttaatcaactcaacacgtcgagaagaatatttttgtgctcatagttttttagttcaagcaatgttaatactagtggtacttccctgagttcatatcaatgcttagtcttgggctcctcagaaatgcaaattctttctttggcttgcaattagaaacaagtgttggactgctgataatctggagaagaggggttgcagcacccaagcagctgccctttgtgtgaccaagaaagggaaacgatacaacacatcatcactacctgtgtttttgcccggcaattctggtttcttatctttgacactcgggatgagtcacctcgctcttagggctgatgagcggtcgtttgaggactggtggaggaaggccagcaacagtacaaggataagagaaaagggatcaactgtgtcattattttgggggcttggtgcctctggctgcatagaaatagaacgttttttatgggaatcatccattcagagggtgcagcaacatttcagtgacgagttctcctgttggctcttggtgcgcgccaggagtttgggtcagcttggtctccctagttccatgagtaatatcggatctaatccttttactcctctataacctttttgcttttcttttgtttcttttttctgttttagctatggatgtaagtcatgttttctctctctctaatataaagatgtgcagctctcctgcgcgttctagaaaaaatgaatgtaaaatttgatcttcaattgtttattggcccattataaaattgtacaaagcttctccaaatatgccaattgatccattacaattgtttcataactactgtttatggattttgggactgcagaactgatggattctaacagatgtaacagacctacagtagggatgctaggccaaggagttaaaatatatccacatgttagaatatttcgtaactgtagtaacttcaacattatatagattaatcatgaacttttagttgtattaaacaaataagctctgtatgttcattgttgtagaactaagtttattgtgaatttgtgaacacatatatttgttcatgaaactgcattggatttggactaacaaagtttgtgtatgtgatatgtttttagtctggatctgcccttggtcaagattcaaatatggcttctgcagggttggctcgggtgggtgagtggtgcgactcgtcctctcatgaggctcgtcaccttgagcaacatgccgatcctgcagcagctgcacctggaggagcagctcctgcgccgcacatcggacaactggtgtgtcatcaacgatggcatggcccctgctaccattctcatgggaaggaagattcaatcatgtattggtctccttgtgccccatgttgagttgctaatttggttttgcgtgatggcaggactgcaggagagtctcggagcttgtcgacatacagccggtcctctgggaccaagtgccgattgtgaggaggttcagtggaggtggcacgtcattgttgattggggaacggtggttgtgactttcatttgcaacaagaatgccgttgccgggctgcagatttatggcaaaaaatttgacagatttggtgaatttcatctgcgtgagaatgactatgcatttagtcactcgaaagtttggcggaaatgctcaatcaataacaaaaaatcgttgggttcatcacacgtcgttcttgtgggattatgatgtaaaaaatatggattatctcaaaatcccaaagcgtgcacctgaatatcgactggcaagaaaccacagatttcttgtgccgcatgaaggagtacataccttcgcggtcagttttcaccgatgaggtcactgcggccctgggagaacacttctcagttcagcccgtggatctacaagcagttctttccggtgatgaaggatccgtgccttctacaaagctgctgtcacaacaggacctagaaagaaattgtttcgtccaaagaatcccttaacaatatagaaagttgaagcgtgaccatgcttgtcgtttttgttgtgaaatatgagcagttttgtcgagctgtgaattcattcaaacattatggtcaacccagtacgtacatacgaatgcccaccaccatctttagtaacaaatggttatgttttggattgtaggtctaccgttccaagcttgggttacacgttatttgcctatgggctctagaccgagtgctaaaactatgagagactggctccaacatactctgtaaatggttatgtactctaaattataaagaaattttttgtcttcttatttcagcagcgtcttttaaactacttatttcagcagcagcgtcttttaaac

SEQ ID NO: 52136 - DNA, 5234 bp, Zea Mays
gctaggttctctctcgtcgtctctcgtggcggctggcgacgactggggaccgccggtaggcgcccaggccttcgtcgcgctggtctttctagggcccttcgccggcgacgatcaccctccgcgaccagatccccaccgtcgctggccttcttcgaggcccagatccccattgtaggccccttgcttcttctcctcaaccggagcttccaaaactcccttgcagagcttgtagaggttatggaaggtatgggtgtgccttcaccaccgacagttgggactccgtcggcctcgccctgccgcattacgtcccccgttgatgataccaatgcgtcgcttggccaagaaccagagtgcgcattgacatatatcagacaggacgatcctgacacattcattatctcggcatcaaatcgattgggattcaattgaagtagaagaaaggtggaatgaggaaggaagacaggatgttactagtgaacgaggattgtatattcaactcggtttgcataatgaagatgagagggtatttaagcaaagggaagatgattcaagtgctcattgtgctggaaataatagggaagaatttcacgatgaagcttcaactgccatgccttgttctgattttgtattagatgggacaaggactatctatgatatgaacaatcctgtaatggagcctggtagcttgtacgcatcaatggagcagtttagacttgcaattagacagtacgccataaataaagaatttgagttgggcattgaggctaccaacaagactagattcagagggtactgtaaagggcctgattgtccttggagcattcatgcgaggtctgagatgaaaggatcacccactattcaagttattgtcttaaacgatgagcacacatgtacatcgagcgggagacgcaagacaacgacaccaacaggtgcttgggttgcggcaagggctcttccactacttatgaaaaaaccacatatgggtgctaaggagttacaaagtatgttgcaagatacatttggatgcactattacatatgatacaatttggcatgggaaagagaaagctctgaagcaattgtttgggagttgggaagagagtttccaacttctatggtcttggagagaagcagttatacagaagtcaccggatagtattatcgagttggatgttaaaatggatgagggccggccattttttagcagatttttttgtgcacttggtccttgcattactggtttcaaagagggatgtagaccttatcttagtgttgactcaactgctcttaatggaagatggaatggtcacctgtgttgtgccataggggttgatggacagaattggatgtaccctgttgcttatggattctttgaggcagaaacaacagaaaactggacatggttctttcagcagttgcgcaaggctgtgggagatcttcctctactagcattgtgttcagatgcttgcaaaggtctaaaaaatgccatgaacactgttttccctcaagctgaaaaaagggagtgtttcagacacctaatgcagaactacgtgaagcaatttgttggatccgagtacatgtatcctgcagctagagcatataggagggaggtgttcgaccattacttttccaatgtccaagaaattcccaaggtgtctagttggttatatgagcatcatgatagtttgtggtatcgtagtgggtttaatccagccatcaagtgcgactatgttaccaacaacatagcagaagtgttcaacaattggattaaggattggaaagatctgcctgtctgtgacttggctgacaagataaggaaggaaatcatggagttgtttcataggaggagggaaataggacagaggttgcaaggtcgaatactaccctccgtggtccatatcctccatgtaaggactagaggtttaggtcacttaacagttaagaaagctgacaattacattgcggaggtgagggataataataatgtgcactctaagcacattgtgaatgctcaattgagacaatgttcatgcaacgagtggcagcatacggggaagccatgtcaccatgcccttcgcttaataacaacacaacaatttagagatgttcggatggaagattttgtggatgactactactcagttgataagttcatgaaggcttactcgagggtagtggagccaattggtgacaaatctttctggcctacagtgccatttgcaaaagaggtgtgtgcttctattgggaagcgtggagttggccgtcaaaggaaaaacatgattaaagggtgcctagagggaggaagtggtaagaagccaaacgaaaatgaaaatgtcaaaactaagaagatgattcgtgggaagttcaagtgtccaaactgtggtgaattgggacacaggaaagccagctacaaatgtcctttgaatggaacaaaaaaacggaaaaggagagcaaggaaaaatgttactaaaggttggttcccaaaagatgttgaggcatgatgatggtgcatgcactagccacacaaccacccccatgtgatgattgtgatgccagtattgcgaaaatctctccactttcatctcccagacctatctagaggctagtgctggaccagtgtaccctaggagctgggtgccaggtgcggtggcgggcggggcctagcaaagcatgacgctgtaggagggatccagtcatccgatacgtcagcactccggcacagcagtaggcatctcggaagctggcagggccacagggcaccacgcccaaggcttagccgcgcaggcactgagcagccaagtagtcaggcagtcagtgagcagcagcagacggcagcaaggctggaagcgcgaagtacctatataggcatataagtttagttcgaccgggagtttacttctctgttatctgtgacttgcccgaccccgacttgatgtgcattgtagattatcagaaattgattaatgatttaatcacagattttaatcaactcaacacgtcgagaagaatatttttgtgctcatagttttttagttcaagcaatgttaatactagtggtacttccctgagttcatatcaatgcttagtcttgggctcctcagaaatgcaaattctttctttggcttgcaattagaaacaagtgttggactgctgataatctggagaagaggggttgcagcacccaagcagctgccctttgtgtgaccaagaaagggaaacgatacaacacatcatcactacctgtgtttttgcccggcaattctggtttcttatctttgacactcgggatgagtcacctcgctcttagggctgatgagcggtcgtttgaggactggtggaggaaggccagcaacagtacaaggataagagaaaagggatcaactgtgtcattattttgggggcttggtgcctctggctgcatagaaatagaacgttttttatgggaatcatccattcagagggtgcagcaacatttcagtgacgagttctcctgttggctcttggtgcgcgccaggagtttgggtcagcttggtctccctagttccatgagtaatatcggatctaatccttttactcctctataacctttttgcttttcttttgtttcttttttctgttttagctatggatgtaagtcatgttttctctctctctaatataaagatgtgcagctctcctgcgcgttctagaaaaaatgaatgtaaaatttgatcttcaattgtttattggcccattataaaattgtacaaagcttctccaaatatgccaattgatccattacaattgtttcataactactgtttatggattttgggactgcagaactgatggattctaacagatgtaacagacctacagtagggatgctaggccaaggagttaaaatatatccacatgttagaatatttcgtaactgtagtaacttcaacattatatagattaatcatgaacttttagttgtattaaacaaataagctctgtatgttcattgttgtagaactaagtttattgtgaatttgtgaacacatatatttgttcatgaaactgcattggatttggactaacaaagtttgtgtatgtgatatgtttttagtctggatctgcccttggtcaagattcaaatatggcttctgcagggttggctcgggtgggtgagtggtgcgactcgtcctctcatgaggctcgtcaccttgagcaacatgccgatcctgcagcagctgcacctggaggagcagctcctgcgccgcacatcggacaactggtgtgtcatcaacgatggcatggcccctgctaccattctcatgggactgcaggagagtctcggagcttgtcgacatacagccggtcctctgggaccaagtgccgattgtgaggaggttcagtggaggtggcacgtcattgttgattggggaacggtggttgtgactttcatttgcaacaagaatgccgttgccgggctgcagatttatggcaaaaaatttgacagatttggtgaatttcatctgcgtgagaatgactatgcatttagtcactcgaaagtttggcggaaatgctcaatcaataacaaaaaatcgttgggttcatcacacgtcgttcttgtgggattatgatgtaaaaaatatggattatctcaaaatcccaaagcgtgcacctgaatatcgactggcaagaaaccacagatttcttgtgccgcatgaaggagtacataccttcgcggtcagttttcaccgatgaggtcactgcggccctgggagaacacttctcagttcagcccgtggatctacaagcagttctttccggtgatgaaggatccgtgccttctacaaagctgctgtcacaacaggacctagaaagaaattgtttcgtccaaagaatcccttaacaatatagaaagttgaagcgtgaccatgcttgtcgtttttgttgtgaaatatgagcagttttgtcgagctgtgaattcattcaaacattatggtcaacccagtacgtacatacgaatgcccaccaccatctttagtaacaaatggttatgttttggattgtaggtctaccgttccaagcttgggttacacgttatttgcctatgggctctagaccgagtgctaaaactatgagagactggctccaacatactctgtaaatggttatgtactctaaattataaagaaattttttgtcttcttatttcagcagcgtcttttaaactacttatttcagcagcagcgtcttttaaac

SEQ ID NO: 52137 - DNA, 5052 bp, Zea Mays
gctaggttctctctcgtcgtctctcgtggcggctggcgacgactggggaccgccggtaggcgcccaggccttcgtcgcgctggtctttctagggcccttcgccggcgacgatcaccctccgcgaccagggaaattttcatccaaggcatcaaatcgattgggattcaattgaagtagaagaaaggtggaatgaggaaggaagacaggatgttactagtgaacgaggattgtatattcaactcggtttgcataatgaagatgagagggtatttaagcaaagggaagatgattcaagtgctcattgtgctggaaataatagggaagaatttcacgatgaagcttcaactgccatgccttgttctgattttgtattagatgggacaaggactatctatgatatgaacaatcctgtaatggagcctggtagcttgtacgcatcaatggagcagtttagacttgcaattagacagtacgccataaataaagaatttgagttgggcattgaggctaccaacaagactagattcagagggtactgtaaagggcctgattgtccttggagcattcatgcgaggtctgagatgaaaggatcacccactattcaagttattgtcttaaacgatgagcacacatgtacatcgagcgggagacgcaagacaacgacaccaacaggtgcttgggttgcggcaagggctcttccactacttatgaaaaaaccacatatgggtgctaaggagttacaaagtatgttgcaagatacatttggatgcactattacatatgatacaatttggcatgggaaagagaaagctctgaagcaattgtttgggagttgggaagagagtttccaacttctatggtcttggagagaagcagttatacagaagtcaccggatagtattatcgagttggatgttaaaatggatgagggccggccattttttagcagatttttttgtgcacttggtccttgcattactggtttcaaagagggatgtagaccttatcttagtgttgactcaactgctcttaatggaagatggaatggtcacctgtgttgtgccataggggttgatggacagaattggatgtaccctgttgcttatggattctttgaggcagaaacaacagaaaactggacatggttctttcagcagttgcgcaaggctgtgggagatcttcctctactagcattgtgttcagatgcttgcaaaggtctaaaaaatgccatgaacactgttttccctcaagctgaaaaaagggagtgtttcagacacctaatgcagaactacgtgaagcaatttgttggatccgagtacatgtatcctgcagctagagcatataggagggaggtgttcgaccattacttttccaatgtccaagaaattcccaaggtgtctagttggttatatgagcatcatgatagtttgtggtatcgtagtgggtttaatccagccatcaagtgcgactatgttaccaacaacatagcagaagtgttcaacaattggattaaggattggaaagatctgcctgtctgtgacttggctgacaagataaggaaggaaatcatggagttgtttcataggaggagggaaataggacagaggttgcaaggtcgaatactaccctccgtggtccatatcctccatgtaaggactagaggtttaggtcacttaacagttaagaaagctgacaattacattgcggaggtgagggataataataatgtgcactctaagcacattgtgaatgctcaattgagacaatgttcatgcaacgagtggcagcatacggggaagccatgtcaccatgcccttcgcttaataacaacacaacaatttagagatgttcggatggaagattttgtggatgactactactcagttgataagttcatgaaggcttactcgagggtagtggagccaattggtgacaaatctttctggcctacagtgccatttgcaaaagaggtgtgtgcttctattgggaagcgtggagttggccgtcaaaggaaaaacatgattaaagggtgcctagagggaggaagtggtaagaagccaaacgaaaatgaaaatgtcaaaactaagaagatgattcgtgggaagttcaagtgtccaaactgtggtgaattgggacacaggaaagccagctacaaatgtcctttgaatggaacaaaaaaacggaaaaggagagcaaggaaaaatgttactaaaggttggttcccaaaagatgttgaggcatgatgatggtgcatgcactagccacacaaccacccccatgtgatgattgtgatgccagtattgcgaaaatctctccactttcatctcccagacctatctagaggctagtgctggaccagtgtaccctaggagctgggtgccaggtgcggtggcgggcggggcctagcaaagcatgacgctgtaggagggatccagtcatccgatacgtcagcactccggcacagcagtaggcatctcggaagctggcagggccacagggcaccacgcccaaggcttagccgcgcaggcactgagcagccaagtagtcaggcagtcagtgagcagcagcagacggcagcaaggctggaagcgcgaagtacctatataggcatataagtttagttcgaccgggagtttacttctctgttatctgtgacttgcccgaccccgacttgatgtgcattgtagattatcagaaattgattaatgatttaatcacagattttaatcaactcaacacgtcgagaagaatatttttgtgctcatagttttttagttcaagcaatgttaatactagtggtacttccctgagttcatatcaatgcttagtcttgggctcctcagaaatgcaaattctttctttggcttgcaattagaaacaagtgttggactgctgataatctggagaagaggggttgcagcacccaagcagctgccctttgtgtgaccaagaaagggaaacgatacaacacatcatcactacctgtgtttttgcccggcaattctggtttcttatctttgacactcgggatgagtcacctcgctcttagggctgatgagcggtcgtttgaggactggtggaggaaggccagcaacagtacaaggataagagaaaagggatcaactgtgtcattattttgggggcttggtgcctctggctgcatagaaatagaacgttttttatgggaatcatccattcagagggtgcagcaacatttcagtgacgagttctcctgttggctcttggtgcgcgccaggagtttgggtcagcttggtctccctagttccatgagtaatatcggatctaatccttttactcctctataacctttttgcttttcttttgtttcttttttctgttttagctatggatgtaagtcatgttttctctctctctaatataaagatgtgcagctctcctgcgcgttctagaaaaaatgaatgtaaaatttgatcttcaattgtttattggcccattataaaattgtacaaagcttctccaaatatgccaattgatccattacaattgtttcataactactgtttatggattttgggactgcagaactgatggattctaacagatgtaacagacctacagtagggatgctaggccaaggagttaaaatatatccacatgttagaatatttcgtaactgtagtaacttcaacattatatagattaatcatgaacttttagttgtattaaacaaataagctctgtatgttcattgttgtagaactaagtttattgtgaatttgtgaacacatatatttgttcatgaaactgcattggatttggactaacaaagtttgtgtatgtgatatgtttttagtctggatctgcccttggtcaagattcaaatatggcttctgcagggttggctcgggtgggtgagtggtgcgactcgtcctctcatgaggctcgtcaccttgagcaacatgccgatcctgcagcagctgcacctggaggagcagctcctgcgccgcacatcggacaactggtgtgtcatcaacgatggcatggcccctgctaccattctcatgggaaggaagattcaatcatgtattggtctccttgtgccccatgttgagttgctaatttggttttgcgtgatggcaggactgcaggagagtctcggagcttgtcgacatacagccggtcctctgggaccaagtgccgattgtgaggaggttcagtggaggtggcacgtcattgttgattggggaacggtggttgtgactttcatttgcaacaagaatgccgttgccgggctgcagatttatggcaaaaaatttgacagatttggtgaatttcatctgcgtgagaatgactatgcatttagtcactcgaaagtttggcggaaatgctcaatcaataacaaaaaatcgttgggttcatcacacgtcgttcttgtgggattatgatgtaaaaaatatggattatctcaaaatcccaaagcgtgcacctgaatatcgactggcaagaaaccacagatttcttgtgccgcatgaaggagtacataccttcgcggtcagttttcaccgatgaggtcactgcggccctgggagaacacttctcagttcagcccgtggatctacaagcagttctttccggtgatgaaggatccgtgccttctacaaagctgctgtcacaacaggacctagaaagaaattgtttcgtccaaagaatcccttaacaatatagaaagttgaagcgtgaccatgcttgtcgtttttgttgtgaaatatgagcagttttgtcgagctgtgaattcattcaaacattatggtcaacccagtacgtacatacgaatgcccaccaccatctttagtaacaaatggttatgttttggattgtaggtctaccgttccaagcttgggttacacgttatttgcctatgggctctagaccgagtgctaaaactatgagagactggctccaacatactctgtaaatggttatgtactctaaattataaagaaattttttgtcttcttatttcagcagcgtcttttaaactacttatttcagcagcagcgtcttttaaac

SEQ ID NO: 52138 - DNA, 5446 bp, Zea Mays
gctaggttctctctcgtcgtctctcgtggcggctggcgacgactggggaccgccggtaggcgcccaggccttcgtcgcgctggtctttctagggcccttcgccggcgacgatcaccctccgcgaccagctacttcggtcggcatctagtacagcaggtattcgtcatgtttattgccgcccaacaaaagtatctataacaccaccgagcactatcatggagtcatcgctggcttggcctctctgttcttcttcctcccccaaccccgctgctctccattctagccgagttgttgctcttcttccaccgacctcgctgctcacctccgcagcattgtctagatccccaccgtcgctggccttcttcgaggcccagatccccattgtaggccccttgcttcttctcctcaaccggagcttccaaaactcccttgcagagcttgtagaggttatggaaggtatgggtgtgccttcaccaccgacagttgggactccgtcggcctcgccctgccgcattacgtcccccgttgatgataccaatgcgtcgcttggccaagaaccagagtgcgcattgacatatatcagacaggacgatcctgacacattcattatctcggcatcaaatcgattgggattcaattgaagtagaagaaaggtggaatgaggaaggaagacaggatgttactagtgaacgaggattgtatattcaactcggtttgcataatgaagatgagagggtatttaagcaaagggaagatgattcaagtgctcattgtgctggaaataatagggaagaatttcacgatgaagcttcaactgccatgccttgttctgattttgtattagatgggacaaggactatctatgatatgaacaatcctgtaatggagcctggtagcttgtacgcatcaatggagcagtttagacttgcaattagacagtacgccataaataaagaatttgagttgggcattgaggctaccaacaagactagattcagagggtactgtaaagggcctgattgtccttggagcattcatgcgaggtctgagatgaaaggatcacccactattcaagttattgtcttaaacgatgagcacacatgtacatcgagcgggagacgcaagacaacgacaccaacaggtgcttgggttgcggcaagggctcttccactacttatgaaaaaaccacatatgggtgctaaggagttacaaagtatgttgcaagatacatttggatgcactattacatatgatacaatttggcatgggaaagagaaagctctgaagcaattgtttgggagttgggaagagagtttccaacttctatggtcttggagagaagcagttatacagaagtcaccggatagtattatcgagttggatgttaaaatggatgagggccggccattttttagcagatttttttgtgcacttggtccttgcattactggtttcaaagagggatgtagaccttatcttagtgttgactcaactgctcttaatggaagatggaatggtcacctgtgttgtgccataggggttgatggacagaattggatgtaccctgttgcttatggattctttgaggcagaaacaacagaaaactggacatggttctttcagcagttgcgcaaggctgtgggagatcttcctctactagcattgtgttcagatgcttgcaaaggtctaaaaaatgccatgaacactgttttccctcaagctgaaaaaagggagtgtttcagacacctaatgcagaactacgtgaagcaatttgttggatccgagtacatgtatcctgcagctagagcatataggagggaggtgttcgaccattacttttccaatgtccaagaaattcccaaggtgtctagttggttatatgagcatcatgatagtttgtggtatcgtagtgggtttaatccagccatcaagtgcgactatgttaccaacaacatagcagaagtgttcaacaattggattaaggattggaaagatctgcctgtctgtgacttggctgacaagataaggaaggaaatcatggagttgtttcataggaggagggaaataggacagaggttgcaaggtcgaatactaccctccgtggtccatatcctccatgtaaggactagaggtttaggtcacttaacagttaagaaagctgacaattacattgcggaggtgagggataataataatgtgcactctaagcacattgtgaatgctcaattgagacaatgttcatgcaacgagtggcagcatacggggaagccatgtcaccatgcccttcgcttaataacaacacaacaatttagagatgttcggatggaagattttgtggatgactactactcagttgataagttcatgaaggcttactcgagggtagtggagccaattggtgacaaatctttctggcctacagtgccatttgcaaaagaggtgtgtgcttctattgggaagcgtggagttggccgtcaaaggaaaaacatgattaaagggtgcctagagggaggaagtggtaagaagccaaacgaaaatgaaaatgtcaaaactaagaagatgattcgtgggaagttcaagtgtccaaactgtggtgaattgggacacaggaaagccagctacaaatgtcctttgaatggaacaaaaaaacggaaaaggagagcaaggaaaaatgttactaaaggttggttcccaaaagatgttgaggcatgatgatggtgcatgcactagccacacaaccacccccatgtgatgattgtgatgccagtattgcgaaaatctctccactttcatctcccagacctatctagaggctagtgctggaccagtgtaccctaggagctgggtgccaggtgcggtggcgggcggggcctagcaaagcatgacgctgtaggagggatccagtcatccgatacgtcagcactccggcacagcagtaggcatctcggaagctggcagggccacagggcaccacgcccaaggcttagccgcgcaggcactgagcagccaagtagtcaggcagtcagtgagcagcagcagacggcagcaaggctggaagcgcgaagtacctatataggcatataagtttagttcgaccgggagtttacttctctgttatctgtgacttgcccgaccccgacttgatgtgcattgtagattatcagaaattgattaatgatttaatcacagattttaatcaactcaacacgtcgagaagaatatttttgtgctcatagttttttagttcaagcaatgttaatactagtggtacttccctgagttcatatcaatgcttagtcttgggctcctcagaaatgcaaattctttctttggcttgcaattagaaacaagtgttggactgctgataatctggagaagaggggttgcagcacccaagcagctgccctttgtgtgaccaagaaagggaaacgatacaacacatcatcactacctgtgtttttgcccggcaattctggtttcttatctttgacactcgggatgagtcacctcgctcttagggctgatgagcggtcgtttgaggactggtggaggaaggccagcaacagtacaaggataagagaaaagggatcaactgtgtcattattttgggggcttggtgcctctggctgcatagaaatagaacgttttttatgggaatcatccattcagagggtgcagcaacatttcagtgacgagttctcctgttggctcttggtgcgcgccaggagtttgggtcagcttggtctccctagttccatgagtaatatcggatctaatccttttactcctctataacctttttgcttttcttttgtttcttttttctgttttagctatggatgtaagtcatgttttctctctctctaatataaagatgtgcagctctcctgcgcgttctagaaaaaatgaatgtaaaatttgatcttcaattgtttattggcccattataaaattgtacaaagcttctccaaatatgccaattgatccattacaattgtttcataactactgtttatggattttgggactgcagaactgatggattctaacagatgtaacagacctacagtagggatgctaggccaaggagttaaaatatatccacatgttagaatatttcgtaactgtagtaacttcaacattatatagattaatcatgaacttttagttgtattaaacaaataagctctgtatgttcattgttgtagaactaagtttattgtgaatttgtgaacacatatatttgttcatgaaactgcattggatttggactaacaaagtttgtgtatgtgatatgtttttagtctggatctgcccttggtcaagattcaaatatggcttctgcagggttggctcgggtgggtgagtggtgcgactcgtcctctcatgaggctcgtcaccttgagcaacatgccgatcctgcagcagctgcacctggaggagcagctcctgcgccgcacatcggacaactggtgtgtcatcaacgatggcatggcccctgctaccattctcatgggactgcaggagagtctcggagcttgtcgacatacagccggtcctctgggaccaagtgccgattgtgaggaggttcagtggaggtggcacgtcattgttgattggggaacggtggttgtgactttcatttgcaacaagaatgccgttgccgggctgcagatttatggcaaaaaatttgacagatttggtgaatttcatctgcgtgagaatgactatgcatttagtcactcgaaagtttggcggaaatgctcaatcaataacaaaaaatcgttgggttcatcacacgtcgttcttgtgggattatgatgtaaaaaatatggattatctcaaaatcccaaagcgtgcacctgaatatcgactggcaagaaaccacagatttcttgtgccgcatgaaggagtacataccttcgcggtcagttttcaccgatgaggtcactgcggccctgggagaacacttctcagttcagcccgtggatctacaagcagttctttccggtgatgaaggatccgtgccttctacaaagctgctgtcacaacaggacctagaaagaaattgtttcgtccaaagaatcccttaacaatatagaaagttgaagcgtgaccatgcttgtcgtttttgttgtgaaatatgagcagttttgtcgagctgtgaattcattcaaacattatggtcaacccagtacgtacatacgaatgcccaccaccatctttagtaacaaatggttatgttttggattgtaggtctaccgttccaagcttgggttacacgttatttgcctatgggctctagaccgagtgctaaaactatgagagactggctccaacatactctgtaaatggttatgtactctaaattataaagaaattttttgtcttcttatttcagcagcgtcttttaaactacttatttcagcagcagcgtcttttaaac

SEQ ID NO: 52139 - DNA, 4698 bp, Zea Mays
tatgagcgcgcgctaggttctctctcgtcgtctctcgtggcggctggcgacgactggggaccgccggtaggcgcccaggccttcgtcgcgctggtctttctagggcccttcgccggcgacgatcaccctccgcgaccagagcttgtagaggttatggaaggtatgggtgtgccttcaccaccgacagttgggactccgtcggcctcgccctgccgcattacgtcccccgttgatgataccaatgcgtcgcttggccaagaaccagagtgcgcattgacatatatcagacaggacgatcctgacacattcattatctcgggaaattttcatccaaggcatcaaatcgattgggattcaattgaagtagaagaaaggtggaatgaggaaggaagacaggatgttactagtgaacgaggattgtatattcaactcggtttgcataatgaagatgagagggtatttaagcaaagggaagatgattcaagtgctcattgtgctggaaataatagggaagaatttcacgatgaagcttcaactgccatgccttgttctgattttgtattagatgggacaaggactatctatgatatgaacaatcctgtaatggagcctggtagcttgtacgcatcaatggagcagtttagacttgcaattagacagtacgccataaataaagaatttgagttgggcattgaggctaccaacaagactagattcagagggtactgtaaagggcctgattgtccttggagcattcatgcgaggtctgagatgaaaggatcacccactattcaagttattgtcttaaacgatgagcacacatgtacatcgagcgggagacgcaagacaacgacaccaacaggtgcttgggttgcggcaagggctcttccactacttatgaaaaaaccacatatgggtgctaaggagttacaaagtatgttgcaagatacatttggatgcactattacatatgatacaatttggcatgggaaagagaaagctctgaagcaattgtttgggagttgggaagagagtttccaacttctatggtcttggagagaagcagttatacagaagtcaccggatagtattatcgagttggatgttaaaatggatgagggccggccattttttagcagatttttttgtgcacttggtccttgcattactggtttcaaagagggatgtagaccttatcttagtgttgactcaactgctcttaatggaagatggaatggtcacctgtgttgtgccataggggttgatggacagaattggatgtaccctgttgcttatggattctttgaggcagaaacaacagaaaactggacatggttctttcagcagttgcgcaaggctgtgggagatcttcctctactagcattgtgttcagatgcttgcaaaggtctaaaaaatgccatgaacactgttttccctcaagctgaaaaaagggagtgtttcagacacctaatgcagaactacgtgaagcaatttgttggatccgagtacatgtatcctgcagctagagcatataggagggaggtgttcgaccattacttttccaatgtccaagaaattcccaaggtgtctagttggttatatgagcatcatgatagtttgtggtatcgtagtgggtttaatccagccatcaagtgcgactatgttaccaacaacatagcagaagtgttcaacaattggattaaggattggaaagatctgcctgtctgtgacttggctgacaagataaggaaggaaatcatggagttgtttcataggaggagggaaataggacagaggttgcaaggtcgaatactaccctccgtggtccatatcctccatgtaaggactagaggtttaggtcacttaacagttaagaaagctgacaattacattgcggaggtgagggataataataatgtgcactctaagcacattgtgaatgctcaattgagacaatgttcatgcaacgagtggcagcatacggggaagccatgtcaccatgcccttcgcttaataacaacacaacaatttagagatgttcggatggaagattttgtggatgactactactcagttgataagttcatgaaggcttactcgagggtagtggagccaattggtgacaaatctttctggcctacagtgccatttgcaaaagaggtgtgtgcttctattgggaagcgtggagttggccgtcaaaggaaaaacatgattaaagggtgcctagagggaggaagtggtaagaagccaaacgaaaatgaaaatgtcaaaactaagaagatgattcgtgggaagttcaagtgtccaaactgtggtgaattgggacacaggaaagccagctacaaatgtcctttgaatggaacaaaaaaacggaaaaggagagcaaggaaaaatgttactaaaggttggttcccaaaagatgttgaggcatgatgatggtgcatgcactagccacacaaccacccccatgtgatgattgtgatgccagtattgcgaaaatctctccactttcatctcccagacctatctagaggctagtgctggaccagtgtaccctaggagctgggtgccaggtgcggtggcgggcggggcctagcaaagcatgacgctgtaggagggatccagtcatccgatacgtcagcactccggcacagcagtaggcatctcggaagctggcagggccacagggcaccacgcccaaggcttagccgcgcaggcactgagcagccaagtagtcaggcagtcagtgagcagcagcagacggcagcaaggctggaagcgcgaagtacctatataggcatataagtttagttcgaccgggagtttacttctctgttatctgtgacttgcccgaccccgacttgatgtgcattgtagattatcagaaattgattaatgatttaatcacagattttaatcaactcaacacgtcgagaagaatatttttgtgctcatagttttttagttcaagcaatgttaatactagtggtacttccctgagttcatatcaatgcttagtcttgggctcctcagaaatgcaaattctttctttggcttgcaattagaaacaagtgttggactgctgataatctggagaagaggggttgcagcacccaagcagctgccctttgtgtgaccaagaaagggaaacgatacaacacatcatcactacctgtgtttttgcccggcaattctggtttcttatctttgacactcgggatgagtcacctcgctcttagggctgatgagcggtcgtttgaggactggtggaggaaggccagcaacagtacaaggataagagaaaagggatcaactgtgtcattattttgggggcttggtgcctctggctgcatagaaatagaacgttttttatgggaatcatccattcagagggtgcagcaacatttcagtgacgagttctcctgttggctcttggtgcgcgccaggagtttgggtcagcttggtctccctagttccatgatctggatctgcccttggtcaagattcaaatatggcttctgcagggttggctcgggtgggtgagtggtgcgactcgtcctctcatgaggctcgtcaccttgagcaacatgccgatcctgcagcagctgcacctggaggagcagctcctgcgccgcacatcggacaactggtgtgtcatcaacgatggcatggcccctgctaccattctcatgggaaggaagattcaatcatgtattggtctccttgtgccccatgttgagttgctaatttggttttgcgtgatggcaggactgcaggagagtctcggagcttgtcgacatacagccggtcctctgggaccaagtgccgattgtgaggaggttcagtggaggtggcacgtcattgttgattggggaacggtggttgtgactttcatttgcaacaagaatgccgttgccgggctgcagatttatggcaaaaaatttgacagatttggtgaatttcatctgcgtgagaatgactatgcatttagtcactcgaaagtttggcggaaatgctcaatcaataacaaaaaatcgttgggttcatcacacgtcgttcttgtgggattatgatgtaaaaaatatggattatctcaaaatcccaaagcgtgcacctgaatatcgactggcaagaaaccacagatttcttgtgccgcatgaaggagtacataccttcgcggtcagttttcaccgatgaggtcactgcggccctgggagaacacttctcagttcagcccgtggatctacaagcagttctttccggtgatgaaggatccgtgccttctacaaagctgctgtcacaacaggacctagaaagaaattgtttcgtccaaagaatcccttaacaatatagaaagttgaagcgtgaccatgcttgtcgtttttgttgtgaaatatgagcagttttgtcgagctgtgaattcattcaaacattatggtcaacccagtacgtacatacgaatgcccaccaccatctttagtaacaaatggttatgttttggattgtaggtctaccgttccaagcttgggttacacgttatttgcctatgggctctagaccgagtgctaaaactatgagagactggctccaacatactctgtaaatggttatgtactctaaattataaagaaattttttgtcttcttatttcagcagcgtcttttaaactacttatttcagcagcagcgtcttttaaac

SEQ ID NO: 52140 - DNA, 4585 bp, Zea Mays
tatgagcgcgcgctaggttctctctcgtcgtctctcgtggcggctggcgacgactggggaccgccggtaggcgcccaggccttcgtcgcgctggtctttctagggcccttcgccggcgacgatcaccctccgcgaccagagcttgtagaggttatggaaggtatgggtgtgccttcaccaccgacagttgggactccgtcggcctcgccctgccgcattacgtcccccgttgatgataccaatgcgtcgcttggccaagaaccagagtgcgcattgacatatatcagacaggacgatcctgacacattcattatctcgggaaattttcatccaaggcatcaaatcgattgggattcaattgaagtagaagaaaggtggaatgaggaaggaagacaggatgttactagtgaacgaggattgtatattcaactcggtttgcataatgaagatgagagggtatttaagcaaagggaagatgattcaagtgctcattgtgctggaaataatagggaagaatttcacgatgaagcttcaactgccatgccttgttctgattttgtattagatgggacaaggactatctatgatatgaacaatcctgtaatggagcctggtagcttgtacgcatcaatggagcagtttagacttgcaattagacagtacgccataaataaagaatttgagttgggcattgaggctaccaacaagactagattcagagggtactgtaaagggcctgattgtccttggagcattcatgcgaggtctgagatgaaaggatcacccactattcaagtaatgttattgtcttaaacgatgagcacacatgtacatcgagcgggagacgcaagacaacgacaccaacaggtgcttgggttgcggcaagggctcttccactacttatgaaaaaaccacatatgggtgctaaggagttacaaagtatgttgcaagatacatttggatgcactattacatatgatacaatttggcatgggaaagagaaagctctgaagcaattgtttgggagttgggaagagagtttccaacttctatggtcttggagagaagcagttatacagaagtcaccggatagtattatcgagttggatgttaaaatggatgagggccggccattttttagcagatttttttgtgcacttggtccttgcattactggtttcaaagagggatgtagaccttatcttagtgttgactcaactgctcttaatggaagatggaatggtcacctgtgttgtgccataggggttgatggacagaattggatgtaccctgttgcttatggattctttgaggcagaaacaacagaaaactggacatggttctttcagcagttgcgcaaggctgtgggagatcttcctctactagcattgtgttcagatgcttgcaaaggtctaaaaaatgccatgaacactgttttccctcaagctgaaaaaagggagtgtttcagacacctaatgcagaactacgtgaagcaatttgttggatccgagtacatgtatcctgcagctagagcatataggagggaggtgttcgaccattacttttccaatgtccaagaaattcccaaggtgtctagttggttatatgagcatcatgatagtttgtggtatcgtagtgggtttaatccagccatcaagtgcgactatgttaccaacaacatagcagaagtgttcaacaattggattaaggattggaaagatctgcctgtctgtgacttggctgacaagataaggaaggaaatcatggagttgtttcataggaggagggaaataggacagaggttgcaaggtcgaatactaccctccgtggtccatatcctccatgtaaggactagaggtttaggtcacttaacagttaagaaagctgacaattacattgcggaggtgagggataataataatgtgcactctaagcacattgtgaatgctcaattgagacaatgttcatgcaacgagtggcagcatacggggaagccatgtcaccatgcccttcgcttaataacaacacaacaatttagagatgttcggatggaagattttgtggatgactactactcagttgataagttcatgaaggcttactcgagggtagtggagccaattggtgacaaatctttctggcctacagtgccatttgcaaaagaggtgtgtgcttctattgggaagcgtggagttggccgtcaaaggaaaaacatgattaaagggtgcctagagggaggaagtggtaagaagccaaacgaaaatgaaaatgtcaaaactaagaagatgattcgtgggaagttcaagtgtccaaactgtggtgaattgggacacaggaaagccagctacaaatgtcctttgaatggaacaaaaaaacggaaaaggagagcaaggaaaaatgttactaaaggttggttcccaaaagatgttgaggcatgatgatggtgcatgcactagccacacaaccacccccatgtgatgattgtgatgccagtattgcgaaaatctctccactttcatctcccagacctatctagaggctagtgctggaccagtgtaccctaggagctgggtgccaggtgcggtggcgggcggggcctagcaaagcatgacgctgtaggagggatccagtcatccgatacgtcagcactccggcacagcagtaggcatctcggaagctggcagggccacagggcaccacgcccaaggcttagccgcgcaggcactgagcagccaagtagtcaggcagtcagtgagcagcagcagacggcagcaaggctggaagcgcgaagtacctatataggcatataagtttagttcgaccgggagtttacttctctgttatctgtgacttgcccgaccccgacttgatgtgcattgtagattatcagaaattgattaatgatttaatcacagattttaatcaactcaacacgtcgagaagaatatttttgtgctcatagttttttagttcaagcaatgttaatactagtggtacttccctgagttcatatcaatgcttagtcttgggctcctcagaaatgcaaattctttctttggcttgcaattagaaacaagtgttggactgctgataatctggagaagaggggttgcagcacccaagcagctgccctttgtgtgaccaagaaagggaaacgatacaacacatcatcactacctgtgtttttgcccggcaattctggtttcttatctttgacactcgggatgagtcacctcgctcttagggctgatgagcggtcgtttgaggactggtggaggaaggccagcaacagtacaaggataagagaaaagggatcaactgtgtcattattttgggggcttggtgcctctggctgcatagaaatagaacgttttttatgggaatcatccattcagagggtgcagcaacatttcagtgacgagttctcctgttggctcttggtgcgcgccaggagtttgggtcagcttggtctccctagttccatgaggttggctcgggtgggtgagtggtgcgactcgtcctctcatgaggctcgtcaccttgagcaacatgccgatcctgcagcagctgcacctggaggagcagctcctgcgccgcacatcggacaactggtgtgtcatcaacgatggcatggcccctgctaccattctcatgggactgcaggagagtctcggagcttgtcgacatacagccggtcctctgggaccaagtgccgattgtgaggaggttcagtggaggtggcacgtcattgttgattggggaacggtggttgtgactttcatttgcaacaagaatgccgttgccgggctgcagatttatggcaaaaaatttgacagatttggtgaatttcatctgcgtgagaatgactatgcatttagtcactcgaaagtttggcggaaatgctcaatcaataacaaaaaatcgttgggttcatcacacgtcgttcttgtgggattatgatgtaaaaaatatggattatctcaaaatcccaaagcgtgcacctgaatatcgactggcaagaaaccacagatttcttgtgccgcatgaaggagtacataccttcgcggtcagttttcaccgatgaggtcactgcggccctgggagaacacttctcagttcagcccgtggatctacaagcagttctttccggtgatgaaggatccgtgccttctacaaagctgctgtcacaacaggacctagaaagaaattgtttcgtccaaagaatcccttaacaatatagaaagttgaagcgtgaccatgcttgtcgtttttgttgtgaaatatgagcagttttgtcgagctgtgaattcattcaaacattatggtcaacccagtacgtacatacgaatgcccaccaccatctttagtaacaaatggttatgttttggattgtaggtctaccgttccaagcttgggttacacgttatttgcctatgggctctagaccgagtgctaaaactatgagagactggctccaacatactctgtaaatggttatgtactctaaattataaagaaattttttgtcttcttatttcagcagcgtcttttaaactacttatttcagcagcagcgtcttttaaac

SEQ ID NO: 52141 - DNA, 4720 bp, Zea Mays
atatgagcgcgcgctaggttctctctcgtcgtctctcgtggcggctggcgacgactggggaccgccggtaggcgcccaggccttcgtcgcgctggtctttctagggcccttcgccggcgacgatcaccctccgcgaccaggatccccaccgtcgctggccttcttcgaggcccagatccccattgtaggccccttgcttcttctcctcaaccggagcttccaaaactcccttgcagagcttgtagaggttatggaaggtatgggtgtgccttcaccaccgacagttgggactccgtcggcctcgccctgccgcattacgtcccccgttgatgataccaatgcgtcgcttggccaagaaccagagtgcgcattgacatatatcagacaggacgatcctgacacattcattatctcgggaaattttcatccaaggcatcaaatcgattgggattcaattgaagtagaagaaaggtggaatgaggaaggaagacaggatgttactagtgaacgaggattgtatattcaactcggtttgcataatgaagatgagagggtatttaagcaaagggaagatgattcaagtgctcattgtgctggaaataatagggaagaatttcacgatgaagcttcaactgccatgccttgttctgattttgtattagatgggacaaggactatctatgatatgaacaatcctgtaatggagcctggtagcttgtacgcatcaatggagcagtttagacttgcaattagacagtacgccataaataaagaatttgagttgggcattgaggctaccaacaagactagattcagagggtactgtaaagggcctgattgtccttggagcattcatgcgaggtctgagatgaaaggatcacccactattcaagttattgtcttaaacgatgagcacacatgtacatcgagcgggagacgcaagacaacgacaccaacaggtgcttgggttgcggcaagggctcttccactacttatgaaaaaaccacatatgggtgctaaggagttacaaagtatgttgcaagatacatttggatgcactattacatatgatacaatttggcatgggaaagagaaagctctgaagcaattgtttgggagttgggaagagagtttccaacttctatggtcttggagagaagcagttatacagaagtcaccggatagtattatcgagttggatgttaaaatggatgagggccggccattttttagcagatttttttgtgcacttggtccttgcattactggtttcaaagagggatgtagaccttatcttagtgttgactcaactgctcttaatggaagatggaatggtcacctgtgttgtgccataggggttgatggacagaattggatgtaccctgttgcttatggattctttgaggcagaaacaacagaaaactggacatggttctttcagcagttgcgcaaggctgtgggagatcttcctctactagcattgtgttcagatgcttgcaaaggtctaaaaaatgccatgaacactgttttccctcaagctgaaaaaagggagtgtttcagacacctaatgcagaactacgtgaagcaatttgttggatccgagtacatgtatcctgcagctagagcatataggagggaggtgttcgaccattacttttccaatgtccaagaaattcccaaggtgtctagttggttatatgagcatcatgatagtttgtggtatcgtagtgggtttaatccagccatcaagtgcgactatgttaccaacaacatagcagaagtgttcaacaattggattaaggattggaaagatctgcctgtctgtgacttggctgacaagataaggaaggaaatcatggagttgtttcataggaggagggaaataggacagaggttgcaaggtcgaatactaccctccgtggtccatatcctccatgtaaggactagaggtttaggtcacttaacagttaagaaagctgacaattacattgcggaggtgagggataataataatgtgcactctaagcacattgtgaatgctcaattgagacaatgttcatgcaacgagtggcagcatacggggaagccatgtcaccatgcccttcgcttaataacaacacaacaatttagagatgttcggatggaagattttgtggatgactactactcagttgataagttcatgaaggcttactcgagggtagtggagccaattggtgacaaatctttctggcctacagtgccatttgcaaaagaggtgtgtgcttctattgggaagcgtggagttggccgtcaaaggaaaaacatgattaaagggtgcctagagggaggaagtggtaagaagccaaacgaaaatgaaaatgtcaaaactaagaagatgattcgtgggaagttcaagtgtccaaactgtggtgaattgggacacaggaaagccagctacaaatgtcctttgaatggaacaaaaaaacggaaaaggagagcaaggaaaaatgttactaaaggttggttcccaaaagatgttgaggcatgatgatggtgcatgcactagccacacaaccacccccatgtgatgattgtgatgccagtattgcgaaaatctctccactttcatctcccagacctatctagaggctagtgctggaccagtgtaccctaggagctgggtgccaggtgcggtggcgggcggggcctagcaaagcatgacgctgtaggagggatccagtcatccgatacgtcagcactccggcacagcagtaggcatctcggaagctggcagggccacagggcaccacgcccaaggcttagccgcgcaggcactgagcagccaagtagtcaggcagtcagtgagcagcagcagacggcagcaaggctggaagcgcgaagtacctatataggcatataagtttagttcgaccgggagtttacttctctgttatctgtgacttgcccgaccccgacttgatgtgcattgtagattatcagaaattgattaatgatttaatcacagattttaatcaactcaacacgtcgagaagaatatttttgtgctcatagttttttagttcaagcaatgttaatactagtggtacttccctgagttcatatcaatgcttagtcttgggctcctcagaaatgcaaattctttctttggcttgcaattagaaacaagtgttggactgctgataatctggagaagaggggttgcagcacccaagcagctgccctttgtgtgaccaagaaagggaaacgatacaacacatcatcactacctgtgtttttgcccggcaattctggtttcttatctttgacactcgggatgagtcacctcgctcttagggctgatgagcggtcgtttgaggactggtggaggaaggccagcaacagtacaaggataagagaaaagggatcaactgtgtcattattttgggggcttggtgcctctggctgcatagaaatagaacgttttttatgggaatcatccattcagagggtgcagcaacatttcagtgacgagttctcctgttggctcttggtgcgcgccaggagtttgggtcagcttggtctccctagttccatgatctggatctgcccttggtcaagattcaaatatggcttctgcagggttggctcgggtgggtgagtggtgcgactcgtcctctcatgaggctcgtcaccttgagcaacatgccgatcctgcagcagctgcacctggaggagcagctcctgcgccgcacatcggacaactggtgtgtcatcaacgatggcatggcccctgctaccattctcatgggactgcaggagagtctcggagcttgtcgacatacagccggtcctctgggaccaagtgccgattgtgaggaggttcagtggaggtggcacgtcattgttgattggggaacggtggttgtgactttcatttgcaacaagaatgccgttgccgggctgcagatttatggcaaaaaatttgacagatttggtgaatttcatctgcgtgagaatgactatgcatttagtcactcgaaagtttggcggaaatgctcaatcaataacaaaaaatcgttgggttcatcacacgtcgttcttgtgggattatgatgtaaaaaatatggattatctcaaaatcccaaagcgtgcacctgaatatcgactggcaagaaaccacagatttcttgtgccgcatgaaggagtacataccttcgcggtcagttttcaccgatgaggtcactgcggccctgggagaacacttctcagttcagcccgtggatctacaagcagttctttccggtgatgaaggatccgtgccttctacaaagctgctgtcacaacaggacctagaaagaaattgtttcgtccaaagaatcccttaacaatatagaaagttgaagcgtgaccatgcttgtcgtttttgttgtgaaatatgagcagttttgtcgagctgtgaattcattcaaacattatggtcaacccagtacgtacatacgaatgcccaccaccatctttagtaacaaatggttatgttttggattgtaggtctaccgttccaagcttgggttacacgttatttgcctatgggctctagaccgagtgctaaaactatgagagactggctccaacatactctgtaaatggttatgtactctaaattataaagaaattttttgtcttcttatttcagcagcgtcttttaaactacttatttcagcagcagcgtcttttaaac
